United States Patent Application Publication US 2004/0166519 A1 - sequence listing, part 2

SEQ ID NO: 5621 - DNA, 241805 bp, Homo sapiens
  misc_feature (1)...(241805): n = A,T,C or G, or insertion/deletion polymorphism (see Tables 1-2)
tgaagaaagtcattggtagcttgatggggatggcattgaatctataaattaccttgggcagtatggccattttcacgatattgattcttcctacccatgagcatggaatgttcttccatttgtttgtatcctcttttatttcattgagcagtggtttgtagttctccttgaagaggtccttcacatcccttgtaagttgcattcctaggtattttattctctttgaagcaattgtgaatgggagttcactcatgatttggctctctgtttgtctgttattgatgtataggaatgcttgtgatttttgcacattgattttgtatcctgagactttgctgacgttgcttatcagctcaaggagattttgggctgagacgatggggttttctaaatatacaatcatgtcatctgcaaacagggacaatttgacttcctcttttcctaattgaataccctttatttctttctcctgcctgattgccctggccagaacttccaacactatgttgaataggagtggagagagaggacattctgtcttgtgccagttttcaaagggaatgcttccagtttttgcccattcagtatgatattggctgtgggtttgtcataaatagctcttattattttgagatacatcccatcaatacctaatttattgagattgtttagcatgaagggctgttgaattttgtcgaaggccttttctgcatctattgagataatcatgtagtttttgtctttggttctgtttatatgctggattacatttattgatttgtgtatgttgaaccagtcttgcatcccagggatgaagtccacttgatcatggtggataagctttttgatgtgctgctggattcagtttgccagaattttattgaggatttttgcatcaatgttcatcagggatattcgtcgaaaattctctttttttttgttgtgtctctgccaggttttggtatcaggatgatgctggcctcataaaatgagttagggaggtttccctctttttctattgattggaatagtttcagaaggaatggtaccagctcctccttgtacctctggtagaatttggctgtgaatcaatctggtcctggactttttttggttggtaggctattaattattgcctcaatttcagagcctgttattggtctattcagggattcaacttcttcctggtttagtcttgggagggttacctacgtatcttaatctcaccttcaaggctgcgaaagcacgtagtacatgttcgaagaaccaagtggaggccagggtggctgaactgtcaagtaaagtttgagatattgtcaaaggcccaatcatgcaagggtttgtaggctatgctaaaaatttttcattttattgtggaaaaatggaaaagtgattgaaaggttgtaatcaggcaagtgtatggttggcataatgactaaaaaagattattctggttgcagagggagaagaattttgagaaggccatgggaacacaacaaatgtgacaagtgctgggctgagggaagtaaagagagttctgagggcatgcatatctgattttccccataacatcctctagagatacttttttcccagtccaagatccaccctagggtcatgcactgcatatttctaaactgcatatctcagcctttctttatcttttatgaccttgccatttttgaagtatacaaaatatactgcaaatactgtactttagtacttaaatgtcccttagtttggacattctaaaaaatgagaaaacattggtttgactgatgttttctcatgcttagatttggggcatgcacagtaataccacagaagtgctgctgtgtccttcagagtgtgtcacaccaggaggaacatgatgtcagtttgcctcatattagttttgattgttgtgttgactttgattccttggttcaatgtagagcctattgtatttaccacatttctagcttctataaatataatgccttaatatatataggggagagagagacaggttctcactggagtgcagtgatgtgatcatagctcactgcagcctccaactcctaggctcaagcctcaagtgattctcctgcctcaacctcccaatgtgctgggattacaggcataaaccactgtgctgggcctaaacttcatgtttaacatctgtcctgcatgcacatgccatatacactttgttctagataatctgttaatatgcctgacatattagtcatcttgctttgacctcctgcttgttttataaatacaaattagtcagtcctaaacctgcttactctgccttgtctgttcctttaggtggaaaccatagtaaaggagcttgcccacacttctccccttgccctctgcttccctgtgtggtcccttgaggcaagatgtgtactccttctcttgggatctgtgaatataacaaactatattttcaatggcagttatcttttggtctgttgactttatcatatttaaataataatgaaacatattaaaatatctgacatatttttctgcttaaagtcactttttccctttttaatgaataagtaatttgtggggagatactttaaacttttttggctgagatgcatatgagaaatatattttacatggcgacacagtgtgtgtgtgtgtgtgtgtgtgtgtgtgtgtgtgtattggtttgggctccatcctgctgagtttgaggccttaggacattggattggagctgttcagggggcagttggctctcaggaggaaactcaggaggcactcaggaggamacacacacatcacacacacacacacacacacacaagaaacagtagtgttataaagttatacatatcttttccacatgaaagttattttggtttctatgttgttatatttcatttgaatataattcttgccttgacctgctaaattgatttcattaccctctaaaaagtaattacctctgtttgcaagcactagtttgatagaactaccaagttgaattgtctggttgccaaatggaaagtagatgggagggggcaaaactgatagcaaggagctcattctaaggctctccctataatttagattgatgagtggattgataaatttgagttaacagaatttcatgattgattggcaatgggggtggaaaaaagaaggagtcaagaatgatgtaaatttcagcttggcttctggggcaatggtggtgctgaagcttcttggtttcactttcacctgtctctttcggttgactgctctgaaaagtcctatatacatatatggagagagaaatgtgaaaactaaagaaattatctttttgcattatagagaaacactgctggcttaaattgcaactgaattaacctgggctttcccagatactggtccatagatttaatcaccccaatctagtaacaggcattctcaggtatggatgccagagataaacacgtgcatggtgcaggctgttttcaaacgtcacgaattggggattgcattgagaaaatgggttattctagtggaaaagtgtgtgggtccacatacagagtgctgcgaatgatgggctgtgctccgctaggtggtcccccatccctaccccttttctgctctcctacctcccgttctccctccctcctttcccctcttctgcgttattctgggattaacggcggggtcggccccatacacaaacgcagctggctagtacggtcagcctgagccctgctgtgcaaccacgtcaggaattccagtaagttggcaacactggagcacaaagacaacaacaattgaggaactcttcagtacagaaaggaatgtttggagccctggctgctacagtgaaagggcacacacacacacacacacacacacacacacacacacacacacacacacacacacacacgctcgcgcctgcgcgcccacgggcgcactggagggagcccagcccctcccgcactcgcgctcctccctcccgccagccggcggccgctctttgtaagtcggaggtgcggggacgctcattgactatgcagcgcggccccagcgggcgtcggaccggcttgaccccggcgcggtctcgtaccatcgcctcggccgcccggaaccggcataaatcacccgcgaagactggagtgcagcatcaagccccctcgccgcctccctcctcccgctccggtccggtcgccccctccctccccagaccccagctctcctgtccccagtcctgtctcctccgcgccgcacagcgcccaacactatgcagggaggcaaatagagaaccagtgactttggccagagcacagacctctggatttcccaatccaggaatctctcccactctttcccacaacgctgcccgctccacctttttttctttaagcctaagttttctctttttgtgtctatttatctctttttgtctttccgaagtaacacctatcctttccctcccctagcccccacacctaaagctgcgcctaccactgcagcccacggaagctacgcgatccggactgttggggtcagcagagccccggacgacctgtgccccggggaaaggggctggcagtaattggcaggttctcgcccctggggaagggaggcagcgggaacctgtccagcgaccacgtgcgttcagggctgtctcctccatgcgtcacggccccttcgctggagggaaagggctcctgacttcttggaccaggatccggagcctgggactagctgccgcgctggttcaggggctggagctggagatgatgggatggcctcaggcccgcaaacagccccttctcacacagggttcccaccaccgggaaataacttgcatcaaccctccttttttacccctccctgtgggctctgatgtcacgtacaggctgaggacgtgcgctgagggcgggtgtaaggccacttgtgcttttggcttccgggccccttgccagcctgtccaaagcggccccaaagaagggaggctaggggttccctgaacctctcgtgtttctccctcttataaaagggtaccggaaccatggagaagacgttcgctctttttcaattttgcttcaaaatgagcagacttgtaagaagcacgatctggccatgacacctgtagatgtggtgctgaataattgctaaataaggatccaacctccccaacaaagatccacctccctctctaatttgtaaaaacacaaagcaccccatctcagcagcctgtatcctatcaggggaaaccaagatatccgaaggagcctagagagatcaggccaggaatgaaggtcacagatctccatccagcaggctctttactccttcccttccctacccccgcctctttccctttctttctctttccttcatttttacttgtctggttgtgctttccttttccatttcttattttttctttctcttctctattcttgactttcctcctcgtccatttctttccattgctcatttagtaaaactgcgtccgtgcagatttccccgtgagccgcctcgccggcttctgtgcggggcaaaccctgcggagaggcgagggcagcgcgtgtgcacgtgtgagtgtgcctgtgagagtgtgcgcacaggagtgtgctcttgtatgcacgcgtaaaggggactgtgtatgtcggcgttgaagtgtgactgtggaatgtgcgcgcgtgtgtgactggcgtgtatgagtgaatctgtgtcagttggtgtgacacttaggagtgcatgcgcctgtatgagtgcgtgtgtgagtgtgcacacgcctgtgtgagtgtccctgtgtgagcacgcgtgtgttcgagtgcccactcctccccgcgctgcaaagtgcagggggcgggccgggcggcagggggcctgcccgctggattcccgcatgcttgttccggggcggtcgggtctaaagggctttatgcactgtctggagggtggggactggcgcgggtagaaaacgggatgcctcgggcgtgggggcaggcttttggccactaggagctggcggaggtgcagacctaaaggagcgttcgctagcagaggcgctgccggtgcggtgtgctacgcgcgcccacctcccggggaaggaacggcgaggccggggaccgtcgcggagatggatcgcgggccggcagcagtggcgtgcacgctgctcctggctctcgtcgcctgcctagcsccggccagtggccaaggtaagarcccagccrgagcctctcgtggagcccccacttccccggctgtggcagggtcgggtccgcgggaggccggaggggagagcgtccgggcaggggctagggccgggcggcggcgcgggagctgctcccggtggggcgctcaggttgcttcgcgaagccggagsgggmgcgcccctcttcgctcrccaggaactgagcggcagcaaacttgagaaagcagccccgccagtttcggtgacagcgcaccccacggagaccctgtctttgttcccacgggcgttggtccgatgctcctrgaaagcactttgcgggagaacgaggttctccgccgtttgcagcctgccctccctagcggagttctctgctgggcggcgcggtcccgggctctgctcagagcgcagctttccacctgcagcgcccctcccgggatcccttcgcgcgcccagggccgcgggccagagcactcctcccaccaccggcgaaacttggtcccgcggtgacccccagagaccgctctcaccatacagatcatttacgagccaagataaggccgggaggtgggattggccgagagagtggctgagggactggagtcttttcttgaagttttcctttccagctgggagctgggggcttttgtgttgatgaatggggcccgtctgcatggccagagttttggggatcgaatgcagaaagtttctagtatgaagtgctttaaacttctctcaagttgtccgatagtttatgttttaacagaaacagagaagagggaaagagagggagaaagaagcggagagaataaaactagtaagaagggaagaggagagagcgtaagagaagcaaataggaataaggaaagaaggagggaagagaacgactggggcgggagaagagagagagagaggacagagaggagagagacagagagagagagagagagagagagagagagagagagagagagacagagagagacagagagagacagagagagacagagagacagagacccggccgaggatgaatgggaagggcgaggaggaggctggaaccggcgagctctccccctggctttgcgttgctaggtagcagccgggagctgcgtgtgaccgaccaccagacagacagaggggacgctgctgccaccgcagggactaatctgtctgtggggatgggagagtcccccctttcccctcctgctccttccctcccgtcggacaacttaattgccctacaatgaaaatgaaacccctattgttgtaggattagccaaagcaataaattgattttcctggatcacatattggggttgatgggtggggaatgtggaagcccccatttacggaggagtgaggggagggcttgtggatgggccgtggcatgtattcaaatggttaatctgctttctttcctcaattcttagcgtaagctccttagagggaatcaagtaagtaattatacagcaactcctagcagcacccatttcagacttcctgggaagaagtttggaaaccctaacaaaccccacaggtcttgcaaaagtcttcagaaaggcaggagaggcaaggagagatcattaataaccttcctttgaacaccctttctcagtgttggtaacgcagaaagagggtttattattattgtgcagagtttgcacaatgcttagggttgtatctcatgtcctaaatatagctataggatttactatatgttcctgtcagtgcctggcaaaaggaaatcttaccttgattcatctatgtccttgtacaaccaaaacagatattctttttcctgggttgatgatttagtcactaaataaccaatacctactcttcttgatagttttttgcacccatccatcttccattctatgataataatatataataataatgtgtatagtaatagtaacctagcatacacatatatgtggcaggctttgttctaagcactttatrcttattgactcaattaatcttcataatatcccttggaagtaagtactcttattatcactgttttacagatgagaaagtggaggcacagaacaattcagtaatttgtctcagttcatactgctagaaaatggcaaactcaagggattctgaattcagagtctataattgctacagtatacagtgtctggttttctctctctctctctctttttttttttttttttttttttgagagagacagaatctcgctctgtcacccaggctggagtgcagtggtgcaatctcggctcactgcaacctctgcctcccaggttcaagcgatcctcacacctcagcctcccaagtagctgggactacaagcccggggcaccatgcccagctaatattttgtatttttagtagaggcagggttttgctatgttggccaggccagtcttgaactcctgacctcaagtgatctgcccgcctaggcctcccaaagtgctaggattacaggtgtgagccactgcacctggcccgatttctcttttttcttttgtacaaaaaatgtcatgctccctaacttactgtccatgtttgaggttcccaaagaagctgagggrcaatatgcaactcgtaccacctgctgcttcataactgtggatctttttccagaatctctcctcaggtttctaagaccagaacccaagtctccccattcccagtcttcctacttgatcattttaagacgcatttcctctgaatgtcctctgcctgatacgttgagatttctagaatcctgttgtaatgatcctgacttaatatatgaagtaaaatccaatgagattgtaacagcctttatttaagcactaccttttaggtaggctaccattgcaaacttcgcatcactaaaaattggaggggaaaaaaaagagctctgagtattctatgtttagtctttgaaaaaaattataccacatctgttgttaaaaattatttgcattttccttatcttttgtgtaatgcttttcaagaaaaaacattttgcagagtctgaactcgagtcaagctgttgggttccaacattggctttaccactttctagctgtgtgaccttgggaaagtcaaccaactttgcatagctcagatggcttatctgcaaaattgacaagataataagagaatttacccaatgacatcttgtaagcataaagagataaaatatgccaagtgcttagcatggtgtaaagcatatagacagtgaaaataaactagaaaataatctaaaaatayaatatttttattatatttatcaacccttaaagtaacatattgttttgcttcctattcctatttccatttccaattttcaaatatacaaaggaaagtcttctttaagcatttttcactaacagttctctgaagacttctcagaccctagcatgtgattggaagattttttcytttttttttttttttttgagaaaatcgtattggccttaaacaaagttgtattctgtttactaattaaaaaaacttatttttcaaaaatagaaatggggtctcactgtgttgcccaggctggtcttgaactcttggcctcaaatgatcctcctacctctgcttcccaaagtgctgacattayaggcaggagccaccttacctggtccaacattatattctttaatccaataaaaatgtggtaatgtttttaagagttagtatcagcttttatgacaattacatcttcacatgaagtttatatgtttaaaaggattgtgggggcaatagcaaacttgtatcgtttttattccatcacaactctggaacctcactgctgctttaatttcacagttgttggcttctctttctctacttgaaaaagtttctctttaccagtcttcataagacttctgcctgaactcccttcagtcatgcacctgtctcattttaatagaaactcagactttttacagctagagggaaccttagatatcaactggtctgcttgcattttttttttcttacagataagcaattagcccaggagggagaagaaaggggctgagaggatgaaagggaaggcggttaataggtttcttgcctaaggacatctagcctgtgayagagctaagatataaatttgcagtggaccattttttagattcatgccttctgaatgtccccagcctgtttggttggttgagatttctagattccttttggaatcctgacttgccagataaggcacagtctgataagcagatgaatcttaaaaacaattggatgggttacctgtccctggccaaagaggaatcctgtgataggttattacaaccatgtaccatgcgctttcagcttggtccagaactgatgccatgtcagtgcccctactcccaaagaccatacctccagatccatttttcaaattcttgagccatcaaagygcattcctgaagatctttgggttttgtagtgcaggctgctgtaagactaggttttcagtcttactaaaggtaattattaggtcataatcattgttcatgttctctagtcaggcactgtaagaacactgaaaggtttttaaaatatttaaattaaaattttaaattatcatttaaaaataatgataccaggaacctagatgtatttcctgtgtaatcagaagcaagtgcattgtcatattggctttggagtttctgttaagtcctagtagctagaacaaggtaagtagaaagtagaaggtgctgagctgggcgtgggggctcatgcctgtaatcccagcactttgggatgctgaggcgggaggatcatgaggtcaggagatcgagacctgcctggccaacatggtgaaaccctgtttctatttaaaacacaaaaattagctgggcgtggtgacgcacacctgtaatcccagctactcgggaggctgaggcaggagaactgcttgaacacaggaggcagggattgcagtgagctgagattgtgccactgcactccagcctgggtgacagagcaagaatctgtctcaaaaataaaataaaataaaataaaataaaataaaataaaataaaataaaataaaataaaaataaataaaaaagaaaaaaaaaagaaaagaaagtagaaggtgcttatgaaagagtgttgaatggataggaaaggggttctcaaggttgactgcacgaatctagagcaactaaaaaaatactaattgtgaagccctattctagcatggaaaaaataagcttgatggaacctttggtataaatcaaatggttctatcgtatcctattaactttatagtcttgagtaattaaaaatttttaccactattgtgtattctgtgaatgtttattttattttttccatgaatatttattaaatatcaacagtgtgctgatgagtcaatagtatcaatactacagaaacattaaggaagatgagaactgaaaagaggtgtctacatatctcgcaattaaaatggactgcagttttgcatttaagattctgaaatagtcattgactcattcctaataaccctgcccaggatctcaccagcattagaaagaytggagatgtttcagcatccgagttctgggatgcttcttgataatgatcagctagtagttgttttgaaatgtcaagagcatttctgtggttcttcacatgttcctaatgcaaatgtttccgaagtaatttcttgacagttacagtgttttgagatgaagtgggaagggcttgtgattttraagttggaggatcttggtttgattcctacctctgccatttattatctgggaaatccagtaccacacatgctgggtgctctggggcagttttcttatctgtaaaatggacatatatctacctcacggggtggttatgcaaaggcaatgaatgtgaaatgtttaataaactgtgaagtctcatatagatttccattcatcattattacccaatacgagaattttactttttccaaacttgagaggaggaagatgttgcagtattttggtatcttctttaccgtgggtctgagaatgatgcacctgtgcatgttgttacatccttacagtggctaccacaacttcacatgttattcagtactgttatgttggtgaatgtcacaaaactaagttaaactgtctgaggcaaaaaaggaaggttattgaaatacatagttgaggctgggtgtggtggctcatgcctataaatctcagcactttgggagtctgaggtgagcggattgcttgagcctaggagtttgagaccagcctgggcaacayagtgagactccatctctacaaaaaatacaaaaaattagccaggaatggtggwgtgcccttgtggtcccagctacttgggaggctgaggtgagatgatcgcttgagcccaggaggtcgaggctacagtgagctgtgatcaygccactgcactccagcctcagcgacagagtgagaccctgtctcaaagaaaataaatacatagttgaaaagatacagataattaggttgatccatttgagattgattttttttcctatgcagaaatagtcaaatattggcaatttcatttggttcaacctaatataaaatggaggctcaaactatgtcaggccaatcttgtcttttttccgtctcctggctctgagatgactccattcttaaacatgttctcctttgatgtaaagcggctgtcagtggctctggagccacctcctatcagatcacatccactgggaaagaaaaagagtttttatcttagctattcccagcaaaagtttcagttgcatctcagggtctctacttaggtcataaactcattggagaaccaaccactgaatcccgggtcatgatgtgttcccatggcttaggcttgggctgtatactcagtctttgagatcatgtatgaaggggtggagtccagagagaaatgggggtaattattgggagaatggtgaacagaggctgggatgcaaaaataacaggtgttcagtataccttatcagataaaattgactgacgatgttattttcattttgtatgtgaagacacacttgaaaaagctacagaaatttctcaagagctggcagccctggggtaacttacagaattgaaaggaataaagtattggaaacattaagaaaaaagacatggtgatctgtgcccatgtgaccatgttgcaactttaagtttagaaggagaacaggagaaagaaggacttttagaaggtttatttggatcctaaagttttcttatttggagcagagctttgtgatagacaggaaagttctggaaaatgagctgagcgatcagactacaggatcccttaagtcykgtgcagtatttcatttttctgtgaatcttaggctcctactccttttccaatttacttcactccaatgtttatgttcctaagagtttgtctgttttccaagcactagtcctttgctataaggatggggtagagagaaagaagcttaaagagtttgcagacaggttaagatgcttytgtggagacagaacacatcttggtgcacatctgagtgtccttagcacttcatctatggacttctttcataaatggtagaacacgtatccatcacaccttattggattaattcagaaatgccagatatatgtactctttgctgatggttactttkttggtctctaatttaagtcttatctctaatcacattagctgagaaaatggagacattatcattctaaaaataagatggttaacttttatattaggacacttctgatttaggatagcactgaaattcagtgcaaagaaatgtaagtctttcctagataatgacagattagacaatttgaagtttcacttttggtcattagccctcaggtcatgcctgacctcaaggttactggaaacagtgagaaatgaatgaaaggaggaaatgtaattaccattctgtgcattgaatagttgagccactgttaccatggatacaatggcgcatttattgtccagatcttgagatccaagtttgtaagcaatatccaaggtctcctttaaatttatgtactatcagcgaataacacatgaagattcctggtaactttgaaaataagtctttcctcactgatctactgattcacattaagtaagagcatgtgtacttttgaaggtgttgaggaaacctgaaaaagacgaaaaggaaagtagctacacttctgttatgctggacattcttggattcctctataaaaatattctgtcttatactgtcagtgatttgcttgtcactttgggcccagttctttggtttttatgtcattaacaaggagaaaatttcctgagtaaaggttgaaaaaatcaaaatcgtttatttttattttttgagacaaggtcttactttatcacccaggccagagagggtctcactttatcactcaggctggagtgcatggctccctgcagcctcaacttcccaggctgaagagatcctctccgcttaaccccacaagaagctgggactacagacacataccascactcacagttaatttttatattttttgtagagatgaggtttctccatgttgttcaggctggcctcaaacccctgagctcaagtgatcctcccgcctcagcttcccaaagtgctgggattataggcgctagccaccatgcccggctgaaatcatttattttgtcaggaaattcttaaagttgaatttaagaatgaaagtattttatcagaaatatggcaatcctacccacattttaatctcactagaaggggggtgatacatgctagcaagtactcccacactgrtttaattttgatgtgaggaagggtgtggagaatactttttgttgcaagaaacagaaaacccaactcaaaatggcctacacaataaagggtatttcttggcttatgtgagtaaaaaatactgaggcagagtggggttcaggcgaggtgcagtcagggctccagttctctttctttgtgttttccttgaccctactcccccctaagtttcacctttgtgtgcggtctggcttcccatatgattctratatggctgccagggcaaatggggctacgtgtttccttgatcctatccagggggaatccaactttgagaaggttttagttatgttctcaaaagtattatttcatcacaataacttacagattgttagaatttctaaggaccctagacaaagtcagctagctccccaaacttgrcatatcatcaaaatcacctgaggaacttaaaaaagtatagagattcttaaatcaaaactcacccttactaaagcaggggtatgaaaatctgtgtkttttaaaaattttattttattttactttcagttctgggatacatatgcagaatgtgcaggtttgttacataggtatacatgtgccatggtggtttgctgtacctatcaacctttcatctaggttttaaggctcacatgcattaggtatttgtcctaatgctctcccttcccttggcccccaccccctgacaggccccggtgtgtgatgttcccctctctgtgtgtgatgttccccccccgtgaccatgtgttctcattgttcatctcccacttatgagtgagaacatgcggtgtttggttttctgttcctatgttagtttgctgagaatgatggcttccagcgtcattcatgtccctgcaaatgacatgaactcattcctttttatggctgcatattattccatggtgcatatgtgccacaaccaacccaaatgcccatcagtgatagactagataaagaaaatgtggaaaatctgtatttttaaaagtttcaaggtgattctgagggctggaccaatttttgggaacgtgtgatctaggtaccctctcatttttcagttttgtaaacagacttagaggtgaactgacttamcactgcaaatttcttcagtggcagttaaatatactctgttaaatctctttcttttggatgggaatgttacaagctagctacaacaagaaggacaggactcttttaagtctgagggtgacatgaagtactaccctcattcctggccacctccttttttggccagcrtggcaggtcctgaacctctccctaaatatgccactgtttgtgtcttaattgtatgttttgttcttaccttggtcacctttgaagttccccccagaccctcctaagaacgttggattcattgaggtaaataactgttgcaggccttctaatcttttctcacctgaatctgaattcatctcagaacacccctgacacagcccactggcttctagagaagctgtctgttccatgcttggaatggaagtattgaaaaacttcatggctcatttcctttgtatcccagcctcaactctttgttgacctcattgggacttacagtttgttgatcctaccgcctcttcaccatccctcaaatccctcacctatttacttcctcagcttatattttatggccatcattaatttcacttccctgcatacatacrcgctcagcagcttggcccctttatctggctctgttgtgcttggcaaggccctgatcctggttaaatccagttctccacatctgcaactctgtagctaaacatggcaggagaaaaacacaactatactgactagcctcgcttgacattcatgaagccaatctcaagcttargacttgcttcctagtctgtctattgcctctcttgcttccttatatcttctcctctttcctcaaacctctgacatcaccttctcacatgtagagtgagctttttaaaactgtgaaaatggaagcaaccagaaragaattccataaacttctataactcaaccatcatcatttgaacttcgkcttatatcttctgtctttcctcctattactctggaagaattttcccagttcttaagtccaaccatttcattcatgttctagatctcattccctctcacctctctgcaattgtcccctctttcttttatgaaatcctctrttccacattaccttctaactatcactctattttttcggttccactttacagtaaaattcttgtacagatgtgcctatatccactgtaattacctttcaattttttctcaaatccatgccattttgctttagccctcatccttgatagatatttttttggtcaaagtcactcatgasttccatgttgttaaatccaatgatctattttcagctctggtccttatttaactggttagcagcatcacacacagtgtatccwgacttcctccttgaaacacttagttagattttcaagaaactgccttctcctggtttcttttcttccttgctggcctacccttggtatctcatgcttgttcctgtctatatccctgacctgttttcatctctagctacactgcctccttggtggcctcatcctgtctcatggccctctttgaagcagggagtggtttcccaattcagggaggcggcatggactckggtggaaagaacatcacatgtcaagtcaggacattcatggatcttgttcctgaagaaagaaggaaaaataggcacaaccaaagagggccccaggctgctgaaaaggacccagggccacttgtcctctggggatagtctctgtcatctgagtccccactttttttttttttttttttttttgcgatggagtctcgctctgtcacccaggctggagtgcagaggcgtgatcttggctcactgcaacctctgcctcccaggttcaagcgattctcctgcctcagcctcccaagtaaactgggattacaggtgcacaccaccatgcctggctaatttttgtatttttgtagagatggggttttgccatgctggtcaggctggtctcaaactcctgacctcaagtcatcctcctccctcggcctctcaaattacaggcatgaaccactgtgcctggcctcagtccccatacttttgaggactccatatatacttctttaccatgtacatgctgacaactttcaaatttatgaatctaatccagaccactaccctatagtctagacccacatatccaactgctcatttgacatgtccacctggctggccaatagtcatctcagacttcacatgtctgaaattgaactcctgatctccactaatgtccaaacttgctttccatgtggaatttctcatctcagcaaatggcttcctcatccttgctcaagcctcaaactgtatcctactttgacttttcttttgctcctctaccccatatagaattccttagaaaatcccattgttttgatcttcaaaatacatctagaatccaactacttttcaccatcttcacttctgccaccctgattcaaccractgccctctcttgcctcgacgattgcaatggcttccatactgatttccttgctgtagcaacttttttagaacatcagtcagatcacagcacccctctgctcagaagctcccatggtttctgtcatactcaagttgggttgcccaaaaacagacactgagatggagcttggagtatataatatttattaagatcaatgcgtgtgaagggaaagggaggaagcaggatgggcagaagaagaagttgaactctggcagctgttggtcaacccagaggaagctctggagcaagagttgcctgttagagtgtcctatgtcaggctgaaatggccttgcttaatcactggatgtggcctgtcctggaaggacacgaccttgggcaggtggctttctatagctgaggcagaccccaaaggagctgattgcaggaagaaagtccttcctcatagctggtccttcctataaggggaagctgcatggcacawctctgggtgtaccactgcttcccatctcatgaagagtcaaagtccaagtccttactatgatctacaagaccctaaccatttggccttcacatcacctccctgacctcatttccttctcctctccccatgcacagtgcaccaggcacagtgatatccttgttttccctgacatggtgagcacttttgggcctttgcacttgcccccctttttcctaaatgctcttgcctcagatggtgcatgacttacttcctttcctcctacaggtctttgctcataggtcaccctctcagtgtggccttctctgattctttcccgacctcttctttcctgatttactttctccattgcgcttaccaccatctgacataaggtatgtaacttagttagttgtttgtttatttccttacttattatcttcccttccctaagatgtaaatggcacaagggcagggattttcatctcttttatccattgctttccctagtgtccagaaaagggctaaataaatgaatatacattgaataaatgaatggacagatgtcaccatgggtgctaagaaggggcatcctcagctcatcaccattccctggtactaccagcccttaattcctcgaggcccctggaggcccagtcarggtcctgatggagaaaaaggaaaattgctgtctctatcaaagcaagtggcttagcaacgctgtttctctcgatctgactccccccttttctccaccccagtgcctcccactcccgccctgctggtgattcccaatgcatttgagtagttgaatctgcatccttctttttaacttccatcccagatacttggttaccctgtgagaattcccctgtacatacagaatgggtcattctgctatttttaggacagatttgatacagtagcttttacaaaaagataagccaaagtttttagacwtcrtgttagtggactgtcattctgtatttaaacagaacacaaaagaaagctgtctgagaccatgacacagtgaaaacagccttgatcaaacaaaaggccctctttgaagaggggagtggtttctccactcagggaggcagcatggattgtggtggaaagaacatcacatgtcaaktcaggacattcatgggtcttgttcctgatgaatgaaggaaaaatgggcacagacgaagagggcccctgactgctgaaaaggacccatggccacttgtctcctggrcatagtctccctcatctcagtccccattcttttgaggactccatamgtaacaaataggttggaggcaggagartgatggaattccacacatagatgagtagagaagttgggaaataagccacaataaaagtgactaaattatttgagtgctttctataccaggcattggcctaagtgttttgtaggtattagtttacctacttaygtagtaacagtaaaaattttatggataaaggaccaagacaatgacaggtgaggtaatttgcccaaagcaattcagttactaagtggcagagccaacatttgaacccagaacccttatttgtatatgttgtcaccatggataatttggagcaagtggaagatagtcctctgtacgtaatcaaatgaagcctcatttaatttctcatattatgatcagatgacctcatttcagaggctggtaccattgcgacccaacttttggacatttttttgctactcttggcagttcattcattcattcattcattcaatatatgttgcagccttatcatgctctaggcgtgatgtaactaggtactgcagagtatagacagagaccttcaacataggccacatccaaaacaacttactattgaacagagtatatttccacttccttctagaagactagaagactgtactttttaggtacggattgatttctctctgctgggtttctcctatattactatttcattatctgggaacaccttttttttttttccctctataattatgtgtcttttaattcaaaggacccttacctaatcagagagttcaattttaaccttccgttagggacagcagtcatctataaattttcagaggttgttgttgtttactactaatgaaaaaaattattaagttctcttatttaaagtcactgaagaaaaaaatgaacaaccaagtgagagctgagtttctttacttcccggagaacactgctgttgtagagatggagragacatttcctatgtgctggatgtgcttaaaggtctcttggtcccaaagtatctctcactacggccaaagatctctgctctgtcattactaaagtcagttcttcggagtaagacattctttcctcctgaaactcctattacaatgtggaaatgttcactcctgtagggtaaagtagttagttgagatagtaatgcacagtaaatgtttgtcagagcaaggttcagagagaaggagacacaaagctggtatgttttaatggggatgaaagagggaaagaaggtactagaggtgtgatatagtcttgaaaataagccaacttccttttctggggaataaagggttattatgcttgtgctttttcttagaatggctttatggggaatttcagctgtgrtctattaggaaggcctcaaagatagaacttaaaagcttctagtatggctgtccttcctctagttagcaattgaaactgagttgttacaacaaaaggaaaagttgtcgttaaaagcaacacagttgcaagactccatcaaccattccttggggattcatcagtgcctggtaagtttgagaagagacccttggattttaatatacatggcagttataatttgtctagaccataatgattactattaatagggaatcctgtttttctatttttaaaaaaatttagagatgggggtctcactatgttgcccaggctggattcaaactcctaggctcaagtaaccctcctgcctcagcctcctgartagctgggactaaggtgtgtgccactgtgcctagctctgtttttctttaaagttactgtgtaataaaaaaagaatttgcaaatgcataaaattgaatatacacatgtcccaagtcaattgtcaaatgattggtttttatgtaccaaaattctgcatttttttttcaaggtcacttctgatataagaatttacttcttccctaatatttggttcagtgaagtgttgaaagaatttgctaagtaatcattgaaagctaagattctagtgaaamacaaaatgcatggtttaaaaattgaacrtactaactgaaagacagtggaagttagatgcttcttgctgtaaataattaaacccaacagtgcagacgagagaacatggcaccaagagggacttgggctaagaaggatcatattgtattgaacactttcgtttccctgtaagggaaatcaaaagggtctttaatagttgttgctgattgtgaatatgtgcaacaaaatcccactgtaatccagatttatttttcaagcattttgctgtgattgaaggaaggagaaagggataggaagaggatggagttttattaaagctgtagttacttcttccctttaggaggtctaagtgtgacttgtcacagtgacctgggactttgattccctccagggccttcctgttctatgggcacattggtggatcaaagacaattgacttttgttttgttttgttttgttttgtttttggagagaagcagtggttctgctaactcagaacaagaacgacaagagtcatgtaggatgtttttctgagtttctctaacagtgctcgtttttttttttttttttgaccgccccctcttttccttttgaggtggggccaaggggtcaaacctccatttttctatctgtaaaaaagagaatcggcctttatgaagtgctttaattttaaaaattaacataggctaaaattgctgtgtgtgtgcacagttctgtaaatgttagtgcatgtatatatttgtgtagccacaacctcattcgggattagaacagttcaatcacccccactaactcccttgtgctactcctttgtggccacaccctcccaataaagtgtgttttaagttccttttttgaaaactgaccttcccagatgaatgtctctgttgccttttatttgttcatttttatttacgcagtgttccttgctcatttttgaagtaattcaaaatgacactcacggtaagcttgcaagrctgcctttcctttaytataacggagaaaaaattctggaaagaaggcagctctttcagtatagtcatataagaacaaaatttccccaaacttggcttgtggctagattggaatccgtaaagaaaacacactcaagaaatctctcttgaagaggaggacagaggtttattttttatttaacgatttaccccttgacacctgggaaatgattagttgatgttttcaaagaagattaagtcagtgtggttaattaactgtggtaatcaggtgacttaaatcaattaactccttgttaacaatttccatcaattttgtaaataaatgactaaatcagtaaattgtactcttaagattaaaggctattttctgatttatttttttgatgacaaattagagtgtttccttctcatctcagtcactscctgccactcttgctcttaatcataagccagttttagtttgagaggagcacaccagggaaacttttaatatatggttttaaggaaaagtcaggcttaaggacacctttgctccttcatctcagcacatttggaaagaatgatttagtgagagcagtagttgggggtgggtgtagaaagcaatcctgaaacacactctaggataagcttttattattaagtcacttaatgtcttgttttatttatgttttctaagttaaaactcgatgagggatataataaaatgaaacagggtttggctcttagctaaaaataaactttaatggatgtcttacatgctctatttagagggaatttcacaaaatattgggatatattgactgcattcatttgtaaagcttgattgcattaaaaataccatacaaatatacaactaaaatgttgttactttttagaatctttataattgaaaattctcttccctgcttacataactttattatgtctttgtctccaatgaaatatgagctggataaactaacacaagaacagaaaaccaaacatcacaggttctcactcataagtgggagttgaacaatgagaacacatggacacagggaggggagcatcacacactggggcctgctgggggttggggggctaggggagggatagcattaggagaaatacctagtgtagatgacgggttgatgggtgcagcaaaccaccatggcatgtgcatgcttatgtaacaaacctgcacgttctgcacatgtaccccagaacttaaagtataataataataaaaaaagaaagaaatatgagctggaaaattataaaaccatatcctatgcccctgaatatgccattgcattctctgaggattttcactgtaggacagatgatataggtttatttatggtttcttcaagaagggatatttggcatcttgaataacttttgaggagttagtaaatatttatgtatttgcaaaaattctatgctattctcacattttataaagagaaaatttctatggcttcctttaaggtattaaggatagattaaattgtgaaactgagctgaagccactgttgtaaatttaaatcactggctgccaagcaaaattctgggctcttcctattattatagaagctttctggccataccccaactaccccttcccaacttccctggacatagttaacctgtggccaaaccctttctggtactgggacatggtctggaatcacagctcagagatttagctcgactgctttccagatgtgtacctctgaagctctctgagcttcagtttcctggactatacaatgggtgttagtaatttctaccttataggtacctgggaatatttaaaggatattgtgaacatgcaaggtcctggcacttggtgagcattcagtaaacatttggccccacagggaacctgatattaaatcattcatagttgaccagctcttggttaggtcatgcagcaaagcagccaccatgctgtgattttttgaaataaagaaaccacttgtcaaattctctatccatagaaattgctggggaaaaatacagctttttaaagcagatgaaactactagacaaaaaaatgttggaagacaggcctggtcacctgcctttcttcccccaagaatgtttggttcttcacctcccaggtcttgaaggcacagatccaaatgtaaagttgccaagaagttcaaacgttggtggacctggtgtttccattttaggtgtcctgtgcatgctttctgtaacttggttttatgcagaacttgctgatgatgtctctgtaactctgagaacaggaatgatggaagcatgggtctgagtggaggtcagatgtgtcctctgggcaaggagaaggatttgcccagggaagactacacttgaagaggagcacttgattttgtgagaggttttagacagagcatgtaagaatcacagtcaatgaagagttttctctcttgcaaaagttccttattatttcatgaaactacagaaaggtcagtgagatgttcaataggtgagaaagctgtcaagctagacttggttaataattacagttaaaataatcactgatgtatttctttcacrcacgtttattgcaagctttttttttatcaggaactgacatgcatagatgaataagacatgcaaataaacaattgtgctacagggtgagaggtctataatagaagtttgggagcacagaaaaggcagtgatgtagtcaactagacctgagaggaccaagggccaaggaagaccgcacagattgccatttgaactgagtcttgaaggagttgggagagtggactgtggaggattttgtatgtcaagctaagaagtttggtgcctttgaagaaatgtaagctgggaagtacaatgctcagattttcattttgtaaaaagaatacttgctgcaatgagagaaagcagatgaactagttaagttagaggattactgggattatctgggtgacagatgatgagggtagaactagacttgtgcacttggaagtgatgagaaaaggagagagtcaccatggaacaaagagaaagcttttatttgttgccgtttttgataattcttgttatttgttttataagttggcatgttttatttatgggaatattagacatgtcttttcaatgtatgtgtatgttaattacattcataaatattcaactttttttttttttttaattttcctgcctgaaaaatttccagcttgctgtctgtctgggcatagcgtgtgacattttctttgttttagttcactgattcctagttggttcatctccctcagggaacctttggaaacatatagtagcattttttgattgtcacaatgcctgagtatccctgccagcatttagagggcagaggacaggaatgctaaaccgttgcaatacacaggatagttccatactacaaagaattgtctgggcttaaatgccaatagttcttttgttgagggcccatcttggttgataggaagtgaatagagaggcagaaagggatgctattggtaataagagcggtcatacactgaaacttattatatgcctgatatatagtcaccatagctatagcatttgttcttgtgacactccagggaggtagataccattactattccctttttactaatgagtgaactgaggcagagtaggatatttggctctgggcctcacatacttaactctaatactctgtttttccacatgctttactttcttgtaactttaaattaataataagaggaaaaggagaaccacacttgctttgtgctttacagtttgttaaatatcagaatatacctcctggaaacatttctgccagtttagtagaatattgacaagttatcgcctccaagcatttttaaaaatatggaaaatatttgatgaaatttttttaaaattaggatgcctttgtagattggaagaaactcttatttgatggaaaaacagttggtgctccataaatgcctggggaattgaattgactctggaggcacttagtgtctttagagggtgtcaaagatcttgcaaatttattttaattttaattttaatttttttttacttcacataaaagagaatctgcctcacgtatgatctttgtaatttgaagacgtgccagtgacattgatgaagaatgtgactttttcttggacatgccttgcacttccctgtttctgtgccagttctagtttgtttcctctgtgaggcrtcccctcccctcagatccatctatctgtagcttaaatgcacctttctctacaggacctttcttgatatccactgaatgttatctgaacctctcttacagcatgtctcctcatgccatgagatacaatcatttgtgtatgtattttatctcttcctctagaagagtaccaccttttgggagaggcatagaacaggaccactgatgctaagagtatgcctagctcctctggtctcttgtgtctggcacagtgtcaggcataagcatgcactcaagaaatttttgtttaatagaaagtcaaaagaacagcatgtgttatagtaaagcaactccatcatggtggggaggtaataggcatgctctactctgggctcctgtcgcagagaggattttgtttggcttgaacaagacaaacatttaattctctcttacataaccagcagtggaaggctggtctggtggttccatgataccattagagacacaggctccacagtcctctgctggtgactcccattcctgaagtcacctcattgtccaaaatggctgctgtagccatagccatcctttctctatgccaggtagtgggattgcagaaggagaaaggaggacatgccttctctgtttaaaggagactttccagaagtcccacacaacactactgcttgcatttgatctcatcgattaagrcttagtcctatgatcacatttggctgaagtttggaaaatgtagctttttagctcagcacatagttcacctgagtaacactgggttctattactgaggagagagaggcaaatgaatgttaaagtatgccatgactgctcctggccaaagctggtcgggtgacactgcacatcttctcttcagctttgaataccacattttgggagaggcatagaaaatttgaaccttatttgaaagagagaaacaagaatgatgagaaaactggaaacaatattatgggggaatgatggaaaaactggagatgtttcttttggacaagagaataggggaacaatggttagctctccaaatatttgaggaactattatatgaagaaggataaaacttactctaaatgactctaagagatgggaaagaaattgtagatatatcgtatgcaccaaaagaatgctggaatttgactttagggtcacttttaacctttgaccttatatagtacagatgcataccatatagatgtatccataagtttgtgcttttgaggttaaaatattrcttattctctggttacttcatattggaattctctttactgagggttgctatggtgataacacccttagcagtctgcattttgaaaagctttggacttttccttttgtgagatgtggtctctatgtttcccccatgcttggcgtttttcaaaatatcatcaagtcagaaacaatttccaaatttatcagagtgaagtgaggagaattttaaaattgtagatactaataacaggggttagtaattctatattgtacaactcagtgattcaataaatattgtcactatcaacttctttggattaagatagctatgtttaggcaactggttagtgttatttagttaagcatgtattttttaattattactaaatttcttaaacacccttgaaatataattgttgaaaatgtcttaaaaacacagctagtatcaaccagagaaataatttagcaaagagttaatttatttcactaagtagtgatatatttttgaaygcatgtggaatagatgtgtgcctataaacttgactttgtgaattaagttttatttttctagttcagttttactttgaatatggatatgttgttgttttgtgaatcttagacatcagaaagatttagttgggaagagaagtaataatgtaaaataaaagtaataataaaatactcaaatttctgtattaaattagcttttgggggaattagctacataattaggttattttaatagattttcaaactgggttgcagatgatgaatatagaagagctatatatatacataaactctcatataagcaaatatataagaagcaaaaaaaaaaccctgtagaattgagagggagacaatatttggagtttaaaggatcagaaaacactggcctaaaaatagtatcagtaatcaatttttattaaacacttactgatatgccagacccataatcctcactctaccctcatattaatgttatgagtaagagctcttattatctccgtttttagatgaggaaactgaggcacagaaattaaaatggctgtcagatagttagtaagaggtggagcagtggtttgaatccctagtatatgactagaaggacttcaccctggacagttacttggcttctaagcagtcttcgcgtgctcttccccttccttgcccttctgtaatattatagtagtttcccagtagtatgcagcatctggctattcagactttgtctcttaaccttctgtggaaaagctgttgacttttagacatgctgggcagaatggaagaaggaaaatacagactgttatacttggagaaataatgatttcatatgtaacagtagttgaatcaataggtggacaaatttattgaaacttcttgagttaatccagtgatggtaaacaaacacatggccaaatgagcactctataaagcatgccttctggaatgcatattgtcttgtcttgtctttttccttccttccttccttcctttcctccctccgtcttcctccttttttcttttcttttcttttctttctttctttctttctttctttctttctttctttctttccttctttctttccttctttctttctctgtctctcttacattctatctttctttctttcttccttccttttttctttctttctttctctttctttctttgtttttctttctcccttcccttcccttccctccttccttccttcttcctttcttttctttcttttctttctctctttctttctttcctctcctcccctactccctctcttcctccttccctacttccccccatttctttttctctttcttttgctctgggtttgctctgtcagtcaggctggagtgcagtgcagtggcatgatcatagctcactgtagcttcaaactcccgggygcaagcgatcctcccacctcagcctcctgaatagctaggactacaggtgtgcaccatcacacctggttaatttgttttgtttttgtagatactggctctcactatgttgcccagggtggtctcaaactcctgggctcaagcgatcctcctgcctcagcctcccaaagtgttgggattataggcgtgagctaccttacctggcctcaagtctgtttcttgatcagtaagcctggtaatattgggctgtcttgtgtgcatatatgtagatgtacatgcatgcatacacatatattccactttgggtggaatggatgaatcttttgtttccagtggaaggagttctttgagttacaaatagtagaataagggctttcagtttaaacagaacccacatgagtgtttcattaatcatgttcacgtgttaatggattctcttgaggcctttggagtcattgyttttgcaatatttccttagggcctttttcttcagtccagattaatctaaaatacattgcactgatccagagatgtcaccaaattctcctgaaaagccctttgactgtatttgggctggcctgtgcttttatggaaaaatgctatctcactgctgatgaggtttctggcattagcaaagatggccttatacatggtaccacaacctatgtggtacgatgttaggagccctgataagatactctgttcccctacaatctgctccatcaagccrgtgaggaaggtatgtaggcattaggaatgcctaaaatgccacaattagaaaattcattccttggagggcttctgttttctgctgaaagtgcaaacacccgtagaaggctttaagaatctctcaaaccttcccgtgaataagttcacctgggagcagatttttggggtcagggtcgtgagccatggaaactctggccatgtcatggggatctgagggagagagaaggagaggatttttagacagcggtgggggaagtcaggcggaggtgggaccatttaactagataaggctctaatcgtctcattcctggactatcagaacagccttttaagtttaagttgcttttccctctttgtaaccttacccaccaaactttgtgaagtgttgagtgcttatagtaaacagagtgaacataactcttcccagggaagaactggctgactttagtttcttggtttctggaaggagatgggatagttttattggcttgcttgaggatagccaaacggttgtggacaagagggcttgtttcctgacaagtgttattctgccttaagaatacaaagataaatggtctaccagagcttcagtacctgtttgttgcgttgcatttagtttggagtgtttgctctgtgcagtggagaatactttggagggtggtaaggtctctctgtttcattactggaaaagaataggagtggggtcatggcaatggggtatttcattcctctgtgcgtgtgtgtgtgtgtgtgtgtgtgtgtgtgtgatggagtcttgctctgtcacccaggctggggtgtagtagtccaatctcagctcactgcagcctctgcctsctggtttcaagtgattctcctgcctcagcctcctgagtagctgggattacaggtgcatgccaccgcgcctggctaatttttttgtattttcagtacagatggggtttcaccatgttgcccaggctggtgttgaactcctgacctccagtgatccaactgcctcagcctcccaaagtgctgggattacaggcatgagccactgcgcctggcctcattccttcgtttgcaggggctggatgtctaggtttatggaaatctattctcattcaaacagaaatagggtaacaacttaagataataaagtttttctttgaatgaattagaaaggcattattgtatgttattttagtcaaataatatttttgcatttattgcattcttctgttatataagagaaagtttagagaattaggatagtgaatacttttaatgcttgttttttttttttttttgagatgaagtctcacttagtcacccaggctggagtgcaatggcactatcttggctcactgcaacttctgcctcctgggttcaggagattctcccagctcagcctcycaagtagctgggactacaggtgcatgccaccatgcctggctaattttttgtatttttagtagggatggggttttgccatgctggccaggctggtcttgaactcctgacttcaagtgatccacccaccttggcctcccaaagtgctgggattacgggagtaatccaccacacctggcctttcatgcttttaggaaaaatttgaaattcttttaaacrtgggtcctggagaatcgctgaacttcctttttttttcttctattgagacagaatttctctctgctgtctatgctgattacagactcctgagcttaagagatcctcctgctatggcctcccaaagtgctggggttacaggcatgggctactgtgctggccaaactttttgaatggaaaactttttagcttggtttcagttgattaatcctcaatttctttatgtccttaattctatggcttatgccaaggcatgagttgaggtcaacagaaatccttttatgatgatagaaagataacgatgtccaagtttaatgtacagtataatgacttaaggtcaattctgggaaagcctgtatgtttatcatcaatttctttttggtgatggaattatacacctacagtatttcatgtaaaactccagaggatcacctgaaatatgaatgatttacaatggacaaaataataaaaatgctcatcgtaggaaaatacaaaaatatataaacaagaaaataaacataaaaatgcataaacaagaaaatagcaagttgggagcaagcttgcttttgactctagtttgacctgtgtttctcagaataaatcttgattttcactcttgcccttgaccgaagactgggccagtggaggcaaccaccaccatctgtgctttcagtgttgagcatcctaccaagcaaggtggcttagattttgaaagttttctctcagtcagatagtaggggaacaactcttagaatgttagaattagatgagtagtgggaatgccctggaaggaaccacccttcatggagggacggctgtgcttcaggcattgtgccagaggtttacagggacctctttaatcctcaccgtaacctgattttgcaggtcagaaattttgtaggtaagaaaactgcatactgtatcagtttaaattcaggttcatcaagctaaaccagttcagtaacaaatatttattgagtgaaggttcagtggtaaatgagacacaaacagttcctgccctcatggaacttagagtttggaatgacacagggacagtcagtgctttgccagagttgaaagccatgcatctcttggctttctggcgattgctttttccattggtattcttattttagccattcttactgaatttaatttaaattttacttaattattataatgcctatggatccatgttctgcatattagctcactcatactcatccaagactgtaactataggtacccaacacccagaattgagatggccactgaaaactctatncttgaccaacactctaatatcattttattttctttaattgcctttgtaagaagtataatacaaacaaaactccagtaagcaaatggctttaattatttgtgtgtcagttagtagagattttattgtatatattttctggtatagtttattactgaagccgtacttctttttagcattaaaattctaaaattttatrtttataatagtgacaaaggtttttactgtaattactaatgatatttaaaacacagattaggcaaaatcttaggaaatataccctgctttttttccttccatttctggcaatcactgcagataaacttgtaattttattcatgttgctattaatatggggacattataaattcatcatgtctgtgcagaaacctgaacaccactttatcacacgtgggtatcagttggtgacaatgtaatattgttgattctgtgtcaacaagctattgaattgtttcaagtcatcacaatcacattataacgtgaagtgataacattgacagagcctgaaagtggtttggagacctcctcatgctatttgagcccaggcataacaaaccagggccaaaggactcctggtgcaaagataacctgctggtgaggcatgttctgaagttctttttgctcagtctgttaaaagcaatccagtaggggagacacaggaaatttaaggtcattctaccatgagagtatttgcaaatataataggtccttctttacagatttacaaggcaatgatttggcattacatttgtttctctatagggaaattaaaatcatgattatgctatattagcaaattgcttataaaacaaattacaatttttgattgtaggataagawgtactcttgtagccccctccctccctccctccctcccttccttccttccttcgttccttccttccttccttttcttccttccctccttccttccttgtagatctctttgtcatcttttggacatcatcttagtttcacacatatattctaacacatcatatatagttcgtttattgagggtaggctgggtactaggaggtcctgtaacaggccctgggaatacagaggtcgcttagtctcatctgttctgttccttatatttcacatatccaggtcgtggcaggagaattttgaactttctgcttataaaatcatttccaaggcataacttgtcactaaaggggaaaaatacaaaaatattgtgtaaaacatcagcaaaaccagtttttaaaaaagagaatgacatattacatttttattaaaaatgttgacttcagtttactagatgattaattatcagtacttactgcccaagaaaaggcttttaaacttattgttggaaatcttttggcactcttgctgcacaatatttcttaatagtttaagaaaattcttactctgttggcagaagccatacatgcccatcactaaatggtcaaggtcgaggcatgcctgtgtgtgcaactcagttattcatctaacgaatgaactgtgaataaagtttagtgtttgtgtgaataacaatgcaatgagcctcaccatcaccaagcataaacatttctgataagagttgtcatcagagttgcttattgatgttgaagcattggtttcgttagagtaaattatgtatatatatgtgtatgtgcatgtacgtatgtgtgtgtatatatatatgtatmtacctgatctctactttctgaaaatttacacatttagaatgggaggttatttagttcctagcatgtaacttgtgacttataaacccacttarcaattacatactgcttcaatctgaatttgggccatagctaaataagggtgagttgccattttgtaccaaattgaggttaaggtgcaagatgccaggtgtcatttaaaccaaggctaggatgcaagatgctaggtctcatgaaatttagtgtctggacactgattgctaaccttgacatctctcctttctgccctctttttctctgtctccctttttctttttctccctatttttgcctcttctctctcttctcgtttctttagagcttgttgttactattgcgatagtcaagaactaaataatatggagttagggagaaggaatacagcaaggtgtttataagattcagtcaagaaggtccatttagtagttataaataatttagcctatgactatggggaattaccaaatctaccaattgagagtcaatttcttctcttcttgttgctattgtcataatttgcagtatccaactattgttcacttgataacctggtgatctcatctgattattaagatgaccaaaatgaaagtgatgtttatagctttaacatatccatgtcagtttgatttatggttcaacacttggacctaattaatcaggaaaaccctaatttgatgctgtctatcaatgctagtctgaaacaccattcaaaagccttaagcaagaaagctgcctttctaaagtctctcttgtcatttatttctcatgaatgtccattttcttttttagtgtttgattccactcaaccattttccagtaatttatattgctaatcaaaaagccgtataggaattctctgggtgactgggactggaaatgtgctctgaaatgggaatgatttgtagtttttgcacagggtgtgtcaaatcatgaggtgctgaagggcatgttattcttstaagtagtttgattcattgggtccttatttacctgggcaggcaggccatcttaaattttcttctgtttggatagtgttcttttcaacatcctgtaagtgtagctcttttaccatgaaagatgtaaataaccagttagtctctagtggggattggggccagaggagaagaaagtcttgagcttagtttccttccacgtgtagggaaggttcctctccaggaacctcagtgacttagctgatagaggaggcactgcatgagstattyagggggagcacagaaaagactggtacaaatacactttcagtgctttgatgctggctaacaggaagttttcattgctcagcgttcttggtaaaaacttggacattcttttgaatgtttgagcgcttaagtgattgtcaatttatatttttaattttttgtgaatgtatgcagttgggatggggagaggacatttggagaaattatttttttgctctgataatgaatacggacgggaaaagtttgcaccacaacgcagaggtgcttatgactgtttttcatagccacaatcctttacattaatgatgaactacttgaggatttcagatgcttgtgtttttctagtgtggtcccctccccttgaaggggtagacctgtggacgtgtgatggaatggagcattccagggtgaaacaggccttcctggaaattagattctttatcactctcccaggggagttcatttcaagttgctggtactagcagctgcagcgtgagattgcccaatcctaggtgctcttattgatgggtgggaaggagtgggattgctgtttaagaaattttattatctttagaagggaagaatgtattatgttttttttttttagatgatctctttcatgtgggctaagataattttgagctctgactgtccaagctgcttagaggttctgagttgttctccactgggggtggtactgccactctcaagcggcatagatgtgcctgggagtgtttttgtcaccgtgatgtgggggagcactactggtgttccacaggtgggggtcagggatgatgtacatactgctttgaccaggacagttctgcaagatgagtaattgtcccaccccaaatggcgatagygtcctctgaagaacctctgagaagtgtggctttgcttatamtgttctgtagtgctgatggactgcctgattgtagaggtgagaggtgcataatgaaaaaacaagtgggatgtaagagccttgggggagaaagacaggtgactagtgtttaaatggaaatggagaagggtagctcagttataaatggctcagtttaaatctctcattgctcagaattgagaggctgctcaagtagtacatctcattctgctgccatttggttattggaaaggcactttattttaattactaagcaaatatttaagtaatctttgagatcaactatcttgagagctgactggattctgtggcctggatactcagaaacatccagcttggagaggatggtgggggctggtcactaggatgttgttggcaatgccctaaggcagcggtccccaagctttttggcaccagggactggtttcgtggaagacaatttttccatggacagcagggtggtggtgggggagggatggtttcgggatgacactgtttcacctcagattatcaggcattagattctcataaggaatgcacaacctagatccctctcatgtgcagtttacaacagggtttgtgctcctatgggaatctaatgcagccactcatctgacaggaggyggagctcaggcactaatgctcactcacccgcctctcacctgctsctgtgtagcctggttcctagcaggccacggaccagtaccagtttgtagcccagggactggggacccctccctcatggaacctgttcgtagtttgccatgcaagcggacctgctttggatgcttctggggcagctggaggggctgcaaggtgagacccttctctgctagcagcctcttgcctgcacctaccagcctgctcactgggctcagggttggggtgaggttctggggattgaagtggagctccaagctcttttcatggtcaaagtctgtatgctagttcaggctttacctactcagagtgatcttcacttttaatgcagttattgtctgagtaatcaccctcatactcatttgacaggcactctttggcttggcactgaaagctctttttctccatcttctcagccttgttgcctaccactctccaagaggtcatcactgcttgggtcatacttattagaccctcacccatgctaagcttctgtcaagtttttgttcttttttttcttagagacaggtttcaccatgttggccaggctggtcttgaactcctggcctcaagtgatctgcctggcatggcctcccaaagtgctgggattacaggcgtgagtgatcacgcctggcctgtcaagttgttttgaccctacacacaaagcctggtctccctcttcaccttcccaaatcctgctcattcacaaagacccagtgtagtcttataattctttgtgaagacttctctgatgacaccggcctgtagtgttatttttttcgccaaagtcagttagtttttattatctccattgcttatttggaaccaaattgtctgttgtcagaggcatagctttggaatcagactgcctcagtgtaaatctgtgctccactacctactagctgtgagatttgttcaagccttgtcgtcctcatctatgaaatggggccattgatamcatctcacaaagctgttgtgaggatatgtaaggtaatgcatgggaagcacttaaaatattgctggcaagttctgggtgaacaaatgctgtcatttgctttgcaggacatgaaatgatgaaataagtacaggctctggagtcacacaggtcctggggctaaatcagacttcgacattttctacctttgtggcccttgggggagttggttaatgtcactgaggctcaggttccccttctattaaataagtataaatctcacatcatacagttctgagaggatccagtggatatgtataaagctttatatattgtataacacatagtaggtactcagtaaacaatatcagctgttgttattgcatggatatttaatttataacatataaatcacttttgcccccaataaacttataggctctgtcaaaaaaggaccatatctttttatttatttatttatttatttctttttttttctttttttttttttttttttttttatcccggcccgttctcaatgagctgttgggtacacctcccagacgaggtggtggctgggcagaggggctcctcacttcctagtaggggtggccgggcagaggcgcccctcacctcccggacggggcgtctggccgggcggggggctgacccccccacctccctcccggacggggcggctggccgggcggggcgctgacccccccacctccctcccggacggggcggctggccgggcggggcgctgacccccccacctccctcccggacggggcggctggcccggcagaggggctcctcacttcccagtaggggcggctgggcagaggcgcccctcacctcctggacagggcggctggctgggcggggggctgaccccacctccctcccggacggggcggctggccgggcagggggctgacccccccccacctccctcccggacgtggggctaacccccccacctccctcccggacggggcggctggccgggcggggggctgacgcccccacctccctcctggacggggcggctggccgggcggggggctgacccccccacctcccttcccggacggggcggctggctgggcagaggggctcctcacttcccagtaggggcggccgggcagaggcgcccctcacctcccagacggggcggctggccgggcggggggctgacccccccacctccctcccggacggggcggctggccgggcggggtgctgatccccccacctccctcccggatgggtcggctggccgggagggggctgagccccccacctccctcccggacggggtggctggcccggcagaggggctcctcacttcccagtaggggcagctgggcagaggcgcccctcacctcccggatggggcggctggccgggcggggggctgaccccacctccctcccggacggggcggctggccgggcggggggctgacccccccacctccctcccagacggggcggctggccgggcggggtgctgatccccccacctccctcccggacggggtggctggcccggcagaggggctcctcacttcccagtaggggcggctgggcagaggcgcccctcacctcccggatggggcggctggccgggcggggggctgaccccacctccctcccagacggggcggctggccgggcggggggctgacccccccacctccctcccggacgtggggctgacccccccacctccctcccggatggggcggctggccaggcggggggctgacccccccacctccctcctggacggggcggctggccgggcggggggctgacccccccacctccctcccggatggggcggctggccgggcggggggctgacccccccacctccctcccggactgggcggctgccgggcggagacgctcctcacttcccagacggggtggctgccgggcggaggggctcctcacttctcagatggggcggatgctgggtggagggtctcctcacttctcagacggggcggctgggcagagacgctcctcacctcccagacggggtcgccgccgggcagaggcactcctcacatcccagacggggcggcggggcagaggcgctccccacatctcagacgatgggcggccgggcagagacgctcctcacttcccagatgggatggctgccgggaagaggcgctcctcacttcctagatgggatggcggccgggcagagacgctcctcactttccagactgggcagccaggcagaggggctcctcacgtcccagacgatgggcggccaggcagagacgctcctcacttcccagacggggtggtggccgggcagaggctgcaatctcggcactttgggaggccaaggcaggcggctgggagatggaggttgtagcgagctgagatcacgccactgtactccagcctgggcaccattgagcactgagtgaaccagactccgtctgcaatcccggcacctcgggaggccaaggctggcggatcactcgcggttaggagctggagaccagcccggccaacacagtgaaaccccgtctccaccaaaaaagtacgaaaaccagtcaggcgtggtggcgcgcgcctgcaatcgcaggcactcggcaggctgaggcaggagaatcaggcagggaggttgcagtgagccgagatggcagcagtacagtccagcttcggctcggcatcagagggagaccgtggaaagagagggagagggagaccgagagggagaggggagaggggagaggggagaggggagaggggagagggggagggagagggagagggagagggagagggagagggagaggcagagcaaaaaaggaccatatcttatttttcttttttcttccactgatcctaggacaattgcatatagtagttatgaatttatttgtggctttagtgaatctggcatcatattcttttggtccttatttatttattcatttatttttgcacttaaatgatgtgtctacatgataatgcatcaatttgcattgtgggttttgtccccaaatctttgacttcttgaaatgtccttatagtattgttttgctctaagaaaacatcagggctctgaatcaataattgggacaaagcagtctattcagtggtttgtaaactggattaaaaaaaaaacccaaaagaattcctgccacctatttgatgatctgtaaggaaaaccagacagttaaaatgttgcacagaaagagactagcaggttggtttgctgttcctgtcttgtttcagtttcattaactgaatccttgactattctatcaatttgacactagacagggtagagtgctccatacaatttgttacccttggctatcatcactatagtgtaaagttttggaaataagcaggtgactctaaatcttcaaaaggggactggccttgtttatgtgggcaaggtatgggaattgtagtgaactgtcagccaacttatgaatatcagaaggatgtctatccataccaaaggaatcaaaattaagtatagaaaaagtgaagcaaaaattatggataagttaaggaattgcctcttaaatttgtttgtttctttgagttcagtgaaggtggaactattaaaatgtgatttactcatacaaatttttaaaaagaggactgtacctcctcaggtagaccaagtgtttggaaggaccagcatgtgttaagaggatctagcggggaaataggatttgccacagaaattaccttactctgttaactttggacaatgttccattgactaccacttgtctttgtcttataagaatagaattkatggaaggagaaagaaacttacaaggaacgggtaaaagaatgaaactgctattaatatgactcaatgtttttttctttctttttttttttttttgaaaaaaacttctagatattccccttttttcagattattccagattccatttttctttctatggatttaagatggtaaatttctatttaaagtctcattgtttgctctgatagctttctatatctctgatatataatggtctcagcaggctgagttttacaaagagaattctacacttcctgacgaacatgcattagctattccataagcacccggtgctgtgccagaggctgtaaatgacacagaggaatgctctcaatccagygttgttccttgctgtggaaaacaaacaggcaaatgactyctcttctctgggcgctatctgttactctaatatcttatcttaacacattcttagtccaacacttacccaggaagcttgggatatggctacttatgaagaaaggattactctttttttttttttttcccctagctttgggctctttatgaggttggaaaacaagtttattcctatgtctaataaaattttactaccgatttcaaaacgcttaaattttttttgcattgctttcaattgctgcaatttttcctaagcccaataattttttaatgctatgttagtcaccaagtaaactactctttttctccaactgaagtatataagcactatggattctatgccagcccaataatgaactcaattaatgttaattgagagcagctttgggggaaaaaaatcagatttttacattcattcttgagtttagtggaataaacttttttttttggtgaaagggaacatagagtagtggtcaagtagcacgaatgctggaatcagagctgtcagattcaaatccttgctttgcacatatttgctgttggatcttgggcaagttaccgaattgctctgtgcttcaatttatttatttgtaaaatattcataataacagtatctatttcatagggttattatgaggattaaatgagctaatgttggcagagcacttagaatggtgtgtgccatttaagtgctatatgagtacttcttttcatctttgcaccatctattctgattgatgggacagacaggggctagtgctggagagatagggtgttcatttggttccgatggttcctttgtgatgattgcctggttcttaacaaaaggtttttatttcaatgtggattgtattttcctcctttcctccttggtttttactagagggattttttttttttttaatcaggcagcccccaaaccagagaggctcctggagaatgttttaaagttacataaatgattatttgcaagattacttcttggctaaaactggattggttgaatgtggcagttttgagactattttctgaacaaagttttaaagctggytctatgtagattttttttttctccctgtgggtggctccaatgtatgaaatcatccccttagctttttttttttttaaatcttcaaataaataacaaaatgtagataatatctagataaaacttttggagggcttgtgagtaaaggctacttatttaaaacaaaacactcaaaataaattgcatatagactaattgaagtaaggggcacctgcaattgttattagacctaatctagaccttttcactagtggtttatttttggtttatttttaaacaacacatattccctttatgagagaatgagcttctgaggccagtgaagcattttggctgatggctgagaggtcacccagcaatgataaagtatcagtttgttttttctggagagatatttccaaacaatagtcgtttgggagttataaacaggcatcgaagttamtactgaaaaggtgaatttgacaaatgaattatagatctgttgataaattgagtaaattggatttgatatattagataatggagtgaggagatcaagtgtgaaaatcactacctataaaaattasttaattgcaacatttccccatcagtttcatttttcatatgtgtgattttaaataattgactttgaagtgttttataaaatgacttttgrgtctctattttgtgttcttttcatgatgtgtttaacttggtattttagtttggcaaaaacaaacaaatccccccaccccactcctcaaaaatgggacttgtaataaaagttgcttaagaaatagcattaattatatatattttcaaaacaggcaatatatattgttctgataatttcctcctaaatactcagtctctaaatttatatttttcttttctccatagcaatatgaaactgtctgtaagaggactgttctttatgattgttataatttttcaaccagaagatactacctttacaacctcagatactaagggagacaaatgtactgaacttacaaatgtattatgttggattactaacaatagacctaattgataaaagtgatttaatatatgttgtgttaatagctaaacctccaaagcccctaatctcccatggaaatattgctttgtagaacaaaatccaatgagaagttctgggattccagagtgaatttgtacattccttaggggcatttttgcaagggaggttgttgtgttttaaaggtagttgataagagacctgcaccaccaaccccagacctrcaccaccaaccaccatcatgcattagtctatagaaggtatttgggtgtacgtactcctgtaccactcggtaccaccatttagccaagcgaagtttctgaccatttgcagcatacattataaatcaggatgtcactaccagacaatcagatttgaacattccatgaacaaagtagcctatataccctagaaatagatcacttaactatgtttatgtcatgctgttgatatgcctgcatttacacaaatcaggatagcacattgcttatttattttaggagtaggtacttgatctgtatatttacctaattttggttaattagccaaaaattgaaatgggtaatttagcatgattgcttaaatacatggggaagatataattattcttccaactgcaaaaatttctcctttatcccttgggtttgtgaaagaataaaataattttgagtcttctctaagtggggctggtagtggctgctttctttgaaaaatttttctatgtggcacataatgcttgggaaggtcactggccaggtatttggggaactttgtcccttggggagacctaggaaaatcacaggatatattagttcagtgaagtgagcttgtttaagttatattgtccttccagtatcactagggactatcactgccacttggggtgtcaacttttggtgtcaagtttgtatactcttgttggctgcagagattttgttttgttttgtttttggctctttggtttaaaaaaaattgtttgcagagatgagcttatagatctggcaagttataatttaatttttaaaaattaagacaaaatattagtctgaatctaagaatgaaaggccataacttgctatatatgatttagtaataaaaaatcacttaaaaaataaggtgaggaactcaagaaagtatagtcaagcaaatgaaaagttactcacgatgttatcaatcagagataaccactgttaacattctggtcttttttacgctttttttttttttgcatatgtaactctgttatcagtaaaaatttacgtccttgtttttgttacattaaattataagtatttctctaagtacttagaatttctccataaccattttttaagttactaatatgtcaatataaagatgtaaacaaatttaatccttttattgttggacatttaggaggtttgcaacttcctttgttataaataatgttgcgatgaaaatctttatacataaatctttgtctacttctttgattagttccttaggaaaaaaatccttgaagtaaaagtactaaattaaagatcaagtatttttaaaaagcaagatacgtgttgtcaaactgctttcccaatgagttccatcaagatacacactaatcaactgtgtatgaaaatcactttcttcccacggatgttcaaataaatatttttatattatcattgggagaatgtttacctaattttctaatttgcatttctttgattatctaattagttgaataatttttcattttatcaaaaatttatatttcttcggttaaatatctgcatggcataagtttttaaaatttctgtctattattgcagaatgtgacagtgcgcattttcgctgtggaagtgggcattgcatccctgcagactggaggtgtgatgggaccaaagactgttcagatgacgcggatgaaattggctgcggtaagtgaggaggggccaggctaagttctattttgagtaacctaagtgcttcctggtgatttcagctgtaacaaagagaagagctatgccttttagtgacagagccaggtctgggcccaagtcttttgagatctgtgtggttgaatagagaactgatggcattaacaataatttcactcccttctgaggtaggggttcaattcacattgatgatagagcatcagtttctatctcacccttatcccttgaccacaactttgatatggaaacatatttgggtgcagttttctggagtctgtaggtgattatttctaatattcactctgtaaattttgtgtacccacaagaacaaacaaaaaataatgttatctgaactactgtgatttgtaagtcaaagaggagtccatttttatgtaaaggatgtagaataacttgtgtcaattaccataaagaaatcacagaattggttagtgtgatttatgttttttaaaaattctagttttaaaaaatttgaaaaatacgataatgtagtaaacttcaaatctaattaattataaaatgactttcacattcattttktcatttagttttctcactaatcttctgaggtcggtttcagattagtaaattgagactcggagaagttaagtcatttattaaagttcttacagttggtaagtctatgcacagatcccattgctcttcccaacttcccataggtgatcaatcatacatctgcaatttccttcatcccagcaggtgaactaatgagggttatctttcaaaaatcaggaaagcaggtgaaaaatttttgttttgaattgttggccatgttatggcataccatagcagtcaaactttggtgtgtcatttagatgacaacgcatttgaaaatgggaggaagggtaaggatggggttctgtacagtgctcctcaaatactcatgcacaaatggatcacccaggagctcattaaagtgcaaatttagattccatattttgaggtgggacctcagcttctgcgtttctataaacttcctgatgatgttgatgctgctagtttgtggactgcactttgaacaagggactaaactatatttgtagagacacaatcatgtgctaactatttgcctcctctgggcttactgagttcattttgattaaacaataaaagcaaaaaggcaagggcagtgtatctggggtaaaggaataagtgaacagctatgccaacarctcttcagagattgttacctgtattatattttattgacctgtaaaaataataacaataacaacaatatcaatgacgatagtgatagcaagtaacattacatggcgctttcacatacattatttaacttatttttcacaacaaacagtgagatgagtatagtccccattttatgatgcatacattgaggttcagagaacctgccaaagatcttaaaggaagtaaatcatggaaataataattatttgattttgggttttctttcccaaatctcatgaattttccagttcatcatgatactttactattagttattatgaaacaaatagtttaacagtaactcacagttaatgtttacttgaatgaagcttttaatctaatacctttatcataatttttttgtgtgtatgtgtgctgtttgttttattctctgtgtttttaagttgctttggttcatgagtttgttgtgatgctgttgctgagcttatttgacagtgaactctgactggcgtccacagactctagtrtaagggttgtttactatttgccttcaaataaattgagcaggagtttacatgatacactcttctggaacaagcattgcttgctagtataatggggaggatgattgccataatgagtcctcttttggtttgttttagctgttgtgacctgccagcagggctatttcaagtgccagagtgagggacaatgcatccccarctcctgggtgtgtgaccaagatcaagactgtgatgatggctcagatgaacrtcaagattgctgtaagtgtttggagaggaatcttgctttggctttgtggacacctaaaacccaacctgtcgcaaagaagttacacacaatgggatgattctttataaatgtggagcagggccttaaatcataagggaacctatgccagcaatctcattcaggggttggatgatrttgaaagtacggatgtactgaagaattatgaatataccccagcaatttggaagtgagataggttcccaatctttaattttgattatgttatgctcaagaaaggaaccaaatatttattggagtgtatagctgggtgtcttcatgtgtgtggttgacagctgaatgagtcctttggctctgtggcatactttgtattcaaaccttccactccttctgccccaatattaaattctcttctttttgactgagtggaagtaggtaggtttgttggagggcttcttggtggttacttcagtgactgctgccacagccaccatagggagagcttgaacaagaaagaaaatagtagcgatgaagcggatcttggcaactgcggcatccctggacrttgagggggtttggttcagtaacctggaaaaaacctttaaattctaatttctttggaatcagactggaaaagactgttttaataggtctaacaataattttattttatttattttwattttattattatttttagagtcagggtctcactctctcacccaggctggagtgcagtggtgcgatcacagctcactgcagcctcaaacaccggggctcaggtaatcctcctgcttaagcctcctgagtagctgggactataggtgtgcaccaccatgcccagctaatttttaaattttttgtagagacacgatcttgttacgttkcccaggctggtctgraatcctgggctaaagtgatcctcctgccttggcctcccaaaatkttgggattataggcatgacccccccatgactggcctgaaaataattttagatgagaagtaatgttgggtaaatataagatggcgacctatgagcaatttgtctatcacatgtatcattccattcctttctctattaaggatatttgtataatttaaaatcattcttgtatcattgtggatgtttttggctgcaaggaaagaaaacacaactcaaaaaagttaaacaaaaaggggatttattatctcacataataagaagcctaactatagggttgttccagggttgattaattcccagctcagaaatattatccagctttttctcacttttttgctctgccatatttatcctattggcctttcttgattgcataaaagctgctcaagtctcaaaatttgcatcctgaaggcctgacattctctcaggcagagaggaggttcttaatagatagatactaaatgcataaatgatgggttgttcatctttaggctatatagttttgagtctattttctcttactcctctcacagagtgggaagaaagctgagctttattttgcgattcaatgtgtggtggatgaccctttgctaataataatactttacagaggggattggaactactaagggcaactgcttgggaaaagagactggagataagtttatagcagtcattttaaaacaatattgcatatcattttaaatgactatacatttcatgaggcaattctcccatttttaatgatataaaaattctccattagatatcttttaaccacaaacaaaatatgccacctctgtattcactaaagttaccagataactcctgattgccaatgggcacttttccttccttctcacactggatgggcrtttagattgcacttgactctggagaccattcctccttcttgacaccactcccttggctgccatgactcccagcagtcctggctctcttttgagctgctttggtcattccattttattttcctcttctactcagcccttgagtattggtgttgctcagagccctgccctgagcagcttttctcattctggacactctcaggatagtctcaccattctcatgactttagtgaccctctgtggcctgatgagacttaaatctgtgtttacaacccagatttttgcccacacttgagtcttgtatastcaactacctttggacctctgcaagttgccttgaactcaaggtgtcmcaactgaaaataatcatcttccctcctgaactggattttccttctatatttgctagtctacatattttatctttattaatagaaatagcatttaacccactatgaggcactggcagaaaatacaaaatcagtcttaaactattggaaataggcagatggaggctctcttacttgttgaatttgtgaaacatatttcataatgaaagtattttattagatgaagaagaaagattgctgtaagtgacaggaaagatataatcaattaacatgaaaaggctatcacaatcccctaggcacccacgctagaaacttggaggttattcttgattccttcctctttttcactgcccacattgaatcaccaactcctgcctaatttgcctcataaatatttctaaagttaatctcttcatttctctctcttttatttttattttttggcaaggacagattttttttttttttgagacagggtcttgctctgttgcccaggctggaatgcagtggtgcaatcatggctcactgtagccttgacctcctgggctcaaatggtcctcccacttctcagcctccagagtagctgggactacgggcgcatggcaccatacctggctaattttgtattttttttttttttttttttttttgtagagatggggttttcccatgttgcccaggctggtctccaactcctggcctgaagtgatccacccaccttggccycccaagtgctggratgataggtgtsagccaccatgtctgacccatctctttatttctgctcccactgccaacatctctcatttgggtgtcagcagtagtctctgggttggcctccctgcctccagttctgtggatccttagattctctctgacactgatgctgatctaactaagattctttggtagctctccattaattccaggagaaagttccaattccctaacacggtttacagtggcttccaagatgtgactagtgcttattttcctatgtctatcatttgctattcttgccttgaagtggccacttgggcacagcagtgcttttagttcctgtgggtgtgccatgctgtgtcctagccttttgtctccgtgcaagctggctgaatgctgaatgctcggttctagacagtccttctttgcttttggcctacctgactgctgcttctttaagacccagggaggtgtcactttttcaaggaaactgtccccatccatgctcccatcccagagtgaattaagttcctggattgatggttctatcattcctgtgtgcctataatccactttcataattgttttctaattactccttagtgtcccctagaagactatgagcttcttgagggtagggattgtgccttattcatttgcagatccccatattgctatactgtgtggtacattataggccctcaacagatgtttgtgtaattaatgaatagatgaatctcagcattagataggttgatggaattatataattttaatttgtttgctctctacatttgaatgagcttttaattgcttcttcgtaagccctttgaaaacctaagcacaacatttagaattatttgggcttgacgtaaagaagaaagccaaggtaattgaaygagcactgatacctgacccaggttcttttcatattttgtttgagacaacccatgacttgccttctcgggaataaaagaaagttctttaattttatgtgaaaattggcaatatatacttaaataaattatttggaaatttaatgaggaagtattaatctctttaacctttttcagataaaattgtgtctctgccatgggcagaattcagacacttaagtgccttctggaaaaatctatctattctgcctttattaatagaagtaaaattggacccacaggtataaggtacttagagaaaataygaaattatttagtgttagaagtaggctgacttgaaaaattttgtttgctgttccagaattataagacaccrttttgctaattaaacagaaagaaggaacaaaatgacaaggaagatataatcaattaagcatggagaagggtgttaattatggttttataattattatatcttatcacatgataatttctatatgtttgaattttcaagtaccaccttgaaaactgtcactgtctacttatcttttacatatttttttttttttagagacaggggtcttgctttgctgcccaggctggagtgcagtggcatgattatagctcactctaactacataaaaagagaagttttttttggctcaagtgatcctcctacctcagccttccaaatagctacgactacagctacttggaagtgagccactgtgcccagctaaatttwwtttttttttyttttaagatataaggatctcactatgttgcccaggctagtcttgaattcttggcctcaagtgatcttcttgcctcaatctcccatagctgggattaaaggcacgagccactgtgccaggtttacttgtcgtttgaaaaggtttttcatgttaagttttgggggtacattccttaacagatctaattttatcagaaaaccaagttttgctgaacctaaatatctatactacatataagtaaaagaagckctgtaggctgggagcctcggatccctgacagttttgcagaacgctgatatctatggactctaaaatagacttcatttatagatacccacggaccactaatggacaaaaacatgaatcaatatgtattgtggcattcaaatcctagcgctttgggagaggagggaggttccaagatggccgaataggaacagctccagtctacagctcccagcgtgagcaacatagaagacgggtgatttctgcatttccaactgagctttgaagagagtagtggatctcccagcacagagtttgagatctgagaatggacagactacctcaagtgggtccctgacccccgagtagcctaactgggagacacctcccagtaggggccgactgacaccggatacggccaggtgcccctctgagacgaagcttccagaggaacgatcaggaagtaacatttgctgttctgcaatatttgcagttctgcagactccactgatgatacccaggcaaacagggtctggagtggacctccagcaaactccaacagacctgcagctgagggtcctgatggttagaaggaaaactaacaaacagaaagggcatctacaccaagaccccatctgtacatcaccatcatcaaagaccaaaggtagataaaatcacaaagatggggagaaaccagagcagaaaagctgaaaattctaaaaatcagagcacctcttctccttcaaaggaacgcagctcctcaccagcaacagaacaaagctggatggagagtgactttgagagttgagagaagaaggcttcagacgatcggtaataacaaacttccccaagctaaagggggatgttcaaacccatcgcaaagaagctaaaaatcttgaaaaaagattagatgaatggctaactagaataaccagcatagagaagaccttaaatgacctgatggagctgaaaaccatggcaygagaactacgtgatgcatgcacaagcgtcaatagccgtttcgatcaactggaataaagggtatcagtgattgaagatcaaatgaatgaaatgaagtgagaagagcagtttagagaaaaaagagtaaaaagaaatgaacaaagcctccaagaaatatgggactatgtgaaacgaccaaatctacgtctgattgttgtacctgaaagtgacggggagaatggaaccaagttggaaaacactctgcaggatattatccgggagaacttccccaacctagcaaggcaggccaacactcaaattcaggaaatacagagaatgccacaaagacatacctcgagaagagcaactccaagacacgtaattgtcagattcaccaaagtttaaatgaaggaaaaaatgttaagggcagccagagagaaaggtcgggttacccacaaagggaagcccatcagactaacagctgatctctcggcagaaactccacaagccagaagagagggggggccaatattcaacattcttaaagaaaagaattttcaacccagaatttcatatccagccaaactaagcttcataagtgaaggacaaataaaatcctttacagacaagcaaatgctgagagattttgtcaccaccaggcctaccttacaagaaatcctgaaggaagcactaaacatggaaaggaacaactggtaccagccactgcaaaaacatgccaaattstaaagaccatcaaggctaggaagaaactgcatcaactaacgagcaaaataaccagctaacatcataatgacaggatcaaattcacacataacaatattaaccttaaatgtaaatgggctaaatgctccaattaaaagacacagactggcaaattggataaagagtcaagacccatcagtgtgctgtattcaggaaacccatctcacgtgcagagacacacataggctcaaaataaagggatggaggaagatctaccaagcaaatggaaaacacaaaaaaaggcaggggttgcaatcctagtctctgataaaacagactttaaaccaacaaagatcagaagagacaaagaaggccattacgtaatggtaaagggatccagtcaacaagaagagctaactatcctaaatatatatgcacccaatacaggagcacccagattcataaagcaagtccttagagacctacaaagacacttagactcccacacaataataatgggagactttaacaccccactgtcaacattagacagatccacgagacagaaagttaacaaagatttccaggaattgaactsagctctgcaccaagcagacctaatagacatctacagaactctccaccccaaatcaacagaatatacattcctctcagcaccacattgcacttatttcaatattgaccacatagttggaagtaaagcactccccatcaaatgtaaaaggacagaaattataacaaactgtctctcagaccacagtgcaatcaaactaraactcaggattaagaaactcactcaaaaccgctcaactacatggaaactgaacaacctgctcctgaatgactactgggtacataaagaaatgaaggcagaaataaagatgttctttgaaaccaatgagaacaaagacacaacataccagaatctctgggacacacttaaagcgtgtgtagagggaaatttatagcactaaatgcccacaagagaaagcaggaaagatctaaaattgacaccctaacatcacaattaaaagaactagagaagccagagcaaacacattcaaaagctagcagaaggcaagaaataactaagatcagagcagaactgaaggagatggagacacaaaaaacccttcaaaaaatcaatgaatccaggagctggttttttgaaaagatcaacaaaattgatagaccactaggaagactaataacgaaaaaagagagaagaatcaaatagacacaataaaaaatgataaaggggatatcaccaccaatccctcagaaatacaaactaccatcagagaatactataaaaacctctatgcaaatcaactagaaaatctagaagaaatggataaattccttgacacatacgccctcccaagactaaaccaggaagaagttgaatccctgaatagtccaataacaggctctgaaattgaggcaataattaagaggctaccaaccaaaagaagtccaggaccagactgattcacagccgaattctaccagaggtacaaggaggagctggtaccattccttctgaaacttttccaatcaaaagaaaaagagggaatcctccctaattcattttatgaggccagcatcatcctgataccaaagcctggcagagacacaacaaaaaaagagaattttagaccaatagccctgatgaacatcgatgcaaaaatcttcagtgaaatactggcaaacccaatccagcagcacatcaaaaagtttatccaccatgatcaagttggtttcatccctgggatgcaaggctggttcaacatacgcaaatcaataagcgtaatccatcatataaacagaaccaaagacaaaaaccacatgattatctcaatagacgcagaaaaggcctttgacaaaattcaacagcccttcatgctaaaaactctcaataaattaggtatcaatgggacgtatctcaaaataataagagctatttatgacaaacccacagccaatatcatcctgaatgggcaaaaactgggagcattccctttgaaaactgtcaccactcttattcaacatagtgttggaagttctggccagggcaatcaggcaggagaaagaaataaagggtatccaattaggaaaagaggaagtcaaattgtccccgtttgcagatgacatgattgtatatttagaaaaccccatcgtctcagcccaaaatctccttaagctgataagcaacttcagcaaagtctcaggatacaaaatcaatgtgcaaaaatcacaagcattcctatataccaataacagacaaacagagagccaaatcatgagtgaattcccattcacaattgcttcaaagagaataaaatacctaggaatccaacttacaagggatgtgaaggacctcttcaaggagarctacaaaccattctcagtgaaataaaagaggacacaaacaaatgaaggaacattctatgcttatggataggaagaatcaatatcatggaaatggccatactgcccaaggtaatttatagattcaatgccatccccatcaagctaccaatgactttcttcacagaattggaaaaaactactttaaagttcatatggaaccaaaaaagagcccacattgccaagacaatcctaagccaaaagaacaaagctggaggcatcatgctacctgacttcaaactatactacaaggctacagtaaccaaaacagcatggtactggtaccaaaacacagatatagaccaatggaacagaatagagccctcagaaataataccacacatctacaaccatctgatctttgacaaacctgacaaaaacaagaaacgggaaaaggattccctatttaatacatggtgttgggaaaactggctagccatatgtagaaagctgaaactggatcccttccttacaccttatacaaaaattaattcaagatggattaaagacttaaatgtcagacctaaaaccataaaaaccctagaagaaaacctaggcaataccattcaggacatagacatgggcaaggacttcatgtctaaaacaccaaaagcaatggtaacaaaagccaaaattgataaatgggatctcattaaactaaagagtttctgcacagcaatagaaactaccatcagagtgaacaggcaacctatagaatgggagaaaatttttgcaatctacccatctgacaaagggctgatatccagaatctacaaagaacttaaacaaatgtacaagaaaaaaacaaacaaccccatcaaaaagtgggcaaaggacatgaacagacacttctcaaaagaagacatttatgcagccaacagacacatgaaaaaatgctgatcatcactgagcatcagagaaatgcaaatcaaaaccacaatgagatatcatctcacaccagttagaatggtgatcattaaaaagtcaagaaacaacaggtgctggagaggatgtggagaaataggaacacttttacactgttggtgggactgtaaactagttcaaccattgtggaagacagtgtggcgattcctcaaggatctagaactagaaataccatttgacccagccatcccattactgagtatatacccaaaggattataaatcatgctgctataaagacacatgcacacatatgttttttgtggcactattcacaatagcaaagacttgggaccaacccaaaagtccatcaatgatacactggattaagaaaatgtggcacatatacaccatggaatactatgcagccgtaaaaaaggatgagttcctgtcctttgtagggacatggatgaagctggaaacgatcattctgagcaaactatcgcaaggacagaaaaccaaacaccgcatgttctcactcataggtgggaattgaacaatgagagcacctggacacaggatggggaacatcacaaactgggtcctgtcgtggggtaggggagaggggaaggataacattaggagatacacctaacgtaaatgactagttaatgggggcagcacaccaacatggcagatgtatacatatgtaacaaacctgcacgctgtgcacatgtaccccagaacttaaagtaaaataataataataaaaaaggaattataaaaaaaagaagttttgtaaaaattgagagsaaatcttttttcttccattaggggattatattatattttttagatgatcacgttttcccccaaagctctttgtatgtagacaatttaaaatcccaggataagataatgttaccatgttatggtaattcctgcctcagatttacaggatagctttcacatcatgcttgcgggcatcagttcactggattttatctgttttatccggaggcaaatttcatgaactgctgatgccctgctttcacctatactaatcaacatgggatgaaatcaagstagcttaaatttttttctctttataaaattgatacatggtcaatgtaggcagtttatagaatagaggaaactatatagaaaaaaataaaatcactcatattcatattcacaccactctggaataactgctattaaagctttggtatatttccttcttgtttatacaaggatttcaatgggtgggttgggggtccttggttaatacctatacttgcaaaatttttatttcattaaactttttaccatatagttttaaaatctatattgtattctttacacatgttgataacgtaattgtgtacatagcatgcttgagtgtggacactattctctgggcattttgataayattatacttctgtttttgctttgtaagctcagcttggtggtagccaggtactttaccttgtgtccctatgaactttwtgctttccaatatccttgttaatgmcaatagattagtctgtgtctagcaataattataaattaagtaataattttttctcttcgcagcacaaagtacatgctcaagtcatcagataacatgctccaatggtcagtgtatcccaagtgaatacaggtgcgaccacgtcrgagactgcccmgatggagctgatgagaatgactgccgtgagtctgttttagtccttgcrctgtatttggtttcacccttgtccctttggcattttaatcaatttgttagatttgttgatggacrtaaatgcctacaatatgcctcttgttattgcaatctcttggcagattcttttgtggattaggggtgatgttctgataagagtctatttttaacaagacattctaagagtgtcctgccttagtgcatcaagtttctgtattttttatagtaagaaacttttaacatgaacatagattctgaaaggaaggataattaaatacattgagtacagaatcaagtttggtaaattttaactgttattacacagctatagtaagtttctaggtcaaatttctcactagttttcctgcttttatgaactcaacatttttcagattacctttggaaaagtgttacattttgaaaatgtcttttcctataacagcagcatactatatctctttgtaactgatcaccacaaaataagacatataaatcatagtattctatgtataatgtataaatattaccacaccaaaataagaaagtgcaatcatggttcattatctagtaacaggtaagtaaagaacaatcttcctctttcgaggcttatatagaagtgttaggatatgagaagataggaattagtctgctgtgtcagtcctatagtccatataattgtctttaatctcaggcataccacagtttctctctctttctgttttttattttttatttttgagaaggagtttcactcttgttgcccaggctgagtgtgatggcatgctctcggctcaccgcaacctccacctcccaggttcaagcgattctcctgcctcagcctcccgagtagctgggattacaggcatgcgccaccacgcccgactaatttttgtatttttagtagagatggcatttcaccatgttggtcaggctggtgttgaacttctgacctcaggtgatccacccgcctcggcctcccaaagtgctgggattacaggcatgagccactgtgtctggcccctagtttctctgaaaagttcttacaagtctagcgtttatgaatttttccagaagttccttgagtttttaatatatatayattttaatatatacatataacatatatttctgacaggccttttcgtgcagtcctgcatttcataaatttactatgtgctgtataaagatatagtcatgtgtcatttaatgagggggacacattctgagaaatgtattattaggcaattttgttgttgtgtgaacgtgatagagtgttgttaaacaaacctggatggtatagcytactgcacacctagggtaaacagtatataccctaggcatatactgttgctcctaggctacaaacctgaacaccatgttyccgtgctaaatactacaggcaattggaacacaatgttaagtatttatgtagctaaacatatgtaaacatagaaaaggtacagcaaaaatatggtattataatcttaggggaccactgtagtacatgtagtccatgcggtctgtcgttgaccgaaagagccatatgcggttcctgactgtasttccttttgtttgctcttaaatttatatttcaaacttcaagaaattatcccagtattccattaattggtgagcagatttttgtgtaccttagaaatcttgatcataaacttttcagttattatgtctccaacggaagattcaagttttagcctattctcacgggatatctcctctattgttttataattttgatttaattttagttctctggattgtctctaaattccttcctttgatacaaatggtttattttatgctttctgataaaagaactatcttgtgtaaattttgctaaacttcccaatatggtgctgtgactagggtaggagctaacatacattgattatggcaagcaaattgtttctagtcactgtacatttcaaactatactgttcatggaagatatacttgtatatgtgcaaaagcaagacctatgcttccatccataccatgaccacatggtgcatttttaaaaacgacccttctccagtgctttctcccttgcatgttatttttctttgggagaaatgtctgtgctatttgccattgtctctccatttcctagcagagttcctagtacagttctgttctaattttcatctgaaatattcttatttatctatttatttttaattttactttaagttctgggatacatgtgtgacgttcccctctctgtatccatgtgttctcatcgttcaactcccacttatgagtragaacatgtggcgtttggttttctattcctgtgttagtttgctgagaatgatggcttccagcttcatccatgtccttgtaaaagacatgaacttgttcctttttagggctgcgtagtattccatggtgcatatatgctacattttctttatccagtctatcattgataggcatttgggttggttccaagtctttgctattataaatagtgctacaataaacatacatgtgcatatgtctttattttttgaaagacattacagtgtttccactttggatttaccttcactctggaaattatgcaaagaatttagactaaactctggcaagtttagagatggtagcgtgtgtctggatgccacagaatagcaagtttaggggtcaaagattctcctttcagtgctttgtaaagcacacagtaggttcttcatttaggcaaatgaagaagatatttttgattaataataatgataaaccatatgttatattttgtagcattttataaatttcagagcattatataaattctagttgttactattaggttcctttatgaggacaatagggcaggcactattataatctcttatgaataaacaaaaacttcaaagagaagcgtgacttgtttgaggttgtatagtagagatagggcttaatttgtcttctagttccaagtctggtgattgctcttcatggagggctttatttacagaaggagaaagtcctatcttgtacaagttaagagaccaccagaggcctgtaccaccagccaaaagtctgtgtctttatcccttatttacaagtagatgaaaatgagtgctttattgcaaatgcagtgggactaaaggaactgctactttggggaaaataaaagtcagctgaaacagaatgtttgcagccaagactaaagtcactaatacaaccggctcacaactttgccaatgaaccttctggcaaaaacctggcaggatacgaatatgtaagtagctgctgtaaaagggaacgaagcagaggaaatgagctttgtaagttattatatctgggcaggaatttttaatcaagtttttttttatttaaaaaaatttaagtacaaatagttggtgaaataatgattcactaaggaaagaaaaccaaatttgkcttactgtttctggaatcatacaagtcatgaacccttcagggcacactgtgacctaaaatgaatcacatgcatgtaagggattttgcagtgaggcattctttcctatttccctctaccttgtttatttatagctaagtttcatttatggagcagtgtaaaaaaaaaaacctcagaaatcagaggaaatgtagaaaagaaacttcttattcttttgttagtgctttgatctggtcacagtcagatatatacaagaaggaaatgaatggcctcgatcaaagtccttagaaaatgctagtataggggatgggttgcaggagtgatcccattttgttttccttctttgtttaaagctcttgtggaaagtgggaaagggaactgccagtcaccgagcaccagccaccacyttacccacttttcacgtcaatgctgcaaggtgggtatgaggaccagctctgttttacagagattgtaaagattatcaagatgtaagagtaggggagccaggattttaacctaggtctaaaccatatgcctgtgctcttaaaagattttgctttaggaatagaaacgtataacttatttttgtttaaaggttacttagctattttattatttttacatattatygtctaaaccttttttagtatggaaggttttttttaacatatacaaaagaagcatgaagtgtatagtgaacccctttgtatgcatcactcaattacatcaatgatgaactcataactaatattgttttatttattctctttattctccccattattttgaagtatttcttagacattgtataattccacctgtaaatatttcagtatttatctctaaaatataaggactgaaacataatcataatatcattatcacacctaaaaattaaacaactcttctttaaaataatcagatattgagtcagtttttaaaattccccaatcatcttgttattttttatagtttgattatttaaatcaaagtccaaataaaatctttatgttcaagttagttgatatgtctcataagcctttcaatttrtggggtttccttctatttctgttctttacccctwgcaatttacttgttaaaaaaaaaaaacccaggtcacttgtcctggagtttcccacagtctggcttgtgttcattgtgtcccctgatgtcctttaacacattctctgtcctctgtatttcttggcaattagtagctagacctggagcagggtttctcgaccttcacactaatgacatttgggaccggacagttctttcttgtgcattgtagaatgtctaacagtatccctggcctctatccactagatgtctgtagcattgcccagtcgtgacaatccaaaatgtctctggasgttgtcaaatgtcctccaggagccaaatcatccagttgagaaccactgatttaggggactgaacaggtgcaaggattttcttggtggggaaacaagggaaggcaagagtactttttatataaatctgtgtattttcattaggagacacaggatagctagctgtctgtgatgtgagtagccattgatgatcattgctgaaatccatttagtcatagcagtacttagttattttaaatgttgcattagatatataacagctgttattagttgctttaaattagaatgttttcatgtgatcaaagattaaatgaggcttagccagaaatcatcttcatgagacatgacactttattatttctgcagtgacgatgcatggaaatcattacttgtggacaaacttagaattagcctgtgaatggggcttttgtttttctatttctcagaaatagaatggcctataggaatgaatatattaggtacctggaaaccacctaaaaatagtaatggatgttggaaaagctccaaagaaggrctcaattcttccctctaatattcaaaaggattagggagcttgatgttgtagtttgtagccctgcctgtcattccagacccctaggttgtagttcataccctttcaagcttctaaaatcaagacactgagctccaagacagagtaccttgtgtccattccgggcattcctttacagaacaaagagtggtgtgtaagagtcctctcagggaggcaggcagggagagaggaggtgagagaatgttcgagatggtgaggaaggggaggatattagggtctcaacaaaaagattatttttgagataaatgtggtatagtatgagagattcttattgcgtttggtctttttatctgcttcatctttatatgcataaggtattggtggttattttacccttttagaaaaatttttgaatatatatatattaaaacctgtgaaacaggtaaaagctcattttcccccttagttcttttattattcaatctggtcatctgtaaaatggmatctcatattaaacagcttgtcaattaacttttttttttttttaaggaacagagagattcaaaactgcggtccattttacttctaatgggattagcatcaaggaaaaaccactcatgcagggtctaagataaacatcagaacaatgcagcaattataggtcattcaattaatatattgaygtgactttcagttgctcaaaaatagtacagtttttttctgttaagtgaaaagattattttgctttttcaagcaccatattagaatgattttggtgtgaataaaactattgctaattatcgttggtttgcagcacttctcttttgttacttaggaatgccaaagaaagggtaaaatccctgttacaatgaaggctttcttgctggtaatcagcagtayttggtctgcctgcaactggggctgctttgtcccagaagttttatttctattgactttctgctctttagaatttaaacatttttctttatatctttaactgctgaaactccagctgagggaacagtgggaggggaataaaaagatggttaaagtcatttygtggactgtgagggtgcatgaagaacatgttcttcaaactcagttccacatttaagctgcccagcgagccttgcccttgctattctctctctccctgaagccagaaagaagaagcaggcgactctccaaaggaccccatcttacctgtcacatcacagatgtacctttttagcattctcacaattgagataggattcagagccctgaaacctggaggaaggaaagaaaactctcttttatttagtttccatcatacaaggatgttataaatatcccccatctttaaaaagatcctaagatccctcttagctgttgccaattactctgctcccttttacaacagagtttcctagcattaacgttaatggctgtttccgtttaccctcgtcctgtttctttctttaaaaaaattttttttacatatgtgatatatccaactgattgtcctttttttagaacccactgaaaatagtccttcatcttcaccaatctcctgaaaatattctttcaatgctaccartgactgccattatgctaagcctaatggttcttgttcaaatatcacttctcagagagctactccccacagttactctttaccttttacccagctctatttttgcaagttttttttcccattgtgacatttactttaatagctgtaatttcactctcccaaatagaatgtctgttccatgagaaatgggattttatttcattctttagtaccttgcacactataggtgtgcaataattatttttgtatggattgattaataaaatgctgtgggaattgctacttcacttgtaattttgtttaccttttaatttaattcttagcacagtatctatgaagtcagatttcaataaatacatgttgagcacaagagaattctaattaagaagaaggcagcactctgtagaataactggtttctaggatattgacattcatccagcaatgatttgctgatgagtattcaaattatttggggctacatttccagcagggaggctgagccacaccatttctagtgattggaaagtggctactcttataatgctggggtgcagctagttttcctgtctctttgattagattttgtcttttgttctgcccaggtgggtccctgggaataactactaaagtatgaaaccatggtgttgtctggctttcaatgaaaacatgtagccycgtgccactaaacatgatgtacattataaacatttgtttaccccttagaaggcatcttacttctttgtactattccttggagcatttgatgcacatttttccatcttgttgctcggtcacttttgtaatagagcttgtgtgagttttttttttttttaaggaatttagaactatrtcagtttttatctcctttgcagtttttggtgatagctctgttatgggaagaaggcagtgctgtggatctggactccttggagcaaccctctcaggcacatttctagttgaggtctaagattaggtcactgtggatagagaccagcaaggaatctcaggcttaagacccagttagtacaaagggagtgagctaaggaaaactagataacttagtttatttctctttttcctttggcttcctgaaagccacccagactaaacttgatgttagttcaattctacaagtcctcgggatgaccatattttctttctctttccaaggtgctgaatttctttctttctttctttctctttctttctttctttctttctttctttctttctttctttctttctttctttctttcyttctttctttctttccttctttctttcttctttctgaatttcttttttaataaatctggttttatataactttttattgaaagcttcttcaaattacttttggactggggaaggatatgcttctctgtttttttccttgtatattactgcattccctargagctagtccatgatggcagtcactttagggacttgaaattcaccaggaatgggggtttggggagtcgtggtggtaccttcatgagactaactttatggcctgttttttggtatygactctcctgtttgtcctggtactccttctggaaagttatttttcctgtgtaggtttcctagaattcctagawtwtatcatattgaagtactttgttaactatgccataagttgtgggaaactagagttggcctcacttttcccttcttcctaatgtggatgggaaactgactggcagaaagaaaatcttccccccttcctcttgggtttcttctttttcttttcataatctcttttaagaattttctattaccatttcattcaatttctttcttctttaatttttcgcttcttcctgttacttactctgcagcctataagtggtagatgtatctgtggtagtggttagtaacctgggttatggagccaggttgattggatttgaattctggctctccaactttaccagttatgtgacctttttcaaattccttaacctcttaatgctcaggttcttactctataaaatgggagtcatcatagtatttacttcatgaagttgttatgaagatgaaatgagtttatacatattgagtactttgacacatgtctggcacatagtttttaatacatgttattgatgatgatgatgatgatgatgatgatgattgcttgtttaactttgtgggtagcgcttgaagtaagtgctkktggccaaactggtagattctttctggcaaatcattacattgactggattaatctgtcttggagccagaggaaataacataaagtaacttataaaggatgactctaggaccttgaaaagtcccaggtgtctgggctggacttgtatcggtaatttcttgtgtgtgtgtgtgtgtgtgtgtttcccaatcttggcttaagtttcctaacctacttttaagattccttcttcataataatggttttttctatgttgtcctcagccatgttgtcaaattgtgagaataaaacatgtctgcagtcttcctgtcaagataataatgaacagtgccttatatttgtatcttactctgcttaaaatgatttccattctaagaggtctacaagrtcttcaaactacatttctacaccctcctccctgattatgtaaacagaactatagcatagaaatttcttgcttcaaaccaaatcattaacagtgaaaaaatataaaaactcttgtctgcataattttggggcagctcccaattatgggggaacaaatctgaacatgtatcatttgggattgggagaaagtaaagaaaggggaagcaaggagtggtatgaggaaggatattctcacctttttgtgttagaaaaaaccttaaaggtctgaggcttaatttatagctacttgttgatctttccatyaaaaccaaattcagaaggaagagtttccttggtgttcttatatatggtctcctctcatattgcactttaccctatacttaaattcttgcaggacattatagccacatgatggatttgctctgtgggaagaaggttagacttaggcttgccaagcaaatgaaccaaaaaataagactttagatatctcccagttggaagctcaaaggattgtgaattattgttttctggagtagattgaaactcattaacatctttagcaatggtagtagaatccattcatttctttctttgctcagtgttracagtttggacctgttgtctctgtgtgggtctccaaagagggaaaaccattcagaaacagattttcaggtattttcagtatttggtggagttagggagctctgtgcaatctttcctatgagtatacatcccaggttaactatgcaccraagagatcaaggtgtgcaggggttgagaggggtcctctgctgattgagagtgattctttatcagtgtggatggagacaagaaagctgtgtgttcctcattccaaaagtcaaactgctgacctctggccatcacaataccctccctgatgatatcaagctgggcttcttgtttgttgggtggggaatgggccttgtcagtaaacttgtagtcatgtcagtggttacagttttaatctttcccctttcaattttctggcactggctctcaaaaagcaggatgaagaaaacgagagatccatccagcacacttattccagattctttatatttataattatcaccttaaatgaagtagccaccgttcaagcccagattaattttcctccagacagatagcttatctattgcaaagagctgggttttctacgagtttttcttctgcttgctgctgctcttaaaaggctagataacacattgactctaggagctatctggctcacaggggcaaaggaattgcttgctgacctcacctggtcttttgcatctcttgaagggagaattaataaacatcacttgaagggagagttgtgtgactcatttgaaggcacatttgtaaggcatatcatctcagcgaggaaagacgcaataactctaggcactggctcacttttggactattaaaaaacaaaataaaattcagaaaaaattttaaattttaaccagctatttaaaaatgccttccattttaacatatgattgactatatgtaactctggcaattgagatatttaaggacacttaataaactagctttgaacctctggagatgagaagagttaggcttattcctttactataccaaaaaaaagatcattggagagtccatttttttaaaaagtgcaagttgttaacatggcacaagtttagtacagtttcagcacagaattttgtgcatggcttctgcttgaaaagacttgggactatccaaagaattatcttcaatatatttatatctctataaaatctcaaattgggttcttaagtgcaaaattgagactcaaagtcaattaagacataccttttccttggttaaaaagaaatcagaagatgacctgataatcactacaaaaataatctttcatgaagaagatggtcagaccaaggaagatatcacatttgtgaaaaggagggtattcaaaggccataaaaggcagaacttcaaaatattttaaaaagccraatgaactaaaatgttcacctgtgataaataatagcaacattgaacatttctcaagcacagagagtaatgtcccacccctgtactaagtgtgcacagtgagaaatgtcccacccctgtactaattgttggggattctaaaatgagtaagacaggatccttgatctcagggagtttcattatgtcatggcggaaagagatcaaccatccacagaataaagcctccagtaagaagtcatgagagacaggtggtccaagtctggcaagtagagaggagggacagatagcacgttattcctgtaagggacttcctgattttcaactgtgacctagaaaaccaggtccagtgagtagcagtgaggtggtcatatgtacataacgtggcaacaacaatttgtgctttgaaagcacattatgcttttcaacatgctttaccagacatggtcttttcaggccgctctaccctgtgcagtaggttatccaaatgtgcagatagggaagtagcaacatggagaggacatgaagcttgagtcacagtaaatagctgcttagtggtacctctgggccgccagggctcctgaactctaggcctgctttctttctgcaacccgccagtggaagaaatggcctttcttttttccaagcttgtgcagtggtactttagtttcctgggatgttatctgtatcatgtaaaagaatgtttgattttgaactaaagttaaattctttctcattcttcatcttttggctcaaaagtyacttcttcaggggatacttttctgggcccccaaatctctctgctatgcagtctcacagtcctctgtactttccacattagcacttatcccagtttgtaatttaccatttgtgtcttatttgattaatgtctgtctcccatgtccagccttactctccatgaagccagggagcatayttcttttgtgtatcaatatatgcatttagtgacttgcatatagtaatcactcaataaatgtttgctgaaggaaatttaaggtttgtttactgtttccttttcctttttttttttttttttttttacaatagagtacccaacatgtgagcagcttacttgtgacaatggggcctgctataacaccagtcagaagtgtgattggaaagttgattgcagggactcctcagatgaaatcaactgcagtaagtattgtgcacaagatgtgcagttgtgtgctgaagctggtttatactggtttgagagagccaatatgtacatctcttcccaagttcaggttcagtgaattcatgttggtagtttgaagtcagccgttggtaggagtatttacacactggaaatcggcaaacactacaaaccagggcctttttgttcctggataactggttcttaaacagttaccagcacaccactgcttaataagaatccctttttaaactggagatgctcttcctttgagattaaatggctacaatggagttaacttctctcttttctttcccttcttaactttctgttgcagctgagatatgcttgcacaatgagttttcatgtggcaatggagagtgtatccctcgtgcttatgtctgtgaccatgacaatgattgccaagacggcagtgaygaacatgcttgcagtacggtgatttctttatgctgggtcatgttgttgggagtgttttgttttgtttcggttttgttttgttttatccccccgctccsccaccaatgtacctcttttttcaaggagaagagtcactacgtttgatggcagatggaatcagacggtcactagggggtcttggcacaagcctttgtggtgttgctcgacctgggctcctttattttccaaggatctgtgtagatgtaaagggctggtgatggacagtttgccttctttccttaggctccaggggtacaggatatattgtatcactggattctcaaatgacccatacctctgacaaccttgatagtagaatgagagaagtgtttttaagggaaaggaagttcctaggagtggctctaactctcctctttactttgaaatttctgctgcattaaagttggagggtcaggaaagtttctttttcttcgttttcttttttttggagatggagttttgctttgttgcctgggctggagtacagtggcgcgatctcggcttactgccacttccgcctcctgggttcaagcagttctcctgcttcagcctcccgaatagctgggatcacaggcatgcaccaccatgtctggctaattttgtgtttttagtagagatggggtttcaccgtgttggccaggctggtctcgaactcctgatctcaagtgatccgcccgcctcggcctcccaaagtgctggtattatgggtatgagccaccacgcccagcctgaaagtttcagtgtggtataggtggctttcttgcctccacttcttcackctgaccttgcttttatgtccatgctgttgcctgcaatgcaaatgacctctcttattgttgccacctctccacttatgttttttggaaagagtaaagttagaagactctgtgaaagagttttactatgttcagtaagttggcagctttgcgtggtgatttatttactagaatgtatgatttccctccacacctcttttgattggttggtacccatgccttagggtgttgttaaatattttcratatcaccctaattttcaatgagccatgcctgacttcctttctggaacctgggcttatttcagtgacagagaattaaagagaatgtgacatcatggaatggtcgactcagaatcatttggtcatagattagcaattacggagcttgtagtaaagtatgagaacgttggatgttgtcatgtctgcagcatctttgtctgcattttctgttctgtgccaacgcattgcaaaccatcttgtttttaatttttttttttttttttttttgaracagggtctcactctgtcacccaggctggagtgcagtggtgcgatcttggctcactgcaactccacacacccccaccaggctcatgccatcctcccacctcagcctcctgagtagctgagactacagacatgtaccaccatgcttggctatttatttttatttttcgtatttttggtagagatgaggtctcaccatgttgcccaggctgatctaatttttaatcttgaaaaacagaaaccggcacctgagttcatttcctggacccaaagctgctgktatcttcttctttctctctcttttttwtcctcctttttaaaaatttttgtcaagatgtctaagggattaaattgatatagaaatttcawtttctaggagtactgcttaggcagtgaggtgagagcactttcagtttttcccggtgatttgtgtctttggagtgcagctgttgctttattccagactatccgacctgcggtggttaccagttcacttgccccagtggccgatgcatttatcaaaactgggtttgtgatggagaagatgactgtaaagataatggagatgaagatggatgtggtaaggaggggaagagaytcctactgaaaagcattttcttcaagtgttttccagcgcttgttttttctcctttcctttttagaaattttgtgtgacaagcaagcctcaggattggctggagttgaaggggttgtttaggaacttagtgggtggggaagacggaggtgactgcgctaacttctcctaagaagattcagaacacaaatacagattaaattataatcctctcccttctatctttaaggcaaaataggtaggacagtctctgtctcttctataccccagtctgactttctccctgtaagactgcctgttttaaatagatttaaaactatataaaactaataggctggggaaggaaagaaaatagggaaaatgtcatttgtcttagaccttacaatctttaaaaatgactttgaaccttggtaacagttcagcttatttttttgttttggttttgtaaattctgattcccaaatgagtcactgacactcagtggtgaaagagaggccaccttgggaacacgtgggttggagctggggattggtaagtgtaggagaagctactatccagggaagtgcttaaagattccgtgagaaggaaattgccagtgatattcacccttttatgttgctgatattgacccttttatgttgctgatatcatcagcagtacctccaacaatttagcagttactaatacccataccctacagcaagttacctgcaccattccaatcccaggtatgataagggaaatgcttgttaaaactatgttttatgtttttatgttccagaaagtggtttttctacatttgggttatggtttttcttatactgttgacatttcactaaataaacaaagcaaatcaaaaagcccaaccacaaattcaagtaattctggacctaacttgatggccctaattctataattcatgatttaaataactacatcttttcttaggggatcatgaatttagtttgtcgataattgaggcccatatctgcttcttcctcttataaccctactgggggctgccthttccaggaaaagtggagtaattccattatgcctctccttagaatctcagtaaaagactagtggtagagttagaaatcactaacttattgtaaaatgtagatcatttatagatttctcttgttcaacttgctctrcatcctctgtaaaccactgattaacaaagagctggctgtacctcccctatggcctgtaactctctctttttccccccacagaaagcsgtcctcatgatgttcataaatgttccccaagagaatggtcttgcccagagtcgggacgatgcatctccatttataaagtttgtgatgggattttagattgcccaggaagagaagatgaaaacaacactagtaccggaaaatactgtagtgagtatagacatttacctgggtagctttcagataaagatatttctgttttctagaacagacgttcaaatacagtgtatctgttggcrtttgcataacaaagcaccccaagacttagtggcataaactgagaaacgtgtcttatttctcacagttctgtgggttggctaggtagttcctctggcctgtatcagctcactcacacgtcaggatgttgcagtaaaagcttgggctagcctagccttgttgacccagaggctgaaagagcaaatcctagggctcaagtactttcaaggttctacttatgccaagtttgctcaagtcttattgtccaaagcaagacacttggccaaacccagagtggatggaagaaatagactccatctattgatgggaagagcctaacaattttttagcaactccccgttcctaatccctaacrcacacacagggaggattgtttcaatggcaattttgatgaccttaaagatgttctggagattttattacctggcttatacttatggaaaaaggccttgtctggctgtactaaaaaaaaaaaaaaaaaaaaaaaaaaaaaagcttctggttcctgggttatgtaccttgagttactctccaatggcaaaactgagttggccatgcacagtgttgttcgattatgtcttgtgtgaccacattcatttatgaggaaactgactggaactagggattttttttctccttttttggggctgtagaatattcaccccaccaacaacccmtcaactctgtggacagctgatggtcctgtaaggaaatgccatttaaaaccttgatttcatcaataatatactctaactaaatttgtgattgcctagaagtgcccatgtaactgcaaccccaaggttattttttgtttcctgacaaaaattgtacataatatttaaacaggcagagacctctatggcatttttttctctatttcatttgggagcccatttaaaaaagcttaaaaattaataagagatatgtagtcacagtatgaaagttggaaaataaaaattaaccaaaagaaaaaaatataatcacctgaaatcccatctcttgaagccagccacagttaatatttctagggcttattcttgctccagtcacttgggagttcttagccctttttactatgtagacacaaagatagacccatgcatgacctgatttttttttcataaataagacttttaatgacttatacttgcacatagttataactttaaaaaggagctttttyttttcttttgtttccactcaaggcagcctcttgttctgtcacccaggctagagtgcagtggtgcagtcatagctcactgcagcctccatcttttgggctcaagtgatcctcctgccttggcctcccaaagtgctgagattacagttgtgagccactgtgcctggctaatgcttttatttttaattttttgtgaatatgaggtgtagctacattacccaggctggtcttgatctcctggcttcaagcaatcttcctgtctcagttgaacttttattgcaaagttttgcagtaagctttgaagggtgacagatttttctgtacatctacttcatgcttactgagctgctactcatggaaaaagaagctattagattaatcagtcttgtccagaggtcaccattcatttaacaaagttcttttcttcgtttaggtatgactctgtgctctgccttgaactgccagtaccagtgccatgagacgccgtatggaggagcgtgtttttgtcccccaggttatatcatcaaccacaatgacagccgtacctgtgttggtaagtgatggggggcggcggctacttgtctttcattacagtacactgatgggtgccctgatctctgacatctaggaggttgcacttgtggagagtcgtcatggtctgtyataacaaagagcaacccagacctcacagaaaacctggcaaatagggaattttaactctgagaaggtttggtgtggtgtacaaggcaaaagaatggttctgtcatgagcgagttgactagctayctggaacctatccattacttgatgagggcrgtagtccttttctgttttcttttcaagtatttggcatcaggattggtgcagccatactggttattgaatactgaactacttccatgaggttggtagatagctgctgcctgagcccagcaagcaccgctaccttgctcccctggcctcttctccaggatgcacaagcatccccaggatcccacaactaaaggttgttacctgacacagcagaggatcaccaggtcattgctcaggtgactacactggtgggccagtgcctttgctgggctggctactcattccactgattgtgacatccacttggaactatcattcaagatgagcagattctttatcatggtgcttccagatggtggctggcattaaactagacaccagtacaccaactatttcctcatatctctcctctctgacttcagaaatgatttctcccaatgagatttttgattttgatgccagctttatatctcactgtgattaggayggggccttatgatgggagaattagacttgaccaactatcatcagtttttgttttctcagtgagtttttggtgctctgatcttttttccttctatctgatttttgatacatgaacaacaaacatactagcaggaagtgatcacagagggagtttaaagaaaactatttttactgctgttgggaaaaggcatctggaaggcaattgaaactattcattaaaatttggtagtcatctatggggctccaaaatgattcagaattttcccaggatatttatattcttttgatattccttagaaatgtgaggtattctttagggcttttgggatagcaacaaacatgaaatgtgtaagaaatgcttctagaaaagtatttcttctgaaattattattttaatattattaaaatattaaaattttaatattaaaatattaaaattttaatattttagaactatttggtaacatttggaaaaaattattgaatatagataaacctaatgcagttattcagtctttagtctcagctcattgcttccaacataattatactttgtcaaatacagctaatcttaacaactactcatagccagaaaagcctttctttttttctttattattattattattattattcttcagcggaagtgctagcaaacagaaaaatgtattgataccagaaataaactctggtttgcaaattaaacttgaaattcttgagaaagtctgctcctcagcgttactgaaaactacaatcgttgggctcacttacctaccatatgccaaaaaaaattagatttttatatccagtaaagcaatccatttgagcttttccttgtgttcatagtgggtaactgtaggttcttaatatcaggaccacgtcccaaagttgcccatctaattgctcctcttaagtaactatattcaacaaggtactttaagatcaagtgacttaagtgaactctggaataatttaagaaggcccccaaatttctaatcattttaaaacattttayaaataaaagttatgatctgcaactggacttaaataagattgcaggacacattttgtgttttattgttatcattaccattatattgggaatgcattcaagtaatttacagatacttttcacacgaatgcccttattggttaggtggtgacctgactctgggagccctgcctggatttcaggcagccctgcgcaaaggggcagcctcacttctgctcagagtggggctcgtctgtgggtgtgaggccactcctgtgtctttagcaaatgtcaggctcctttkcccccctcactgctacccagctgccaatcccattcccagccttttagttctttaggcattttccttttctcttagtagaaaagaagttccaatagaaataccagaagccacattctcagtattacatcagcttttctctctttttcctttatcaactcccaaagaggmgttggggctgagctgtcttacagttgaaacttgataggccatgaagkcctttcaggaaaagtgatttgttctttcagaatcgctaattcagtcttgtgatgccccacaagctgttctcagttttttgttccacsctagagcccagataacacattttccatattttccaacatataagtctgtggtgagccttgggttgtatttccaaatgtctagggttttctaaatgtcagagattcaggccacttcaattttcaatagcctctcacaaagcgaaaggctgtcataacaatgttcttgttttataaaattttgcatttaacctactagtgaatgtaaggcagaatattgcagtattatgtgtgcacaggataatttcaggatcagagaagataccacaattaataacacattggaagtagtgtgttctaataccggggcactaattttaagttccacaacagacatcttctttcattcccgccagcgcgtttctgggactttagtacagacaacctcatttggagataatctcaaaagtctacatttgagggcctttgtgaatatgaggcctcctgccacctgcagagaccttttctgtgacctttgctgtccttcaagaatgtgtcatttgcctctgagttttgaggctgggttaacatttatttcacatttgtttcaaagaagactgtatttttctctctttatagagaactctttaaatacatgacgttaggaaaccagttacacttgtttcagctgagctgaatttttaggggaattgttgctttggtttgctctctcaagcatttcatttcaacaaatactctctgtatggctataaccctctgcatggctgacgcattacacaggcttcaggtgttggaaacctatgcaacatttattatcttagacatggctccccagtgaatacctcggtggtaatcaagaataacattgaataatcctgacacgaaatcttgtgtctttctaccattcatctgcctctggtagtsttgacctggcagtggaagctctgaggcatgctgaagcagtttactgggctcattgtttctgattgacaggacatgctgtttgttgacagaatgacatcgtggtgcagagtgagggcagggaggtcattcagcatggtggggtttcacacagccagatggatcagagggtrgccaagggggkctcagttaaaaaggggtttttgagtcattttcacagcagtatttgttggtgggaggagacaaagaataaaaaggaaagaaaaatagataaaggtattggagtgagagggggattgtaaagtagtgttttagtgttttgtgtggtttccactatcttttctactctcacgaaaaccctcaattctacttttatttttcttgtcttcactctggctgctgatggatgttaattaaccttcatattcctctatagtgatccaaggatacaatcttattgtcacaaaagtgacagcaattttatacactcattcaaatcctgttttttgtgatagggtctcactgtcgcccaggctggagtgcagtggcattatcacgctcactgcagcctcccacttcagcctcccgaatagctgggactacaggcacgtgcctccatgcctggctaatttttttttttttttttttaattcttagtacacataaacccttgccatattgcccaggctagtctcaaacccttggactcaagcaatcctcccaccttaccctcccaaagtgctgggattataggcgtgagccactgtgcctggcccactcattcaaatctttaaaccacttgtagtgcaggtgataggaagggcatttgtgctagagaattcctagttatgacttctccacctttggtttccttctgtttgacatcagaacttctgcttagagtgactccagatccttagacgtggtctcatggatcttgcattcaaaatgaagttatgacattctgggggtttgagggagaatgtcctgtactttttttcctgctgaggcaaagccttaggtggagctttctcagggctgagttaaggggacagaagggattcatcagtgagggcatttcacaccctcatgtggcatttcacttggtagtgtccagatcggattgggttttttttcctctggttagtcacggtccttggaaagaaagatatgctggctcatgttgttatgtttaatctgcagggaaaatgggatcattagaagagccttcttggggctggatgcggtggcttacgcctgcagtcccatcactttgggaggccaaggcaagctgcttacttgagatcaggagtttgagaccagcctggccaacatggggaaatgccgtctctactaaaaatacaaaaatattagccaggtgtggtggcgcacacctgtagttccagctactcggtaggctgaggtggaaggatcrcttgaacccgggaggcggaggttgcagtgagccgagactgtgccactgcactccagcctgggcaacagactgtgactccatctcaaaaaaaaaaaaaaaaaaaaaaaaragaaaaaaaagaaaaagaaaagaaaagagaagaaacttggccttttggtgggttatggaatggtgggccacccagcaggaatggttgaacccaattcacaactctgacagttgctgcaaatgtaatcagatcatagaaatctggagaattctagacttgggagtgcagtggtttcagaaattataatctacttgagaacttcctgaaaccagagggtgtgggaactctattgttatagtttgtataggtcatcctcccagggaagcgaggagggtgaaggatgatggagagtggacgtggacttggaaagtcagatgtaccaatttctgcacccctgaagccttatagtctttaagaaagactcttctaatattttgttgtgttctcccctccatattctattgtttatgtcaattatattggaactatttttamacagtagaactgggacttctctggtaatgaacagagctctgtcatgtaagggacttcaatgaacacttactaaatgagtgaataataagttaaccaataagtagaggagaagacatttttgatgtcttgaaaataagttcaatttaattttggttataattttttgacatcagaggaaagacagctgggtaaatagacctttccaagtactttattgcagtcatagatttgtttcttcctgaggggctgtctataggcaggtcttactttattcagaaatagtgctgtccaatagaactttctgcagtgatgtaaatgtgtatcttcactctgtcatattgtaaccactagtcatatgtggctattgagcacttgaaatgtggcaagtgactaggaaagcaaattattamttttattttattttaattaatctaaagatacatttagatagccacagggggttagtggctrccatgttggaaagcatagtattgaagggaaacatttacaccaaaatttatatatttgtagactaacattaataaatgaaatgcagtaccatagggctatgaattcaggaagtgttgtgcattttctgtaaagttatccttcatgtaggtttaaaaaatgatgtaaatgttctttttccttacatgaagatggttgttataaattctcagaacctgtgcctaaytccagagggtgtttatttagacatgggcaacaccacattcttggccatcttatctaggatttttgtcagagagtgcttaataaatgctgataaccttgactacaaatgtgtattttccatatggcagagtttgatgattgccagatatggggaatttgtgaccagaagtgtgaaagccgacctggccgtcacctgtgccactgtgaagaagggtatatcttggagcgtggacagtattgcaaagctaatgattcctgtgagtaaattatggacacctgtgtctctgaacagtraacagattctaatagcttctttccttccttctgatgacaacagaattatcagcatttttgttgttggcagggctttatcattacaaatcagggatggctcctactgcctagaaaaattggtcaacattaatttcatactttgattattaaggaccaatttgtcgaytaatggtgaccattattaatattttttaattgattgattgtttactttgcctaggctatcatgtcacccacctttaattgtggaataaatgctatgcctacatttgattggcttggacatttaacttttaattaattacctaccacaaaagtaggcgacaactatctacagaaataattttcacagtgttcttgcaaaatttagggatatttccaaatggacatgctaaatttggattaacaattttttgaatgcactaactctgggtaatttgttggaatcartgtaagagtatgaaaagtagagagtagtacagagtagtagagaaaagtcatggagaaaatctgcaaaaaatagatgagggctccaaagcattttgtcgctgttgatttctccggacgaaggtctcaatataaactcctattttccaatagttatttaacacttgattttgaagtgtctttggtgtcttctgaaacttaactgctcccatgactgaagaatggcccattttctacttgtttttgtgtagaaatacctgatttgctgtgtagtaacttttaggttcagcggatttttaacaattcaatgtgtttatttttgcataggtaacatatttatatgttcacaaattttaaattataagaagatatgtagtgaaatgccttcctccrtaactattcccctctgcatggttttcaccttctctttcctatgagtaattgccgtttctttattttagttctagagattttttaatgaataaacaagaacatacaaatatagatatttaactgtatttacatatctatatatggtagtaaactatatgcacagttctgcatcttgtgaatgtactgaagatattttccagagctttccatttcagcacatgaagttatttcttaattattttatttatttatttatttatttttatttatttatttttgagaatgagtctcgctctgttgcccaggctggagtgcagtggcgccatcttggctcactgcaacctccgcctcccgggttcaggcaattctctgcctcagcctcccgagtagctgggactacaggcttctgccaccacacccagctaatttttgtatttttagtagagacggggtttcatcatgttagccaggatggtcttgatctcctgacctcataatttacctgccttggcctcccaaagtgctgggattacaggcatgaaccaccgcatccggccttatttatttatttttgagatggagtcttgctcttgttgcccaggctggagtgcaatggcaagatcttgcctcactgcaatctccgcctctcgggttcaagcgattctcctgcctcagcctcctgagtagctgagattacaggcccccgccaccatgcccagctaatttttgtatttttggtagaaacagggtttccccatgttggccaggctgatctcgaactcctgacttcaggtgatctgcctacctcagtccctcaaagtgctgggattacaggtgtgagccactgcgcctggccttaattatttttttataatggcataatattccttcttttatgttcataatttgtttaactagtcctctactgatcaatttttatatcattccttatcttttgctattgccaataagactgcaattaataccttgttcatatatcattttgcatacctgsgagtaaacagacagaacagatttggaaccaccattaccatctttttcagagtgatttcctggtaatctttaaaatgtcttctgtgtttaacaaaatctaaagttgcacatggggctaaggtgcccataccatcaaggagtctcgaaaatatctgagaaatactctcctcagtgtcattgaaagtgcattggactagcatccagaatgcttgaattcttaccaaattcttcctaacttactgagattttggacgcttcattaagcctttttgtgcctcaatttgcccttctgtaaaatggayagaatgctagctatctgtctgcctcagaggtttatgttaaaatcaggtaagacaacctagaagatagcatttgaaaaagcagaaagcatatcatttgtaagctacttcaccatccttgctcatctgaaggagtggtgatgccttccttcttcgcatttagttggcgaggcctccattatcttctccaatggtcgggatttgttaattggtgatattcatggaaggagcttccggatcctagtggagtctcagaatcgtggagtggccgtgggtgtggctttccactatcacctgcaaagagttttttggacagacaccgtgcaaaataaggtaaatagaaatttcagtagctgaatggaaccctgagcacaaagtgttgatagcttttcactyttagagggagtagaggggaaagttcctttgttttctaacaaaaaaggcccttgagatattttatgttaatcagcaccttttccatgctatactattacatstgacctattaaacaaagcagtctattatatggattagccttgagcaacttttaattttattcgaagtggagtccaggagcctaattaaaagaaatagtagacattctttcaaaactggatagatatttggtagtaatttttgaaatttgatcatttaaaatgtaaaaagcacactgcttttctggatgataaaaatcagatttttacctgcatcttctaaatggaactgtaattcgggatcgagtaacaaatattgacggtattttgtttaatggcccaaattttgtttcactgtcttatttggaaagtgtgatgggtttaatttcatcttggagtaatgcaatggagatttttgaaacataaatttcagaaactcttaaagagttatggaattttatttatttcttcttacattttattataccattaatacgattctcatttatttaaatgataacttgcatgaaatttctgaaaattgagaatttagatttttagcacttctgatttgattakagctaaaaaaawtcaaaacaamccacgtagttagtgatgctgaagaaatayaataattttggtttttctttcaggttttttcagttgacattaatggtttaaatatccaagaggttctcaatgtttctgttgaaaccccagagaacctggctgtggactgggttaataataaaatctatctagtggaaaccaaggtcaaccgcatagatatggtaaatttggatggaagctatcgggttacccttataactgaaaacttggggcatcctagaggaattgccgtggacccaactgttgggtaagtgatgtgaaaacatattgattcctgtatttttagaattttctctctccctctatacackgaacatctactggattaatcaaaggctcattctgatttcttttaggctgtatactctagaagccatgtctattttrtgcccttatttatagaagctttaagagagtttattaaatataatcctatttgaggacatgttacccaaacacacctagtggtgtactaaaaatacttgttgttttggggctatgaattttattcttagtgtttgccacgttttcctagctaagagattggattttgtgttctaactcaatctaataatattattacaactaaacatcacttatgcttcattattattaagatgattactctaacatgaattagctgtaaagatttttaaagatggaggttggaactattcctttcagaactttcttgatacaggctgggattgagatatcaatgctaatatctcattacaagttgttcagtctgaatcaatccagcaacaccgataatgcttttcttcaggtttaaatttaaatttcccaatcttcacatttgagaagtgttataggagacttagctttctcctagaatttcacaattgggtcttaggacccttggataagctttaggctattttagtctttgtgaatgatgattattcagttctacttcattatatcagctatccttccttgaaaatgacggaaatgttctctgtgcctcagaatggaaaactgaggagcaaaatggcttgatagcttcttttaaaaggtatttgtaagttttcctgggtgtaaaaaagagaagcaaaggacaaataaaggaaacagaggagaaagttcagaaggtgaatatgaattttttttttttgagacaggttcttgctctgttgcccaggctggagtgcagcagcacaatcacagcrtgcygcagacttgaacttctgggctcaagcaatcctcccacctcagcttcctgagtagctgagactatgggcaagtgccatcatgcccagctaatcttttaatttttgtagagatggggtcttgccatgttgcccaggctggtcttgaaacatgggcctcaagcaatccttctatgttggcctcccaaagtgctaggaccacaggcatgaaccactgtgcctggctggctgaatatgaacttttagactgccatattagtgcatcataatagttgctatttggaactgttgatgctcctgactgacccccacagtctctttaaaaaaaaaaaacaacttaatttccctgttgttttatactgtggttctctaatcagctggataaaatttccattgatccaaacacactgttaaaaaaaattcccaggttaacttgtaaaataccagattctttcatcttctgtttttcttttgtagttatttatttttctcagattgggagagcctttctggggaacctaagctggaaagggcattcatggatggcagcaaccgtaaagacttggtgaaaacaaagctgggatggcctgctggggtaactctggatatgatatcgaagcgtgtttactgggttgactctcggtttgattacattgaaactgtaacttatgatggaattcaaaggtaagaagtattttttatggcttatggctttataagttgcagggaaagtgcataaaatggctgsagagaaatatcaaaggaccagaattaaaatattgctttgttggtggacatgatagctttaatgacctttgtactgacatttgcatgaagtgacctgctctattttgttaacttttcttgtgtcccataacacaagaggtaaacgctcattaaatataacctccagcatttgttctttgatttctcctctccaactcttcccctagtcccacatgatgcacattattttcattcactcctgagttcatttgtgctttgtttctcaagatcactttcccttttaattttctaaccttcccccaataaatacatgttttattaggtatttgatgttgcctactgggaattaattggattttactctgctcttatatatttcaaatttcaaggagaaattctttgtattgtatttttacctggtatacaaagatacttaaacrgcaatatttgaatgtagaatatggctttcttttttttttttttttttgagatggagtctcactctgtcacccaggctgaagtgcagtgatgcratctcggttcactgcaaactccacctcccaagttcaagtgattctcctgcttcaacctccccagtagctaggattacaagcatacaccaccatgcctggcaatttttgtatttttagtagagataaaatttcaccgtgtttcccaggctggtcccaaactcctaacctcaagttattcgcctgcctcrgcctcccaaagtattgggattacagatgtgagccactacacctggctgaatatggcatattttttttcatctttttactctgattagagctaactayaacttaatgtaaaaaaaattattttagatcctctccttttggtattttcaaaaattgggtaaaacatgttcttcaaattttgacccaaaatattattctttgtggattcagcaaataggctggttaacttaatttttcccaatgacttgattttattgttttctcaatgaaagcaatattatagttttgtttcctcttgtatttccattttgtaaggataatatcacagtttgccattggattatatatccttgggacaatctctgcttggttaaatgaagtattgkgtattaatatggtgacttcctatcactgaaactggcttccataaggagaatatgaataaattttatgaaaaaattagctaacccaataagtcacataaaataattgtgaaattgcttaaattttttctctttgggatgttttagcattatattatatagtctaacttttgctgaagtaaaaaaaagtaaagcataaaagataaaaatcaatggaatttcaaaaagatttgagtggtttgctggctgtgaagaaacatcaaagaaatattaaagctcacaagtacagctgaaatcataaagtcattgcctctcgctttgccagcaggtggcattcagggttttggaatttgctaactgagagagaaactattctctaatcttaatgtaccatgtcattatagaatgtttcaaagtgtgcactaacctgccaccttaggtttctttgtttactcccctttagtgtgtttcccagctttaatatcttcaagtcttttcttagagctctattgtcctttttagttttcaggggatgctaagatttttctttgaggtctttgtattacgccaaaataaagaaaataagagttttcccatatcaaccgtcctctgcctcactctgttcatgagtctaactgaatcattgtttatggagacatagtcacggggggcgttgttgatttcctctcttcgcttagtgcctaattttacttctgttttcttcccagttaagtggctttgggcctccattacaagtatgatcagttgatagttccatcaagcagatgcataagagtggtagtggcattgcttcttgctttccttacagtgacatcaggaacagaygtgggcgtttkctggggcttgaaccctaccactcactgtcctgctccctaattgctaggaaatgctcaatggtgmagtgggaaatagttggcaaaggcatcttttcccagacttccaaagtcttggtatactctttcacttatggtattcaaaatgctatttcacatcttagccttttagatgtggggcaacctaaaaggaatgaagaacaaaaggggaaacagtaaattccaaaaaagtctaggacaagctaaaggattgactgggactggaatgtaagtctcaagggtcttttccaagagacaacatgaaaatccttctatcatatgtagatggaaatatgtatacatctaaaatgtatcttttctatctattccgtatttgtgacaagaaattatttagcttttcaggcatttaattgaactaactacagctttaattataataaagcaaaactaacaaattgtatgatatatatgtgtcttttataacaggaagactgtagttcatggaggctccctcattcctcatccctttggagtaagcttatttgaaggtcaggtgttctttacagattggacaaagatggccgtgctgaaggcaaacaagttcacagagaccaacccacaagtgtactaccaggcttccctgaggccctatggagtgactgtttaccattccctcagacagccctatggtaagcctcagagcagtggtaaccatgcttggtaccggacttggtggaaaggttttctcaaagctttgaaagttaataatgaggggtcttatgtgatttgggtggcattctcaagtatatgaagggttacccagagtgttaaactctctgaaactggttctgcaggttaggagcattctgaagaaactgatgtatttcacagttaaatgccaaatctagagggaatttagagatttatttaacagatgtttattagcacctgcaaagatgcttgggggtatagcagctcacaaaccaaaccaaaatacctatcctcattctactgggaaagacatctatttcaaacttctaatattacagttaaggaaacaggtcccatagaagaaaatgacatgtctaagtgtccattttcggtagcatcagagccatttttttcttcttctctgttgcatatgtatggcacctgttctttggttctgattaatctgtcataggccaactgggtttggtgtctctctggctggtcacttattttaaaaaaagaaatattttgattcagacactgcttagtcttctcctgttattttaccacgtgattttttctttttattttttctgagatgggatttccactatgttggccagacttttctggaactccgggcttcaagcgatcctcctgccccggcttcccaaagtgttgggattacaggtgtaagccactgcacctggcctatcataagctttgtttatgtttccaggttatagcttgagctttgataagtctatcaggactgtatatagctcttttctgtatttgcttgtggatcaaagaaaaagaaacataaactacactacgttggtagaaagcttaatattggtgagcaataatttagaggaaaacagatttgctctaaaactcatgttaagtgatggatctatttaggatgaagaaagactgcaaagtaatgaggttaacttaacaaaagcccaaccactagaamtgacacattcagatgaatctccttcaatgtcatcatcctgggaaagtataaacttgtctaaaaatagatattttatctgaaaacatttttggaaatatctgttttgaatagtttttacactcaattcacaactaaactcacacctgccctcacattagatccattagatcaatgatcaatgtgatcactcaaattactattttcattatttggctcagaatgacatctgcctattgtttccccaaatcaatccacctgagaagataaagagaatattttaaagaataagtcaaaggctaaaaagacaattttgaaagcagatataaaatttctagctgtggcagtgctcttcctaaggtcactactttgagagtggcttttggaagtataaactggtttgtgttgcagacatttaaggttttggaatcagatctggctttgaatcctagtcaagctgtttagctgctgaataatgttgggcaagttatttaactgtttagattcttggtttctcctctgtaaaattggaggactaatacttacctcttagagctattggttaagttggtttacttacaaagtaagcatccagtgagtaatatttattatatcctacaaatggcaaaaaagcagtgaagtgtgggttttcttttgacaattatttgtaatcatggaggatagcagacatactctgacataattattggggagaaagttgtaggagtcctttctttttttttgccaccgtctgttggagagtggatgggagagcagcagtgaaattgggagggttagtgtagccagatgtggatgtatccagtagtaaccagtagtaatgttttcaacacgttgctaatccattactctatttcacctataggtgaaaagggctagaagtggcttcaygtcttggataattacacatttctaattgcaatttaaccctgtgcatttttccttccagctaccaatccgtgtaaagataacaatggggrctgtgagcaggtctgtgtyctcagccacagaacagataatgatggtttgggtttccgttgcaagtgcacattcggcttccaactggatacagatgagcgccactgcattggtaagaagtctgttttggacrttgttggcaggtgacacaggtgtatgtgtgtccaaacctctaactagactaactgctactcttgaactggaccagctccctgtctaacttcttgactgcaaataagctttctgtagcccacagggcatcttccttggtaggcaccacttctactatacacagaactatgtttgaaaatgtaaatttctgtcttttgggattttgctttaatcccacatctaaggttttcttgggttcccttccccctttgtttcctgaagcctttttctcctattaactatgatcttgaaattccatatggttgaactttgagctcttttctatgctatgtataccttttccactttagatgttagccttaactttgatgggaagtactgtacttctccccactttgacttctcctagaccaccacgtatgcccctttcaaccaggtaatcacatctgaatcttatctggcttattttttctctctgtattccaaagtaaactcctgagcattggggtggctcagttactcacacagtttttcacctttcagttcaaactttcttgtatctgcctccatattcctgatttcattcttaccttgaaggtttcctttcttcctctttggtttcctacacatctattcacacttaagccatcgcctgggccccagctaatgatgaaatgcactcctacaatatttgtttttcttattttcacttctacawttctcctttctgtgcctgtgacaaattcttgctctccagatgttgcggtttctagcgtcgtatataaattatcttattctaacccagacacatttgttaacttcttaggtagttttagattcagaaaaatcaccctcattaaaaacaacatgtatttctaactattatatcaatagtgcgttgtctaataattttgcttttaaattccgttactgcgatttttatctttgtcttgggcatacctccttcatcttcttgactccctggcatcctgtcacagtctcctctttgctgttaaacatcacttcttcttacctatttcctttatccctccccttccttccctgctttcactcctttayatctttatatttctgattgctgttaattatcttggtatctactgtaaggttcttggtgtagatctctatgcagaagttaaaccaacttgaggattgttacggaattactatagagttcagctctgtatgatttttaaacaaaagattgatggcacaggtgagaaaggtttctgtgtgtgtgtgtgtgtgtgtgtgtgtgtgtgcatgttttgcctgtttattgtaatgatacttataacttgataattaaaactcagtatctaatttttaagcagtcctttttattttatttatttatactattttactttaagttctagggtacatgtgcacaatgtgcaggtttgttacatatgtatacatgtgccatgttggtgtgctgcacccgttaactcgtcattacattagatgtatctcctattttataaattaagcatatggatatcatttttcatataaatacattttaaggatacatttcttaggaagaaggaagattctaatacttgtatctccctcatagttgcttatctttttttcttccctgtattatttctaactatgctttccaaaaatttatttttacatttatttcagaattatattttataatttaaagtttgctctgtggatgcatttatctggaatttgggaggagagaaaagaaccatgctgtgactgactgtgctgtgttattcttcctacagctgttcagaatttcctcattttttcatcccaagttgctattcgtgggatcccgttcaccttgtctacccaggaagatgtcatggttccagtttcggggaatccttctttctttgtcgggattgattttgacgcccaggacagcactatctttttttcagatatgtcaaaacacatgatttttaagcaaaagattgatggcacaggtgagaaaggtttgtgtgtgtgtgtgtgtgtgtatgcgtgttttgcctgtttattgtaatgatacttacaacttgataattaaaactcagtatctaatttttaagcagtcwtatttatttatttatttatttatttatttatttatttatttatactattttactttaagttctagggtacatgtgcacaacgtgcaggtttgttacatatgtatacatgtgccatgttggtgtgctgcaccygttaactcgtcatttatgttaggtatatctcctaatgctatccctccccctccccccaccccacgacaggccctggcgtgtgatgttccccatcctgtgtccatgtgtgctcattgttcaattcccacctgtgagtgagaacatgtggtgtttggttttctgtccttgcaatagtttgctgagaatgttggtttccagcttcatccatgtccctgtaaagaacatgaactcatccttttttatggctgcatagtattccatggtgcatatgtaacacattttcttaatccagtctatcattgatgaacatttgggttggttccaagtttttgctattgtgaatagtgccgcaataaacatacgtgagcatgtgtctttatagcagcatgatttataatcctttgggtatatgcccagtaatgggatggctgggtcaaatgttatttctagttctagatccctgaggaatctccacactgtcttccacaatggttgaactagtttacagtccctccaacagtgtaaaagtgttcctatatctccacatcctctccagcacctgttgtttcctgactttttaatgatcgccattctaactggtgtgagatggtatctcattgtgattttgatttgcatttctctgatggctagtgatgatgagcattttttcttgtgtctgttgcctccataaatgtcttcttttgagaagtgtctgttcatatccttcacccactttttgatggggttgtttgattttttcttgtaaatttgtttaagttctttgtagattctggatattagccctttgtaagatgggtagattgtaaaaattttctcctattctgtaggttgcctgttcactctgatggtagtttgttttgctgtgcagaagctctttagtctaattagatcccatttgtcaattttggcttttgttgccattgcttttggtgttgcagtcatgaagtccttgcccacacctatggcctgaatggtattgtctaggttttcttctaagggttcttatggctttaggtctaacatttaaatctttaatccatcttgaattgatttttgtataaggtgtaaggaagggatccagtttcagctttctamatatggctagccagttttcccagtaccatttattaaatagggaatcctttccccatttcttgtttttgtcaggtttgtcaaagatcagatggttgtagatgtgtgatatcattwctgaggactctattctgttccattggtctatatctctgttttggtaccagtaccatgctgttttggttactgtagccttgtagtatagcttgaagtcaggtagtgtgatgccttcagctttgttcttttggcttaggattgtcttggcaatgcaggctcttttttggttccatatgaactttaaagtagttttttccaattctgtgaagaaagtcattggtagcttgatggggatggcattgaatctataaatcaccttgggcagtatggccatttccacaatattgattcttcctatccatgagcatggattgttcttccatttgtttgtgtcctcttttattttgctgagcagtggtttgtagttctccttgaagaggtccttcacatcccttgtaagttggattcctaggtattttattctctttgaagcaattgtgaatgggagttcactcatgatttggctctctgtttgtctgttattggtgtataggaatgcttgtgatttttgcacattgattttgtatcctgagcctttgctgaagttgcttatcagcttaaggagatattgggctgagatgatggggttttctaaatatacagtcatatcatctgcaaacagggacaatttgacttcctcttttcctaattgaataccctttatttccttctcctgactaattgccctggccagaacttccaacactatgctgagtaggagtggcgagagagggcatccctgccttgtgccagttttcaaagggaatgcttccagtttttgtccattcagtatgatattggctgtgggtttgtcataaatagctgttattattttgagatacatcccatcaatacctagtttattgatttagcatgaagtgctgttgaattttgtcaaaggccttttctgcatctattgagataatcatgtggtttttgtctttggttctgtttatatgctggattacgtttattgatttgtgtatgctgaaccagcattgcatcacagggatgaagcccacttgatcatggtggataagctttttgatgtgatcctggattcggtttgccagtattttattgaggatttttgcatcaatgttcatcagggatattggtctaaaattctctttttttgttgtgtctctgccaggctttggtatcagaatgatgttggcctcataaaatgaattagggatgattccctctttttgctttgattggaatagtttcagaaggaatggaaccagctcctctttgtacctctggtagaattcggctgtgaatccgtctggtcctggacattttttgggttggtaggctattaattattgcctcaatttcagaacctgttattggactattcagggattcagcttcttcctggtttagtcttgggagggtgtatgtgtccaggaatttatctatttcttctagattttctagtttatttgcatagaggtatttacagtattctctgatggtagtttgtatttctttgggatgggtggtgatatcccctttatcattttttattgtgtctagttgattcttctctcttttcttctttattagtcttgctagcggtctatcaattttgttcattttttcaaaaaaccagctcctggattcattgattttttgaagggttttttgtgtctctatctccttcagttctgctatgatcttagttatttcttgccttccgttagcttttgaatgtgtttgctctcgcttctctagttcttttaattgtgatgttagggtgtcagttttagatctctactgctttctcctgtgggcatttagtgctataaatttccttctacaccctacttcaaatgtgtcccagagattctggtgtgttgtgtctttgstctcattggtttcacagaacgtctttatttctgccttcatttcgttgyttacccagtagtcattcaggagcacgttgttcagtttccgtgtagttgagtggttttgagtgagtttctggatcctgagttctaatttgattgccttgtggtctgagagacagtttgttataatttctgttcttttacatttgctgaggagtgctttacttccaactatgtggtcaattttggaataagtgcratgtggtgctgagaggaatgtataytctgttgatttggggtggatagttatgtaagcagagattttactaagcttcctaaatagttttagattgagaaaataaatttattgcttttttatggattaaggtaaaacaaacacctttcctttattttagaaacacgttatttttgggaaccgagacgggaggattgcttgaggccgggagtttgagaccagcctgagcaacatagtgagattccacttgtaccaaaaaaagaaaaaaattagccagatgtggtggcatgtacctgtagtccccactacttgggaggctgcaatggaaggattgtttgagcccaggagatccaggttgcagygagctatgaccataccactgcactccagcttgggcaacagagtgcaaccctatctcggaaaaaaaaaaaaaaaaaaggttacaaacgtgtgtgtattttaacaatgaccaatgttaacataaaagaaatgtcacgtgtatgagagccattaacagattaattgactagacactgtttttcatactcaagcagccagattgattaaaggggaagacatctcttcagggatgctggactatgtaaatgccaagggtttggtttgtaatagtaataaaatttgtaagcaatataacataccaactaagagagccagcttaggagctacactgcctggttccaaattccagcttcccacatttcctagctttgtaactttggggaagttactcaatttccttttgcctcaattttctagtctgaaaaatatgcggttcatatattgctcataaggttgttgagagaatttttggctaatgcatgtaaacacctagagtaatggctagaaaatagtaaatattcagtaaatgttggatatcattwtatctgttatcaatataaaaccatattgcccaccctcccctgcccctaatccagacctgctctggggagggaacagctcttttgactatttcttcttttgtttgtctccatgtttctaaatgctttgtttatacttctatttcttgatttatcatttttgatatttacttccttgttctaggtgagcgttttgctttcttacatcattcttctctcccagcttctgacttccctccccccattctccttaaaaagctagattataatttttggttaaattaatcatatgtgtttatattattaacataatataaatataaatattgttcactgctcagccaattagtattctaggatgacatttcttgacaatttttgacaattgccccattttcatttgcttagtttttaaatataacaatcatgtattttccccaaatgctctaatagctctatcaaatgcctgtacaaagacagaaaacaatctacaattttttttttctttctggagacccctatcctgtgttccaattgggacttgtttttctctggcctggtgcacagacttctctttgccactcccctgtgctggaacttctgtttgtggcaggccatttatttctttttctagatttatttcctcattttgctgaaacamgttacatgatagcttcctgagaaacataagtaggtggcatatattttgagtctttgaatgtctgtgagtgttttattttgctctccatcttgactgtttggstgggtacaggttgcaagttaatttaaacctggaatttgaagacattgctctagtgacgtctaatatctagtgttgagtccagtgccattctgagtaccatttctatggatatgactttgatatggatatggatatgacattaaaaattaatcttcctctgtttccattttctctggattccttttccttttgatttcttttcaactttcttctttttgatggaagctttttccaagtgtctgagttgctagtttggtattaagggtgaggttataaaacctgacccaaaagtctgtacatgtggataggccttgtcagctggtragcttcaggcaggaaggtggcttggttgccagattgctccccaaggcaacattagtgagtcttttctggagatggtcaatttctccttcatagatgcctccattttccttcrtgaggtaaggggaagatgtggggagatggtkgtctgttctgggggtgattaatttctcctccatagatgccttcattctccttcttggagtaaggggaagatgtgggaagatggtggtctgttctgggggtgattaatttctccttcatagatgccttcattctccttcttggggtaaggggaagatgtggggagatggtggtctgttctgggagtgggcagaggaaagggagctgagggcgccctttcagtattcctataatcctcctgtactcagttccacatccatctcagttctgtgttgaggactgtgccttgaacccatagccattctgcttcagctcctccagagaaaatctgtggtcccttagaggagatagaggagtggcgtgacactcaggatctgggagggacctaggcattggattgctccttatcttgctttatctgagccccttagttcctcgcccctgcctttgttaggacctggtgcctctgagtgtgagtgcactgaggcttctgcatatgtgggtgtgtctctcttctgttgacacttagtttgtagcattttccccttcttaactgagttatcactcctccaataccttacttttcaaacatttgttggaattactcatctgctgttattttactgtcttttaagtagaatttcggaggaagaggagataaacatgtttggtttgtcaatctgctattttgaatgagaaattatcttttttgaggacttagaatcaggcccactgagcttggagcactgcagtcgagcttagttctcaggaaaaggtagtattgggtttctagctgcatgcaggccaagtctcccacaggcacctccacaggtcagcttccttctgttttgttgatctggaattctcatagtatttttggtaaacttcaagttcgtatgctgagcaacctaccttttttwaatttttttatttttatttatttatttattattatactttaarttttagggtacatgtgtacaatgtgcaggttagttacatatgtatacatgtgccatgctggtgcgctgcacccactaactcgtcatctagcattagttatatctcccaatgctatccctcctcccgcgccaccccacaacagtccccagagtgtgatgttccccttcctgtgtccatgtgttctcattgttcaattcccacctatgagtgagaatatgcagtgtttggttttttgttcttgtgatagtttgctgagaatgatgatttccaatttcatccatgtccctacaaaggacatgaactcatcattttttatggctgcatagtattccatggcatatatgtgccacattttcttaatccagtctatcattgttggacatttgggttggttccaagtctttgctattgtgaatagtgccgcaataaacatacgtgtgcatgtgtctttatagcagcatgatttatagtcctctgggtatatacccagtaatgcgatggctgggtcaaatggtatgtctagttctagatccctgaggaatcgccacactgacttccacaatggttgaactagtttacagtcccaccaacagtgtaaaagtgttcctatttctccacatcctctccagcacctgttgtttcctgactttttaatgattgccattctaactggtgtgaratggtatctcattgtggttttgatttgcatttctctgatggccagtgatggtgagcattttttcrtgtgttttttggctgcataaatgtcttcttttgagaagtgtctgttcatatcctttgcccactttttgatggggttgtttgtttttttcttgtaaatttgtttgagttcattgtagattctggatattagccctttgtcagatgagtaggttgygaatattttctcccattttgtgggttgcctgttcactgtgatggtagtttcttttgctgtgcagaagctctttagtttaattagatcccatttgtcaattttggcttttgttgccattgcttttggtgttttagacatgaagtctttgcccatgcctatgtcctgaatggtaatgcctaggttttcttctagggtttttatggttttaggtctaatatttaagtctttaarccatcttgaattgatatttgtataaggtgtaaggaagggatccagtttcagctttctacatatggctagccagttttcccagcaccatttattaaatagggaatcctttccccattgctttttttctcaggtttgtcaaagatcagatagttgtagatayacggcgttatttctgagggctctgttctgttccattggtctatatctgtgttttggtaccagtaccatgctgttttgcttactatagccttgtaggatagtttgaagtcaggtagtgtgatgcctccagctttgttcttttggcttaggattgacttggcratgcgggctcttttttggttccatatgarctttaaagtagttttttccaattctgtgaagaaagtcattggtagcttgatggggatggcattgaatctataaattaccttgggcagtatggccattttcacgatattgattcttcctacccatgagcatggaatgttcttccatttgtttgtatcctcttttatttcattgagcagtggtttgtagttcttcttgaagaggtccttcacatcccttgtaagttggattcctaggtattttattctctttgaagcaattgtgaatgggagttcactcatgatttggctctctgtttgtctgttattggtgtataagaatgcttgtgatttttgtacattgattttgtatcctgagactttgctgaagttgcttatcagcttaaggagattttgggctgagacaatgggattttctagatatacaatcatgtcgtctgcaaacagggacaatttgacttcctcttttcctaattgaataccctttatttccttctcctgcctaattggcctggccagaatttccaacactatgttgaataggagcggtgagagagggcatccctgtcttgtgccagttttcaaagggaatgcttccagtttttgcccattcagtatgatattggctgtgggtttgtcatagatagctcttattattttgagatatgccccatcaatacctagtttattgagagtttttagcatgaagggttgttgacttttgtcaaaggccttttctgcatctattgagataatcatgtggtttttgtctttggytctgtttatatgctggattacatttattgatttgcgtatattgaaccagccttgcatcccagggatgaagcccacttgatcatggtggataagctttttgatgtgctgctggattcggtttgccagtattttattgaggatctttgcatcaatgttcatcaaggatattggtctaaaatgctctgttttggttgtgtctctgcctggctttggtatcaggatgatgctggcctcataaaatgagttagggaggattccctctttttctattgattggaatcatttcagaaggaatggtaccagttcctccttgtacctctggtagaattcggctgtgaatccatctggtcctggactctttttggcaacctaccttttaaaatattcctcatagtcagtggttaaactctgtatgctttgttgagggaggcattacattgttcttttttttttttttgaatgagtacacagtatatgcaggaaatgagttgtcagaaatcaaattagctaatgtggtggtgtggtgtagtgccagatacttgggaggatcacttgaggtcaggtgtttgaggctgcagtgggctatgactgtgccactgcactccagcctaggtaagacctgtctctaaagaaaaagaaaaagaaatcatattaaaagtcaggattagctgaatgaarccctcaggagaactccctccttcaatgataccttcttttttccaaattctctttttctactgacttttccctatcatcagatatgctcaagtttctcccatcctaaaaaatatgcaacttacccttcactccatgttcctctttagtgataaccccttctctgcatttcatggtcaagtttcttgaaaggttgttttgcactttcctatcccttcttccacatttctcactgattactcacctcttgcaatctgcccaccaggtggctgacacccctctcatcctggtcacctctaatccctttcttgctaaattaaataatgcctatcagtcctgtatttggtacttcagccatcttctctcaaatattctttcttccatgacagcatactcctggatttccttctatttcttgatcattttttttttttctagtgtaccctggagatcttttctttttctcctgttctataaaaaactgtaaatctgttgttcaacattggtcctcctctctctgaataatttcacacctttcctgcctttgattactatctatgtagcaactataaataattatggggagacttttataatagtgcatttactgagtgtttttcctcctaaactggggaatgagggaaagaccaagcaagcctttctgtaggtcatgataaaaatctctatgcaagttctctctctgaggttcagacccatagtgccagctgccttttggatacgtcacctggatatcctacaatcacctctaaaccaacatgtctaagtggatgcttcatccaacttctcacaggccttagaggaagggcatgaccactcaccccttccttggtgccccatccccacctggtggtcatcatgaacatctccctctcttttagcctctatcattaactcattaacctccagccacactcctagaacatgtagagttttcagtctctgtgtctgtcaaccaccccagacctctgctttgccatgtggcccattaggaatctgtgctctcagaccatcctatgcatctctccatctcagcactcattactcttttatttttgtctcttggcctagttgcctcctcctctttcaccacctcactatgaattaccttgagggtggtgtccacacttctttccagatgcttaacttctctttgacttggttcyctcatctgtagaataggaacgatactaatgcctacttgattgagtggctgtgaggatggatgaatccatgtagaatacttggtccagtttctgccacctastaagtgctcatttaatctaagctgtgattattaacactaytaacaatattgtgttttctaaatatatagttggctttctatcacatagagaactttcttttcacaatttgctgaataaatgaagagaaaaagtagtaggattttttcttcctactgcaaaagaaagaggtatggctgtttattctgattcagattttctttagtgaaaaaaagaaaaaagagggtaaaagaaagcataataactccataaagaggaaagcgtttttttttttgttgttgttktttttaatcagttctgatttcctttctggtatctctgctggtgttttcaaaacttggcaactttgtggctgtggaagactgttgatgagagggttgggcgatgatacctcagggttaccctcaggtcgtacctggtggtgtcagcttatcagagccgwctccgggtggtagtaggtgaactcaggtatctcttcttcagatattctacagtgagaaatttttttctggaaggttggacatgggagtaaatccaggccataccattcctggttctgtttgtcagtatcatatctactctttgagatccaaagtttgaggaatggatagattctaggtttgtctcatgttattgctcagcagcttacagagttttttttttttttttttaaagaattccacatgtgttcctgaaatatgctctaactctgacacaaaatttcagtgtgcattagtaggaaaattgatgccttacaaaatatacttagcttaaaatatgtccatattttaacttataggaagagaaattctcgcagctaacagggtggaaaatgttgaaagtttggcttttgaytggatttcaaagaatctctattggacagactctcattacaagagtatcagtgtcatgaggctagctgataaaacgagacgcacrgtagttcagtatttaaataacccacggtcggtggtagttcatccttttgccgggtaagtgtgttcatgttttcctaagagcttgaaactgtatgtcttttacagtcattgaaaagtgatgccctagggatttaggtaagttcagcaaatataagattgaactgtatwagttgaaatcaccttaaattttatttcttttttcctccraaaaactttattctgggggagtaaaaaaaattgtttttaaacccaaaacatttcttctaacttttggctttctcagtcttcactgaagagtagtttttttcacagttgcagaggaccaaacaatgtgatatagattcagtagaaaaggagtgaataggcaacagaattaacaggaaagacccaaattctttccctgctttaatatatttatataaagcttagcaaaacttgcttaatcattcagtagttttcagaataaaaagtttttcagaccacaaagtttcatgttttaccattctataattggtggtgccagacaaggaaagacagaagagttcacagtattcctttttggttcctacttttcttatttaaatatgtttaacagctactgtgtttatttagaacaaatctgagctatgtgttgtatatgagtggaatgataaaaaagatggctgctaacccaccaatgcctgattacccagggaacatccatacctgttcttccgttagatatataatctcatcagcttccaaagctagtttgtgaaggaggtatgtgtaaatacccattttagagagaatgaatctaaggcgcagtgagataaagtgacttgtgaaagggcccgcagctattaggcaacagtcagtattcaaattccagacctgtctgactggaatgcctgtgtgcctaaaaaagtctgtttgctgcrtctagagtatctgctttaatttcctctctgtaagataataaaagaaacacattttaaaactgatgttattattgataagaaatttcattgccctatagagagttaaacagtttagttttttaatgaatttgtcttaactcaaacttttggcctttggttttgaaaaactgttgaattcctttcctgatgactcttttgtttaaaatgatatgaagtagttacatttcagaaagttacattttggaaaagaataattttgattcctctggatcccataaaagagaaaaagttgtttttttattttcttttgttttttttgtgttttttktttttgtttttgtttttttttgcctctagacttatctttttcccactctttagaatattaaaaaaatgcttgggtcagatactgtttgcattgcattgatttggatgctttcttcatctgagatgaatggtttcctgcaaatttatcaattccttatggaagaatgactagaggatcctgaatgtttaatctagagagaaagagattgaaatgttttcttgctctgttcgttgtttattattttattttaataacgtggaatatttaataggtaacctgaattgtgtcttgttagagaatatgttaggcgacaatagttttagttcctaaactctgagacagtggttctcttctctcaatgcccatttaaatgccatttgtatttgtgactttggttacatgttaactaaattttaactgagaattacatgagttatacactaagtatgttaagttcaatagcatataaagaaaacaaaattaattgcagtatctggagaatctctgtttgttctaaatctctggaagtcatgtagtttgtcccagtgttaacagccttaatttactactgctttttctaggtatctattcttcactgattggttccgtcctgctaaaattatgagagcatggagtgacggatctcacctcttgcctgtaataaacactactcttggatggcccaatggcttggccatcgattgggcgtaagtaggaatcatcatccccgatacttagttctcttttactgcagaacacataatgaggcaggttgggtgatatgatggtgtaaggaaactggtactgcttgccctcgcggaattttaaataattaattggtgatgggagaaggatattgaacaagaacacaaaggacataaacatagttggccagctactgctggggtgaaaactaataaattcatgagtattctgagaaaattrctagagaaagctgaatgacaagatttagtggaaactcaagatgggggaggtgggtcccaagcagcatttaaagtagggtacagatttgttgaactgtaggcagtgtgtaatttcttacagggaacatcttgagtttaggaaatctttggagtcaattaatcaacaaatgcacctttgcttacatgcactttgggaggactttaaaagtataagctatggttctcaagaaattgatgatctatctaggaatataggaaaaggaatagagtaaataagcttataaagatgaaatgccaargtaacttatgggagaaaaaaagggaagaaatatatttcaccttttaaacatagattactaccamtgtttttcttaacttgttgatttcacaaggagaaaataaaatttctggctcaaagatagcaacattttaagttttctaagacaattgattgaaagccacttcatgaaaagtagccgtctctttctgggggacataaaactgttaaatttttaatgaatataatttaaattttaaaaactttgtttaataaatgtgtcaactgaccctactgtttttggatgccctttgtgtaaagggtgctctgatagtttttggataagagataactaaatattttattattttagtgcttcacgattgtactgggtagatgcctattttgataaaattgagcacagcacctttgatggtttagacagaagaagactgggccrtatagagcagatgacacatccgtttggacttgccatctttggaggtatgttttaaagcaataaaagtatgtattgtttttatacattgcaagttacaatagtaaactcatcctcatgtggcattttcacaatcccagaaaagctggccactttaaaatgaaaaaatttaaaatggtgctatatatttagacaaaacatttggtttgttgatggtgtatttcatttttagagtgtgatttttgttttgtatatattcgtataatgttgacagtgtatatgggtacagcactttgtagattacatgtattatacaattcaacatcccaagtacttagttatacaagtatcacgtgaggaaacagtaaattactgccttcattttcaagaataaaacagcaagagctgtttatagtaatcattgtagcatttcattattctccagtgtttgtaagaatctcattagaaatccttgtggaaaaaacgattacacatattcatcaactatatgctgactgaatgactttgaaacttttttattcaaaatgttggagaactgacatcrtctttgttttatggaagtgttaggttatgctttatgaagaacagcaagacataattttttttcgtcaacctttccaaataatttcatgctactagtgaagattgctgagaagcatgaattctggggaactacagtcacaatgagcacagccartgcttgcctgtcttctcagctccccatttgagtgcaggcatgctgctgtgagttgagtttctgggaataagaatgtagcctggtaccatgaaacaggtggtttgcttagtcttgaaaacaggagctctgtgaatggttgtatagcttgtgcactgcataaaaatgccaggccaagagggtgaggagacactgaaatctatcctgggtctgtttgacaaaccatgattactccagttagaggggtcatgttttgtttaagtctaccaaaagccctgtgtatatgctagttgtgtccctggttgaaacctcctactttgaataattaacacagtgcttgaaaagactagacactcactataaatcaaagactttctcacatgcatagaatgtatgtgtggaatgaatagttagtaagtatattgcatatcttgtcctgctgtctgtttatctgtggaggagtgtgtggtatttaaaaaatgctcatgagatttttgatgagttaattataaatactcctcccgtccccctcccgccgctgccatccatttactcccttttcactaatgatgtcagacacatgctatttgctgtcacatagaaacattataaaaagttgaattttctctgctctgggctgggatgttttgggattcgagaaaatgtagttttagtatcttttggtttcatcagtatgaaaaaaatttgaatgcatacccatgaggacaacacaacattcccaaaatagcaataattatttatttctttcaacattgctgtttttttttttttttattatactctaagttttagggtacatgtgcacattgtgcaggttagttacatatgtatacatgtgccatgctggtgcgctgcacccactaatgtgtcatctagcattaggtatatctcccaatgctatccctcccccctcccccgaccccaccacagtccccagagtgtgatattccccttcctgtgtccatgtgatctcattgttcaattcccacctatgagtgagaatatgcrgtgtttggttttttgttcttgcgatagtttactgagaatgatggtttccaatttcatccatgtctctacaaaggatatgaactcatcattttttatggctgcatagtattccatggtgtatatgtgccacrttttcttaatccagtctatcattgttggacatttgggttggttccaagtctttgctattgtgaatagtgccacaataaacatacgtgtgcatgtgtctttatagcagcatgatttatactcatttgggtatatacccagtaatgggatggctgggtcaaatggnnnnnnnnnnnnnnnnnnnnggaaatgcagaaatcaccgtcttctgcgtcgctcacgctgggagctgtagaccggagctgttcctattcggccatcttggctcctcccctcaacattgctgttttttgtgaatttcttttggaaagttcttttgttgtgcaacaccatagaaattgtgtacctttttactaaagggctagatcttcttgattgtgcaccacacagaactaaaagatttattgaactccttacttatttaagtatatgaggatgcctttgttagtagtgggactgggattgccaggctctagaaagatttagggagtccaatgactgattggtcattgattagaccacagataaggaaattggtcaaataaaatttatgacatcttaaacattttctgattaattagggttttctagttaaactatcattaaagagaaaatccacattgatgcaattctttcttttaaaaatatatgtttattttcctgctgcaatagttagtgtaaagtgaacatgattaaatttttgttgtttagaatcttatgtcgcctctctcttaccattgtgagcatcattctaacattagtagtgtggttgtaggtgaatccacacttgtgttgagatttttattgatcctcaaacatacactgaaagttccttttttgggctagacctgtacttttccttctcaacagcttcttatttaagtcaagggaaaaaaattacaatttaagcgctgtcattaaaacatagaatatgaactgtttgacctgggaaggatctcaggaatgattcagactgtctccttcacacagcgtagtatttgcctaagagcactcagcaggtgagtgctttagcgggtgcagacctatgaggcctcatttaatgctctgtagaagaattccccaattcttattttcactattacctatgcagawctaaatccaattgctactaaatgccatcataaaactccatatgtgcttgcctgaacctgaaccctgatattattaacatacagacttccacagagcattactagggagtaacaagtcgtggaaaatggttagagaaacatattacagatatttatgggggagatgatcgtacttgcaagaagcatttcaarcctattgcattttctcaagtgatttatttataagttagctgtgactgaaaatactaatctacccatgtttcttttcagagcatttattttttactgactggagactgggtgccattattcgagtcaggaaagcagatggtggagaaatgacagttatccgaagtggcattgcttacatactgcatttgaaatcgtatgatgtcaacatccagactggtgagtgagattgcccagttttttttatttttttgtatgggtttatttatttgttacagtggctcctgttctctttaagtacttattacttaaaggtctagctcctggtagttttatattcttgtcgttcacataatctaagagtgtaagacttgaaatctctgttcaatgctgctagccttaaacatgttgtcaggaaaaacacattttgggacttttccatacctaaatggaatgttgtatttggcgggttgatttccaagaggaagctactttttagtattgggtctgaaaaatgttttgtcctgtttgttttccttcacaaatcaaacccgtgacctacytagtgaaaatgtacatgactgactccctcggggctttgcttttgcaggttctaacgcctgtaatcaacccacgcatcctaacggtgactgcagccacttctgcttcccggtgccaaatttccagcgagtgtgtgggtgcccttatggaatgaggctggcttccaatcacttgacatgcgagggggacccaacmaatgaaccacccacrgagcagtgtggcttattttccttcccctgtaaaaatggcagatgtgtgcccaattactatctctgtgatggagtcgatgattgtcatgataacagtgatgagcaactatgtggcacacttagtaagtagctatgcactggcgatatttcctgggatgaatagagtagaggtgggctttaaagaaaataaataaaagcttgggctatttatatgggaaaaatatcttttagaatttcagattcttaacatgcactttgaaggyttttaggaagctaagcaagaaatttcattcataatgttatggatggtttctggccttgatttagactatcttcaacaatwtttttccttgacattggctgtttggaccaatgcagtcattatgtcttggcaaactcctcaaaaagtcaaatcgaaataaactagatctgaccaggcaaggtggctcatgcctgtaatcggaggccgagacaggaggattgcttaagtccagaagtttgagaccagcctgggaaacatgacgaaatccggtctctacaaaaaatataaaatggcacatgtatacatatgtaactaacctgcacattgtgcacatgtaccctaaaacttaaagtataataataataaataaataaaaaagaaatagatgagctcagaaaaaaatatgtatataaaattacaaatagctgggactattacaaaatacaaaattacaaaatacaaaaaaaacaaaattacaagtagctaggactacaggcacatgccaccacacccagctaatttgtattttgtattttcacaaaatttgtaaaatacaaaaatttgtacttgggaggctgaggtgggagagttgtttgagctggggaggttgaggctgcagttagccaagactgtgccgtgtacttcagcctgtgcaacagagtgaagccctgcctcaaaaaaataagcaaacaaacaacaacaacaacaaaaaccaaaaataaagtagacctaacatttagcaaccgagagaatagtatcacagaataactacttgcaatcatagcctttggaaaatctcatgtgttatattccttttctcccatgttagagtaaaataaattaacaatgaaatggtggtcttaacctttatattcttcttttgacggtaatctagtctatatagtttggggcctaataaacactattgcagaaggcaaaagtattacattcaaattaaaaaaaagatagaggacagttgaaatctcagaaatctctatcaaggtgaagttaatactaataataacctttcttttggagagaaagaggagtgacagatttgcaagagtaaagtgctcacttgtacatttttctgaaattttttaaattttcatctttttgtgtattatcttcttgtttctaagagcacagcattttaccttaatattttatctatttgcacttttcatatgacatattttcaagctttctatagtctgaatttgaaattgtggttggaggaagtaacagcttgaaagttaaggatgagctttagagtgaatccaaccagagcgtgaatcataggcaggttcctaaatctctcaaagactcaatttccttatctgtaaaatgcagacaattatatgtactttatagtattcttgtgaggatttaaagagaacttatatgatgtgtgtgggtgcataacttagaaaaatgccttttctatgataaataccaaataaatgccagccaataatgatgttagtgatgatgacatcacttgatgaacatttctccttattatatacaatgcctccattaaaaaaggtgaactgagcctttataaggcaagaactcatttaaaaggctgtaaaaacaaatgtcttcatgaccagtttgttactattgtagataatacctgttcatcttcggcgttcacctgtggccatggggagtgcattcctgcacamtggcgctgtgacaaacgcaacgactgtgtggatggcagtgatgagcacaactgccccacccacgcacctgcttcctgccttgacacccaatacacctgtgataatcaccagtgtatctcaaagaactgggtctgtgacacagacaatgattgtggggatggatctgatgaaaagaactgcagtaagttttgagctggtttcccttggttggtcagcctcstaaatagwcttcaacaaccaaatggccttgcattctttcctctaaggctcatgcaattttcattgtctctttagtacttctattccacttgtcaatctctgtgtcaataggttacaagaacaaaggcacgtgcctgcacatgggattcttagagtccacctacaaatattgagttctatggaagcaaagcaaggactgcctctgatgccaaacatttcaattcagataggaattgaaaaagtgaaaatccctcagctatctatttatatatttaaaacaatactaaaagtcatatagatatatccagacctttggctattgatgtttmtttttcatttggtacaagcaaaaagacatcaaaataaagaggcacagaaaatttaaatttcctttgatcttatccacctgttttccatcttgccagttctgctttcctttagcttgttgttttatttcatgtcttcaataatagtttaagatggagcaaagttccctgggctaagttctagtcctggttgcctgactaggcaagtcactatcatttggaatagatgagctttaagatcccttctagctttcataccctataagtgtgtatttaatataatttcatgttgtgggtggggccagccactgcatccgactccaaggctatggtcttaacagtaaggtaggaccctggtttttagaattgttctgttcagacttttaaatccagttttgggggtctgtctacacactgttgctactaggcatgtgggtcatgctggttttgttgcctgattgggctccattgcttggckttggtctagagtcatggacttcatagtattcatgaaatgtagtccaagtccaagcacatgatgctcactttctgaatgtggtctattttccaaggtgtaatcacagtttctgactctgccctgtaatctttttattctcaattctaaaacctatcctagttttgagttcttttgcttagctgactttgatagtgtggctgattcaaaagaattttgaacccatgtacaattgagataacttctgtagctatttagccatttttagtttggctctggtacttgttgcacaggaaataaacttgttggttttgttttcggatgacattagattcgacagagacatgccaacctagtcagtttaattgccccaatcatcgatgtattgacctatcgtttgtctgtgatggtgacaaggattgtgttgatggatctgatgaggttggttgtggtaagtgcattgcyttcktttttattcacaatgtttatttagaaaaatctcagtgttaacacatggacacagggaggggaacatcacacaccggggcctgttggggggtggggagctagagaagggatggcattaggagaaatacctaatgtagatgatgggttgatgggtgcagcaaaccaccatggcacgtgtatacctatgtaacaaacctgcatgttctgcatatgtactccagaacttaaagtataacaacaaaaaakaaaaatctcagtgtttagtcattttagccctgagctaatttctaatgcttttctctttcattcttagtattaaactgtactgcttctcaattcaagtgtgccagtggggataaatgtattggcgtcacaaatcgttgtgatggtgtttttgattgcagtgacaactcggatgaagcrggctgtcgtaagtaacacatacccagmatgtttcagacaaaggggtcatttcatttttgccagtattgatattgatattgccacacattttccctaactcagacaaactgggggaaagtatcctcaaaggaatgtggtattgaacatacagtaaaattgagtagacattgccatataatgtrtaattaacaaatcaagtggttgtataaatggacacttcaaatagtctcttagatgggctaaatatttcttagatatttttgttttcacttttagtttttcttaggacttcccactttagtaggtttaaacttttgaggctctactccatataaagatattttactggtttcttttaagtktcagtagagaagtcatatcatggtgtagaaatggtatggagctgtgtttagtattgactctgatgaattcattctttgtgctattatgtgttgaatatctgctaagatgttatctatggagattatagaaggcaagagacaattaagcaagatagacagttacaagggtcttagaaatggcacagataaaattctatggaggttcagagaaaagaaatttcttctagttggaggattcaagtaggacttcatacagtataattctgatggatctataatcttcacagactggaaacctatactcacatgatttgttatttgcccactttttgttttaaatggattttagacttgcaaaaactcatcagtgagttgatcatttgtttgaacaatggtgttttagaccaaaaaagtaagttttcatgaattctcctcctgcgtcagaaaggtagtgtgtaaagccatggattaaaaakaaaagttaaataaaatgcttatatactttatagtttgcacaacatctagaaattactaatcactaattttcctgtttcacattaaaaacataaaattctgtgatgagctgaggttaaactgtcaattgccgctggcttgctgttgccttgtgagatccctggtagagagttttggtttacccttgtcaaatagggaagcagttcttacgtatctctccaggattgcttgatgaatagtggaaagtttgcaaagaactgagtatttaccatcatctttagttagtgtgtgatggtttcattaggtatagttcatctgagggaaaataataacacccaaacatgatatgaaacacatgaagttcaaagtaatcatagctatttaagctctattgtaatgttctggtgattctttcatagaaagatagataaactttattattgaatctgcaattggaagtacattaaaaacacaggaaaaggaaacaggatgttcttttgacacaggtactcatctgctagtcagcagttgtgcgttctgtacttcgtttgttgtcagagccactagctgccacaaagaaatatttctatgtactagagtgtgggagaagactctatatcatttagccttaaatattaatttggtcatagttgttactataaacctactattggatccaaaatcatttcctctgagtctagactatraaagggatcacaaattacattcacaagccgatttaccccatgttttccttctagcaaccaggcctcctggtatgtgccactcagatgaatttcagtgccaagaagatggtatctgcatcccgaacttctgggaatgtgatgggcatccagactgcctctatggatctgatgagcacaatgcctgtgtccccaagacttgcccttcatcatatttccactgtgmcaacggaaactgcatccacagggcatggctctgtgatcgggacaatgactgcggggatatgagtgatgagaaggactgccctactcagccctttcgctgtcctagttggcaatggcagtgtcttggccataacatctgtgtgaatctgagtgtagtgtgtgatggcatctttgactgccccaatgggacagatgagtccccactttgcagtaagtttcctgaccacagtttactggccataaactcattctgaacagtagcctggtgtgcatcaccattgtcacagtcactgtgtagctttgtaggaaggatttcagttcctctatgagttcacatctgtgtagggggtaaccataattgaattcaaatacatcaccattggataattttctgattaaatcctttgtacttggttatgtgtttttacttctttttatgtctttgtttcaaaaaatgagactaaattgaggccattagattgtcaaattaaatttggttctgttggtaatgtgctcattaatttttctaactttaatattttctaatttcaatcagaacttatcacaaaaaaatgaagtccagggatttgtgttgctgtgattaaagtgctgtgattggcatgtaatcctaattactgtcatttctttctttcctctttaatcaatgctcactctcagatgaaccccagccaggtatgattgtgaagtatttcagattcttatgatttcatatgtgttgtgtttgttctgaaaatgtcctgattatattaacttacttccctttctaacgcatgttctgtgttatgactcttacaaatatgttagagtacacatggaaatagaaggcatttgcatcyccaggcatgtgaactgtcttagggtggctttaggcattttcattttggccctgaaagtaaggcatgacgatatgttaccggatctgtgtactctaatatttcaatgacctttcccctttgatttgttcacttcatagattttctggtcttttctcttaaatgtttgtctatcttccatttctgtatagatagtagaatttcagaggaagaaaacgagaaacaattttaagtgtctttgcatgctctatcaatgacacttttcttccttgatgtcaacaatattttcccaagggttctcattgcattaaatggagttatactattgggttgtagtgaagaaggtgatcatactccaatggatatgaaggatggtaaatcctcagacaaattagagcaaaccctgaacagcctgtggaactcacccaagtgcatgctgcacttagctcttgtctgggcatcatattgaaggtggcatgagactgcataataaatattgcataagagtgaatcaaagaagcaaagattcttgattttcttttttcattattctctttcttttytctagatgggaacagctgctcagatttcaatggtggttgtactcacgagtgtgttcaagagccctttggggctaaatgcctatgtccattgggattcttacttgccaatgattctaagacctgtgaagacatagatgaatgtgatattctaggctcttgtagccagcactgttacaatatgagaggttctttccgstgctcgtgtgatacaggctacatgttagaaagtgatgggaggacttgcaaagttacaggtaattgctgaactaaccygagccagtttatcagcacatcccagagcttaaaatcaaatggcacatgtaggtatttgacaatgttgattaggagttagatcgacttgaatcctggaaagattatgcaatctctttaaacctcaattttttgtgaggattaaatggggtaatacacattaaaatcctggtgtattttggaaaatagaggttaaaacatatacaagtcaatgatttttaaagtatttaaaataataccaaatggcttttatataatttaaaatgagttctatactatatttaagcatctttatataatgcttaattgaattcaaccagtattaattcaatttctgctataagaaagtgctttttactatgtattaggatattgatttgaccactttcaaagtgaccaaatagaggaagctaaaacaaaaacagaaagtttctttcttttacatgtagtaggagtctggatgtcagagagtccagggcatggggtctgctctgttatcctcatcatgtggcttacatcaagggttccaatgctccaggttttagcttctcttagaaagtaggaaggggaaagagaaagtggagggcaagcagcttcctttttagaatgtgacctgagatttgattcgtaatttctactcacatcctattggtcagaacttagtcatgtggtcactccaaacttcagtggagggagagaaatgtctctggctggagagtctgtgccaagctaaaacttggcatgctttattactaaaaagaaaaagaagagagggggtgttgggagaattagaactctctaccatagctgagggcctcagaaaacagaaatatttaagacatgattcctgctgtccagaagcctacaacctattaaatagtaaggaagataaccaaagtacaaaaatraatacagtaaaaggaagaatgtaagcatagtttactctagactagtatttagaaacacagttaaatataacccaagaaagagtctattttaagtactcatgaaaaccagctaactattaaggttaagaatgaagtgattaaaatcattcatatggggcttcctcccctccccaccaacttactatagtttggaattacaccttctttctgttaccaaaagtattgaatcaaaagttttaaagagttgttttgtgttttctcccagtatcattgacatttttgcatttttttcttgaacagcatctgagagtctgctgttacttgtggcaagtcagaacaaaattattgcsgacagtgtcacctcccaggtccacaatatctattcattggtcgagaatggttcttacattgtagctgttgattttgattcaattagtggtcgtatcttttggtctgatgcaactcagggtaaaacctggagtgcgtttcaaaatggaacggacagaagagtggtaagtacatttctgttgacctttggcctggctagttcctctgtcttgggtctgtttgctgttattcaccagtgagagaaggccctacctcatctgggtagctctcatggtaccttctgggccacatcatacccaagagacttgcgtgttcataactacgaatttatggctgttttagataggagggtggcctctgaatgcagatgtgtgattctgaattccaggtcaggtgatgcagagacctcacaatgtctttacggttccttttgcagtcttttcttgtggatgagagcagaggaaagtgcaggaaagttaaggggttgcttttcttagctttaatttagtgatatttctcaatccatctcccagaatttcagtttcttggctcctgatagttacatttcctctgcctcttacaactttattttgtarttcttggtccttaattaatagagatattattcgttgcatgcaaacactataacattttgtaatgttgccaactaagcaaatggatagagctttttcttaattgcaaaaacttttgaaaccaaaacgaaactatgcactaaccaaacaatgaagtcatcttagaatgttcagtgtgacaaaatcttgtatacttttctcagaaaaccctgctgttgatttggtggttagctacatgaggagacaaaattttctaatccccacaagtaattataggacaagttagatggtttaatctagatttttatataatatccatgtttgcattcatttatttgctctagaattcactctttattcacttttgtctttaggtatttgacagtagcatcatcttgactgaaactattgcaatagattgggtaggtcgtaatctttactggacagactatgctctggaaacaattgaagtctccaaaattgatgggagccacaggactgtgctgattagtaaaaacctaacaaatccaagaggactagcattagatcccagaatgaagtaagacttttttttaaaattatgttgccttgacatggttatgatgagggaaaaacaacagtaacatgatgtagctgatatgcatgttgctgataygcaaaatttaaaatgatcccttgtttaaacatggtaggtgtccaactgggtgttgctatctctccttcatctgaatcatcctcttcataaagtacataagagcaattgattgtttactttattttaagagcacattgatttattagcttggcaatacaatttttgaaatgtcatataattaaaaattaagtttctaattactgcatgcagtaatagtccayagaggggccagtttgatgtaactttgataactcatgattatacaacaaaaaagctggatttttctgcttcagttttatgttgtttattagagctcccttttaagtcatataaggaaggcagtttttgcctgctgatcctgaagggaagatagagaaattctcccatgtgtttggaaatctttgaggatttctttccctgaatttacttatattttataacttagattcttttctgcaggatggtaaattaggcaagttatgttcaatgtgatgttgaattcctagatattgtaaagtattacacaccactgaaatttatgatgaattcctgatgaagaataaattgatttccttatctaaaaacatgacagggtagacaaacaaggacagatggatttttctagatcaactatttgtggattataaacaaacatgaattggcattgagacatttcaatgtcataatgtactacattatgacattatgtattacatgttttatgaacattataaaaatacccagatgggttgtgattgtgttatgacagttttactttgtgacacttagaggaaacaataaactctgtgaatatattctgaaccagagatgatttattttaagcagggcataaacaggatgwtgtattatttaaaatgacagttatttttaatatttaaatacgtcccctccaaytggtaactcatttcctttcccagtgagcatctactgttctggtctgactggggccaccaccctcgcatcgagcgagccagcatggacggcagcatgcgcactgtcattgtccaggacaagatcttctggccctgcggcttaactattgactaccccaacagactgctctacttcatggactcctatcttgattacatggacttttgygattataatggacaccatcggagacaggtgatagccagtgatttggtaagttggtggtgaggaaaaccaaattaaaactacagtcgtggataggtagaaatcagacgagtatcagaaaagctaagaaattaatttttgtgtcatagacattgtcagatcaatccaggaaataccagcaacagtgagaggcagtctatcccatatgactaactggaaaatgaatattttcattccagttcatggtcagcttgtgccatatccaggaaggatttttatagctcgtgtgatttagttgagctgcagatgtgaatctgttgcttctatacctttaaaaattgtgtcaggtggccgggcgcggtggctcacgcctgtgatcccagcactttgggaggccgaggtgggtggatcatctgaggtcaggagtttgagaccagcctggccaacatggtgaaacctcatctctactaaaaacacaaaaattagccagtgtggtagcacacacctatagtctcagctattcgggaagctgagacaggaaaattgcttgaacccgggaagcagaggttgcagtgagctgagattgcctcactgcactccagcctaggtgacagagtgagactccatctcaaaaaaaaaaaaawtttttttcaagcaaaaatttataacttaacttggccaggcacattgtctcacatctgtaatcctagcactttgggaggctgaggttggtggatcgcttgagcccaggagttcaagaccagcctgggtaacatggcaaaaccccatttctacaaaaaaatacaaaaattagctgggcatgggggtgtttgcctatagtcccaactacttgggaggctgaggtgggaggattgcctgaacccagggaggtcaaggctgtagtgagctgtgattgtgccactgcactccagcctgggtgacaaagtgagaccctgttttcaaaaaaaaaaaaaacaaaaattaactagatttatatttctcagtcttgttcttcacataacattttttattctataaattctgttgaatttattttcacaagttaaatgggaaaataaagaaaatagatattttatcaaagagctgttattgacccccattaaaaataggaatgcttttacactgttggtgggagtgtaaattagttcaaccattgtggaagatagtgtggcaattcctcagggatctagaaccagaaataccatttgacccagcaatcccattactgggtatatacccaaaggaatataaatcattctactataaagacacatgcactcatatgttattgcagcactatttacaatagcaaagacttggaactaacamaaatgcccattaatgatagacatatacatcatggactactatgcagccataaaaaagaatgagttcatgtcctttgcagggatatggatgaagctggaaaccatcattttcagcaaactaacacaagaacagaaaaccaaacactkcatgttgtcactcataagtgagagttgaacaatgagaacacatggacacagggaggggaacatcacacaccggggcctgtcagtgggtgggggcaaggggagggagagcattaggacaaatatctaatgcatgtgagggttaaaacctagatgatgggttgatgggtgcagcaaaccaccatggcacatgtatacctatgtaacaaacctgcacgttctgcacatgtatcccagaacttaaagtaaaataaaaaataaaaaattaaaaacaatttaaaaaagagaaaaaattgctattgtatagttgctgtgacttgaaggaaagatgcatctaaactataacagattgatgtgaatcagtgagtggcagcacaagaccgtggaaatagccggcacaagtgtgctgatggtggagtgaaggctggggcgtgggagtgggagatgaggagtctctaagctctctagttccatctaacttttaactagtaggtgatccggatacatcaccttgctttttgtgcttcagttttgttttcatttgtaaaatagatgcccagtgtaattaccaagrcaaacataaagagtaaatggcacgtgtatgtgaaaggctcttgaatggtttagtgggatataggacgaattgtgtattttttgccgctcttttgcacaatgacttccttgtgtttttattaaataatgacatgttaaaggaaaccgtcttcttgagcagatatcctctttgactcagtgcaccttggctttsatttttggatgaggtctcactgttctcttctgcctcacagattatacggcacccctatgccctaactctctttgaagactctgtgtactggactgaccgtgctactcgtcgggttatgcgagccaacaagtggcatggagggaaccagtcagttgtaatgtataatattcaatggccccttgggattgttgcggttcatccttcgaaacaaccaaattgtgagtgatacagagaaacatcctgcctgggagtagcttgaaaaacactgaccctgggaatgctaaatgyacactgttacagacccatttgtttggrcaatacattttccttttctctttacaaaccaccccactatatactttccctagtcctgacattgccattacttttatttaccatggaaatttcaaacctaggatataataacagcacatctgaattatatcatttcagcatttggctgctacctctktgaccctcacatgagtctccgtttcctcagctgacaaatggagtacagaccagatagtgccttcgatcctcttaccgctaccactctgattgaaagcagcttacttttaggactagtttattatggcaccactgccttctaggtgctctgctgtagccagcacgagttgtcctaaagtgcatggtaygggtgtctaggtgaaagacttggcatccgtactgttctttctggtgggagagggagataagtcacttartcttcacttaatcctctctcctcaaaactctccaattgtttctcacacccttcagcatgtggctgctgctatttccctgctctcttctcccactcgctgttgccacattggatttcattatggtccaaaagcacagcaggcgactcctgcctctcagcttctgcgctagctcttccctctrcctggaacatctctcttccagatctctgcatgagttgcttcgcgtgcyatttaggattctacccaaatgtcactttctcagagaggccctcattgaccgctctacctaaaatagccaccccctcataattcttttgcyctttaccctcatgttctgaaacctctctctctctctctgagtttagttgtttctttttgctcgaatatatactccacttttatagcgtccccartgcttagaatggtgtttggtttacagtgaatacctaccatttttctggtgaatgaatggattaataatctattaataacatggtatgtgtaataaaaatgtataggatctaggaaacatcctgtgtgtggggaccacacagaatcctgattttcaaggtgcagagacacacagagatatcatcagtagaaaaataaaagattattatctaaccaaaatctggaaaactctaggtaaactacaaggtcacacatcaaacacacaactttttttttttttaatgcaaaaagatctcttttaggtcaggtaaggagacagattatttggcatcatatttctattacaagttccagattactcagtggctgtttgttcrtaatccagttatagactggattgatctgtaaccttgagtcattctcctctctcgtgtctcttatgaattctaagttgaaagcctgatgctagggaagttgaaagtgtgagtagttcrgtgaaaacaaaacaaaagaaaacaacagrggtaacaacgtacttaagcmcccctgtactggggcctctggaaggacactaagagcatgactctgttttgattttaatgtggaggttttccacttactggtgctttcttctctttctcatgcagcygtgaatccatgtgccttttcccgctgcagccatctctgcctgctttcctcacaggggcctcatttttactcctgtgtttgtccttcaggatggagtctgtctcctgatctcctgaattgcttgagaggtatagtatgctccttatgtgagctctgaagatggagctggtcatagtttgtgccaagcagtggaaactctaaaaccaattgcgactgaacatgtgctgtgtcctttgattcctcaggtgtctgcagaatgatgtgtgttgtatggggtgatgtcactgtgtgccttggttgtaatayagtttctgtatatggaactaatgttatctgtgcatgtaattgaacaatctgtaacctcatattttctctcacctgggtacagttagacttctctgacaagccatgataatgggaagttccaaattcttcacctaagaagtaaacattctcaacgtttgtgtacagcttcattttttatgtccattgtctctttctccctcttttttttttcttttttctttctttcttttttttttctttctgagacagggtcttgctctgatgcccagactgtagtgcaatggcgtaatcatagctcactgtagcctccactttccgggcccctgtgattctcccacctcagcctcctgagtagatgagactataggtgcacgccaccacacccggctaatttttgtattttttgtagagaccgggttttgccatgttgcccaggctggtctccaagttctgccctcaggccatccacttgccttagcctcccaaagtgctgggattacagacgtggaccactgcacctggctccattgtctcatttttattcttataaccaatagttaatgagtgttctagcctgggtcttctgactccaatttcagtactgttactattaccatctgatactttaagaaggagaattgtgttggtatgagatattacaagtgactgagcaatttaatatttatctcatcctagagatattttattgggtcgattgaagagtgtgtggaggattataccaagtacttaagggagtaagaaaagaaggaaaagttgcatccagttcacaaaagagatttcttctggagtgtgtacttgtatataatacacttaaaaatataattccttattgcttaaaaatctaagaagttactctaaacccaagttccctttcgtttctcagtgaagagaactgaatgaatatattttgatactgatgaaaattgctgtagacaagttcaacttaaatgtttaatgatcacatattcctaaattaagagataatagagtcctaatctagaaggaaatttagtcctaatctagaatggaaaatatatactgaattcaggaaacttttagtgtttagatattatgcagatgtaggcttactgaaaatcaaattccatcagcatgtaatattgtgcaatgatactttcatgatgaaagattttaattattggtaattctcacagagggactggcacttgccatttttcctcagagacttattatgtacctaatcctcgttgacattgtttaatttagtgtgttcctagagtctttcaggagaagattaaactgggctgtagacatttcggatacaaagcattctttcagcacacaaagactgttgaattgcacattgggggttggtgtaatcaatattactctctgatgatgattgataagtgttaattttaaatagtgccttttgttgtttcacaaataattccactagtggttttctcatgggttgactttaccgaagtggaactttttaagtatttcccagtaggtttcagagcaccagctgagtaactgattgccaatatatgttaaatgaaaaaaggtttccacatttttttttccccaacaagaagtttagaaaacttgttaacatttataggtggaaacattttacttgatttgattgttgaatagcttttcaactagtgtttactaagaggctggaatatatgtagaagtgcttctgtgatgctgttaagtaaaagaagcagatattgcacaatattggccttgtaaaaacatgcattaaaaaacacacaagtttctggaagcaaaaacacacaagtgccaatagtggttacagttggataggggaattatgagatggttctacttatttctaattttatgttataatgagtgctttctctgtatgagactttttaaattctttagaaaatatattccccacaatgccaaaaccaaatgaacaaacaaaactcaagccaaacatcacctcagcacccctaaaattactccaaatacaaatagacttctgactcggtctcaggggcacaaggcacttgcttcagtgattttgtgcaagataagagaacactccttgtccttgctccagggaaggctgcagtgctgatcagcttgtgcagggtatgacttaaggaggacctaggtttgggggtcatatatattgtcgttcaattacaacactgagttctcattcctgactatagtgtcttcatgactctgctgacactaacattaatgggattatgacatggaaaatagaaatgaagagatgatctttaacttcaaaagacagagacacactgacctacttaaccgtcaccacctcctgaattcctttccatccaaccctagatgattctgtgcctaccccttcatgccattgtcataattgtaagggctcatatacttggtcttgccctctagatgctgcgttccttgaggataaagcctctacctggtctgtagatgtatgcttattgcctgtggcacttcrtggtacatggtggcactcagtaaatgttgagtgaatgacaagctctccaatatccatttttgttacttccccagtcctctgatttttacccgtttgctccgtagaaatgtgtgcagtgttgtgaagtcacttctttttgctttcccatatagcacttttcaggcatctccctgcgccacctgttgtcttactggccagttcctttctattactcccctggcatcatcccccaccatgatgctcacagtttcagccagcgcagcattgcaggagatcctgttctctggtccattgcttgcaaatgttcattggtggtaaacgttctcagtacatcagcagttatcagataaagggcttgagacatgatccccaggaagcagtagaagcgggtggtgcttaagggaagagcaccatggaagagtcaagaaggcccatgcataatggatgagatatgcaaagtttttaggccctaaacaatgctttggttgagaattattccaattaagcaaagggagatgacccattcaaaagggcaggatcagatcttacgtaagtgagtaaaaatttaaagtyccccataaaactgggacagagatagtttctactgagccagtgaacattaataacagataatcaataaataattaaatatcatctcaatataatttcttggtacagctgaaactcataatctagcatttttttttttttttttactgttgcagttaaaccaaatgaaatgagtggtaatttgatactcaagaaatagtacctggcctgcggtatttgcagtgtagtgatgaaaaacgtagattttggagtccaggagtcctggttgtgtgacctcgtttaaattgcttgatttctttgtgtcttatttgcaaattgagggaggacctatctaacaaacaagattaggaaacttgagggagataaattaagggaaatacttacctgatgcatgcagtatggcgcatattctcaatcaatgagaagygatttttattgcaattgcagttgttcagaagagaggcaatgtggagcagctgagagaagaagggcctggaagtgaatgagccagggtccatctcctattactgtttcctgcagaagtcacagagctcctgcaaatctcatttgctccagctgaaaacaactttgcaggcttgttgtggaagactctacattgtagtacttgaaaaatgtaaagcattaatagttgcgaaatttacattagactaaatttaaatttgtcctaggttaataaagactgggttatttctcagtaatagaaatgataggaacaagaaaaagctaatgagatgtgaaaataagtaaagaaaaaatgaccaagtcatcctgctgaagatggaaagcttcccggattataaaaataatgaaaacatcatttttagcttatgaaagttgtgtaatgattaatcatttcatactttgtcttaatatgtgatatatcttatacatatatcttaacccaaaacttagattcaaaagttttccttttctcagagaggaattttaaaaccccactcttgatggggatcaggataaagattaaattatttttgaaaaaggaacttttattatctattaaggagataagtgaactgatagtttaagatattatgggaatgtttaaattacaatgtgtagacagttttgagaactttggaagatactgtttacttattcacttatacattcatccattaatgcagtcatatggtcatccatttagttakcaaacatttattgggcaactattttatgccaggctctgagtaccaggccctgggacacaataatgagcaaatcagacacagtcattgacctttgggagttaaaatcttatagggaagagagacactagtcaagtaacaactgataggattatacattggatttatttattaaagtctcaataaatactaggcaacactttgtagtgttgttttatttttggaacattcttaaaactagtaagctgcctttcacaagaatagtctcaatgatttttttcactttttttttttcaaaactcaactctcctttccctgagatcagtgtgagtgaggtttgtctgtgtgtagaagtggaagaacttcctgtctgtgaggtttagcaaacatgggtggtttattagtgtaagtaaggacttaatgaagagtaagataaataccaacctgccttgaaaaagtccagacagcgttgtatgtggggttggaggtcttgtggtccagcagcccactgaaaccctgggaaaggcccatgcttgtctgatgaagtacattatatttattgctgcaatgctgcaatgtcattttagcccatatgatggtaacaggctattgccttccattactctaaatgtctgggaatagtrggatatgattttgactgatattcttctattttcacagatgatcaacctttcttaataactgtaaggcaacatataatttttggaatctcccttaatcctgaggtgaagagcaatgatgctatggtccccatagcagggatacagaatggtttagatgttgaatttgatgatgctgagcaatacatctattgggttgaaaatccagtaagttttgaataacattcaaagtatataatttattcttgaagagmctgcctgcactgatgttttcttataagcaaacttttgtcatgtgagtaaaagggaaacaatgtggaaataaatttatccctaagttttttgattcaatgaggggtatawatktgagcttggcctggagcaaaaatcataacactctttagcttcagaataagaaacaaatttaagctattgtgtattatttactcattcagcaagtattttccagaagtgcctatgatttgccctgcactgaattacctgcttctaaccacagaatacatgccaagaagcagcagtcacaatgcttgcccctagaggagtcttaagctagtagaaaatattcgacgaatataaaaatgatcaaaactcaagayaaaagtagtagctccctaagggaatttagtgaaagcatttgatgtggtgctggggccttcctttagaatcctttagaatatttgcctctagggtaagaatgaacacttctccagttctcttcctcagaggtcattttcttcagccttcagggaaaaaacctgtaagaatagggaaagagcaagaagactataaaggaggaagagaagaaaaatctttgtgtttcatgtttgtcacctatatacaaaatatactcctggtcttctgatccacatctgtgacttgggtttttctcatgacttgtatgcttgtggtagttaagaactatctctgtagccagtactggagatagcctgaatggtaagccttgtgtattcctgtgacacactgaaaaatcgtttgaagcctacccagtggtgctgaacctttgtttgcctttcctctgagtgtaaggactgttcaagaaatacagcagctggcagtagccacagtgaagaaagggttcttttgyaggagccatggccttggaactgctcacctccccttgtctttctttccagggtgaaattcacagagtgaagacagatggcaccaacaggacagtatttgcttctatatctatggtggggccttctatgaacctggccttagattggatttcaagaaacctttattctaccaatcctagaactcagtcaatcgaggtaatgattccataatactacttacacaaacattggatttagattgatgtaaactctagtctcaggaatagatctcacgtggattttggaatcatttttaagcaaaaagaaaaagggaaaagatattagtgttaactatcaaagtctctgaagtgaaagaggaaaaccaccttaaaattttttttaaatttatttttatttatttatttatttwttttttagacaaagtctcactctgtcgcccaggctggagtgcagtggcaagaccttggctcactgcaacctctggctcctgggttcaagcaattctcctgtctcagccacccgagtagctgggattacaggcgtgcaccaccaagcctagttaattttttgtatttttagtagagacggggtttcaccatgttggccaggctggtcttgaacacctgacctcaagtgatccacccgccttgacctcccaaagtgttgggattataggcatgagccaccacgcctggctggcaaaaataaattatttgagctttctattgctctattttgtttcctcctaattatcaatactaccttgttgctataaaagtrttttaggtaatttacaaaataatatataagaagataaataaaagttgcataaggaattcaacataaagggaagattatggtaagcagagaattttactatgtttcctcatctaatcttcaatgctatttcagttctcaaccaaatttatagtttgcctctgttcttagatggaaatctttctatggctccagtacagtttttctaacagcaaaacagaaagtagaaacttgattctaattcctttgatactctcttcttcaagataagtgttctttttactctaattcccagaagaaattctagatgaggcacaggtatgaaatcacatgaagtaagtcagaggtaacttgactagtgttggtttgctccactctgagagaagggtaaaacatggaagggattattaattcacaataattttgaaagtgaaacttcccaaaacaaggagaagtttttggagggggatagttagcagagccctgacaatccactgctttaggtgggcaccagctggcaagacggtttttctctggagcattcagaaagatactgaagatgagcaaggcgcacagcagcctgctggctaatttagagcacctatctatactaaaaagcactctctgtagactaagaacacagcctatgtagagttcggtactatctgaggtttcatgcatcccttggtgatcttggaatgtatcccccatggwtgagtgcagatgactgtttttatttctgccaaatgaagaaatagggaaaaggtgtcccaggcagagaaaagagctctcactggaacagcgcttgagtttacaaagatctttcactagcatctaatttaatcctcacaacattcctgagggcaggcagktctggtagccatttgtgatgagagggaaatttgcagtgtgcacaagtatctcaagccaggtagaattatcaggtgttaacatgaagggccccttggaggctcctctggttcaaactcttttttttatttttatttttttacatcagaaaccaaggcccacaraagctaagaagatgtcttaaatggtcagcttcactgctctaattcctgagcagtattctctctttgcacttttataaactacaactccggcaatccagactggtttaaccctctttgacagtggcagaaaatatttttcatgatttcaactaagactatcatcctcccattaaacaggcaacatctactgcctaagacccttactaccaaactcacatctctctaaagtccacccagtgcaaagctgtcttaattccaaatggcaattaatatgctcttattttatctcttkgtctcttgattagtaaatggggttctcttcttttaaactgatagttttccaaaagcagggaacgtgtctttcccattagtgttaggtacaatgcagtagtggccagttggagaataactgagcgtgcatgtgtgtatggattggtaaggccactttaaccacatgaaccaaaagtttctaattatgccctgatgcagtgtggtacagaggaaagatattttgatttggagtccaaagacctggctttgagtctgggttgcttgctcattttattcattcatttaatgagcactaggaaatgctttctatggatcagttgatcctggatatcctaagatgaataaacattttttttctgtctttaagtagctcacatatctgtgagatggatacataaacaaatacctgtgctccagtgtcataagtgtgataaggccggtgaatataaagtgctagtgattggaggcagaggtataagtgaggggagagagcatgcagatttcccattcatggttacttgtgagctgagtcttgaaagatgactaatacatccttgcttatcggagggtttcactttccgaggtttcagttacctgcagtggcctgagaatatgtgagtacagcacaataagatatttaaaagggaggagagagagagagaccacattcacataattgttattacagtatatttttataattgttctattttcagattatggttaatctcttaccatgtctaatttataaattaaactttgtcataggtgtgtatatgtaggaaaaaatatagtatatatagcattcagtactatctgaggtttcaggcatccattggtgatcttggaatttgtcccccatggatgagggggatgactgtttttatttctgccaaatgaagacgtagggaaaaggtgtcccaggagagaaaaacagttgaataaagaccctgaaacatggaaatgcattttatgactggggacaacactgcattttctccactcatgagctattcgaccttggacaaattacttaacttctctgagcctgttttctcatctgtacagtggagtttatggctgaggaagtaaaagtacttcataacactraggtatcctgtaaatacagagygctgtttccctcaaatgatcaatatttttagaaaatccatgaaagacctgtgagaataatgatccaagggcaaactgcccttttaatggtttaactggtgtttccccttaggtcatttaaattgtaagtaagtcttccaggtgattgttggattaattaagaaaataggaatcrtattcactttctgtttacctgtataatattccttcctgcctaagagtagttcgtgtttaactccaacttgaaaataagagaaacattgaagaaactattatccactaggggtagctgtgttcccatccactaaaagaaattttatagctgaattttgtagtgaagcctacagaatggccgtgtgagagagagctctatatattccagaaagcaagaaaaggaactgtgaaccaaagagatccttagtcttaggaaaaggagagagattgtagcagaaagaggcaaaccgagaaaagaaaagctaccttagtccaagcaagagtgaaagataccagacaataggcagagaaaaaaatttagagaaaagaatgagggaaagaaggatatatgtgtgtgtgtgtgtatgtgtgcgtgtgaatgcgtgcacacacgtgcacacgcatgtatgagagacagagaaacacaaataatctatttgtattgaaaagcaattttatagaaaaaccttaatgcaaaaatcaacagacattttctaatttcttactaattgtctgttagactgtcttaggtacgtattaaaatagcttcattgctgtaagaaacttctttctagtccaataaactatatttctatgtgctgtatcagggccctgttaacactgtgattataacagtaataatcacagacagccttgggaaagccactaaacctctgtaggcctctttttctccatctgtattgagaaaaataatgggatctacctcacagaattgtttatgaggatcgaatacaataatgcttgctctaatacctcatatatagtaagtgaccaacagatggaccaattaaacaatagaagtttattgaacatagttgtgctgggtggtgtgctgctttacctgtattatctcttagtcccgtaaggtctacgcagaccttccatatttgactgataaagttcaaagaggtgaatttatttgcctcagattgtacagtcaggacctggcagggcagagatttcagctcatgtgtttcagtttagkttgttgacttggaacagaattcactgtacctctgagtaaatttggactattttgatcaactgtgttggcagtaactggccaccgagtgccttggtggggtgcaggaaagctgtggggttctcatttgtcttccagagatttctcttagctctcctgaaggatttttgcagtttctttaggcagtggctctgtatgttttcccaactgaatcttccttttatccataaaaatgttccctcctgaaattttaggtgagttggaagtaggaacttgggaggtgattttgctgctcttactctcattttctattgagctaatttcctcatttccctgaagtgcaatatagattatctgaatctcatgcaaatcctctctcatccatccctaatcgtgctttrgaatttgttttgtacataagttctccttcatctcagtttcctttggttccccttatgaaagtcagttctaataagtgattttatgctataggttttgacactccacggagatatcagatacagaaaaacattgattgccaatgatgggacagctcttggagttggctttccaattggcataactgttgatcctgctcgtgggtgagtattcataaatggcacgtgtcttccatgcagcattgttcttgttaatgtcagggtctgacaaaatggaagatttcaaatttaggacatcttctgatttcatatgtcaacatttgaaaaataatagatctcagtgagaaagagaaatagctctgacctatatttaatgtgcaggatattgtttgtattttgtcctatggtcttcaaatgaacaacactggatttaaaattaattccaaacaagcaagaattttaggaattttaaaatagcattataagaattgacaatatattctgactttgaaaggacacggaaagctctaagggattatgtaacatttgcaatagagcttgcaggatgagaagccttctagtaggtggagaatgggttgcaaccaggcagtgactcttgaggccaagggatccatgaaggcacagaagtatggcggcacttagcaggattgtggggagagccggaaccagaggcttagagtagggagctgttgaccacatgggagatacaacagataaggtcatttggggacaaatcaaggagggcctttaatatcatgctaagaagttgaactttattcttttgagtgataaggagcaagtagggattttttttaaaaaatttcaacttttattttagttatagggggcacatgtgcaggtttgttacatgggtatattgtacccagatagtgagcatagtacccratagttagtttttcaacccatgccctcctcccttcctcccctctctagtagtccacagtgtctgttgttcccatgtgtatgtccatgtgtgctcaatgtttagctcccacttataagtcagaacatgtggtatttggttttctcttcctagcaaggaatyctgaggaagggagtgaaagaaccaaattygtgttttagaaaaattggtcaggattgrtgtggagagaggccagggccagggagaccagttaggagaaaatggtcttaatggatgtaggctggagtcctccggtctgtttgattggctatttcattctgttgatctactataccatattataaaccagaataacaaattgtaaaatatgaacactgattttttttttaaagagattgtagcatcattccaagtggattttggcttaatgtttgaaagttatcagattcttaggcctagaagggcactgaagaagtaatttgtattagcgctctgtttcaaataaggatgacatggaaaccaaatccaatttttaaagggcacaagaagcaaacattctattctgtgcctgctggcttgtactagttttcagttattctttctagaagaaggactgtcttaggttcgaaattctacttttgaaactcaggctcactcattatttgtttttcgtttatcagacatttctgcattgtgtacctttgttgggtggtgtgttagttaagatagctaactgttgaagcaaataaactcctaaatatgtaatggctcaaagaaaatagaaatttttttgtcttttatatgggcagtggggtttgggcagaagatgggaggaagctctactctacgtagtcattcaggacccaggctgatggatgctctgccatcttcagtaggaggcttcctaggtcattctgagtatcaagatctttcgagcagtaaaggaaagaacgttcagaaatttgctgggaggtttttatgagccaggcctacaagtagtgcacgccacttctgctcacactccttaagctagaattgggtcacatggccacagctaactgcacggaaggacatgcagtccacctatttacccagagagaagaggaagacattaattttggcaagtggaggcagtctctttcatggggccatggtggggagttcagagggtggatacaaagattaaagacctaatttgcaaccttaaggatttatggcttagtaaggaggataaggcctgtgtataaataacaataacccagattcatataagattaagagccacaagagaggctaaaaaaattgggatgatagtgctataaagaggtgacatttcagcttggtggaagagatatcatttggactggatcttaaagcatacctagaatttcactgggcagagctagcttttaagatatatcaggcgatatgaaggatggaaggtcaagagcaaagggacagaaaattgagggtttgttcaagtgactaagagcaacccagttgggttgggagacaattagaagagcttagaattttgtcagaggacataggaggagaaacaagacagagacttgaggatctaatatcttggattctcagtgaagagaaagtcttgataaagttgtgataaatgttattgaaccagttgttgcagaaaaatatctttgtggatgatcactaataaagagctgaggcagttacagggtctctgatgatattcaagagaggatgttgaatagagatagtagaagttaaaagaatggaaggaggatgaggaaatgtgaatactcttttaagaattttgtattggaaagttagagaaagataaacttgtaggtcaaaatgtaacaggaaaatgtctttcagaatagagaaacctgagtgtattctttagcagcagatgaaagatcaaggatgaagaaataattgattgagagtgaaagttatggggaaggaattcgaaatttatgaagtagaatgacttgaaatagtcaatatgcggaacatgatataaagtctgctagggatgagaatcctcagcttagattagggaacttagatttttagtgaattcagaattcacgaaagttttgtgctatgtccaggaaactcttggtaccctgaaatgggagaggagaaagaaaaaaaagggcagaaacccagggttggagattagcttagacacaatgggaacccaaaagaataaataagaatattgttgaaatggttacatatgatgtccaggtgtagaagractggagggttgggagctcaggcagggcttaagggcaaagaacaagtttaataggaaaagttaaagcaaggaagaaatgagagkttttggtcgaagcagagcatttcagagtttgagaacttagaggcggagaagtttagagttgaagatgaaattcaaaggacgggtatattgatttggtggtggaagaggtaggtgaataaagactatttaaatgaaggggtttaaggacttttcagaaaagaatgtaggagaattgtctgttgaagatatagaaggaggtgcaatcaaaaggaattaaaagttgggttcaagtctagaacttacatcttcagtggaaatggaaaacagcccttaatatattttaatacattttcatatatcatggatttggcaatgctgtgtggtaattatggttcatgtgtacctgatcgctgtgaaatagaaagaaaaaagaagtcttccttaccccataacagcatgataatgagattccactctcacagaaaagtgttactcattatttctcctattttctgtgtcagttttcaaaattctttgcatttttcatcacagaaatcaggttaggtaattaagtagccggtcttgtggtagatggtgatttggrgaataattaaatgaggcctggtaagtgatcagggagtgtacttggcagctttttatattagctttggccttcactatgtactgaagatggagggattattgatgtaggtttcttccttgtcataagcttcccacacacctgaccatgctaaaagttcagctgccagtgggataccctagcttcttattccagacaccattttaagtggcctctactccagttatagctaggaaatataccgacattggtagaacactggtgaagtacccctccacgttgtatgcaacgagatattgattttcagcctttgcccattgtattgtgagcatcttgaggacaagtaatacacattgtcatttatgtcactgactcaaatccaccttctgttttgttacatgctggtgtttttcatggttgtaggaagctgtactggtcagaccaaggaactgacagtggggttcctgccaagatcgscagtgctaacatggatggcacatctgtgaaaactctctttactgggaacctcgaacacctggagtgtgtcactcttgacatcgaagagcagaaactctactgggcagtcactggaagaggagtggtatgagcaccctttcagtcttttggtctttatgctgagctggtgtagctgatgctgagtgttctgagctgtcaggcagtggttcttgaacaatcttacttggtaacttgtaccagtgtttcattgccccttctcccaataacttctctcccttgcacgtacctcgcccctagctgaagtccagttctttatagtatgtgcatagttccctatagggtaatgtttattaatttccccaccaacgtttktttttcttcaagataaattaattccatttgtcatttcttacttgtcatttcagagccatttctttcatggtttagtgatttcagtgtttttctttgaaagtactctgggttctccaattatagagaatatacatatacctatatatatggagagaatatatatataaaaaatatagagtatgtatctatactatatggtatatagaatctatatagattctatatatgatctatatagawtctatatatgatctatatagatatagaatatatattatagaatatagaatatatatttatagaatacagaatatatatctattatatatagaatatagaatttatatatctgtataggatataggtatattctatrtatctacctatgtgtgtgtgtatgtatgtatgtatctatttatttacgtagcaaggttctgaactcagcatcccctcgtagctacacattcttctctaatattttaacatgattaatgcacatgcgaaactttctttagtggtgattttcaactccaaggttgggttcattatattctacaataagaagcagaaactataaagtctcgttcactcattgaaataggatttcaccttcactgagctggggctaagcacatagacaatgctcaataataattattgatgaagcattgctttgggtgctgaactgaatatatgctagtcccttccttgctatttaacagtagttacttcagatcctkgacattgatgcttttcataatattgtgcagtaggtttggctttcagttcattgtttgttcaacaagtactaacttcactccgaatatggacctataatggtggtaagctttggagattaaaaagaagtgatgatgtgtgtgaaaacactttgcagagttgggtgcatgtgtgcaatgacgaggaagctcttgttacatggtatggtttctgtacacacatctgacagggcacagcttctaaatctacgtgcttgttagtggtgtgactctccaacctttctcctagtgtagttcccttatttctccttcactctcctggtttaatcatcaccaaatgctgcaatccatcctcagcctgtcactcatgcccagatcttttctgccacctccaccattctgagcaacctctctctggccttgactaggcatggccttcagtggtgaagcctgctttcatgttggagacatgttttcttcataaagccacagtcagcaagttggatcacggctcagcttggagccttgccctgaggagtagctcccaacacttctgtgaggttgctcagctaatctggtcctggcctccactctctccactctctcctccargctcatgtttcttatattctaaattctagaactttgatcagtttcatcagcataaccactcttgtaactgctgggctcccttttcagccatggcwgtaaagccacactgtgtctctcgccaatacccagcccagatcctggcacagagcaggcacttgaggcaggtttttggagtgaaattaaaccagctacatctacatttcatttttcttccagaagaagctgactacttgtcattttcccttagggactttattcttgtagttcttttccagtgtaccaaagctattttgattaaagcttgttatctgttcaaatttaatggcaccatttttggccctgtcctgtcttgctgtcctctgtggttgtttgggggcatatttccaatctccattacagaaattgtcagtgaaggtgttaaactcagggtgagtcagctcctgtgcaatggcccacgcttagatgtttgagtatatccttgaccagaatatcacatgcagggactagtggtttagctcccttttcttcaccgtgccacctgaaaaggttgactgactcatgtgagctccgtcttcattatcaatgaaaggggcacagtgacattttcctgacctgctgcttggtgtsgttgtgatgatcaaatcagaaaatagaagtgaaaaatctctgtaagggatagagggctgtataaatgtgagacattataattaggagaatattagtgtttaaatgttcaaaattttcactatgaatccatgaaactaatgaaaattccaatcctttagattgaaagaggaaacgtggatggaacagatcgratgatcctggtacaccagctttcccacccctggggaattgcagtccatgattctttcctttattatactgatgaacagtatgaggtcattgaaagagttgataaggccactggggccaacaaaatagtcttgagagataatgttccaaatctgaggggtcttcaagtttatcacaracgcagtaagtatttgtcaytgaaatacattcatgggtgtataatgcatattcacacataactcacatttgtaagcacacacccacacacagtttcacgtacatacacgtgcatacaaattgaagttacctgaaatatttaaaaaatgataatgaagtcttaaacatggttaagtgccaagggctaatttggcatctgaaaggccagattgacttcagagtaagtttattccctttctcttcccattactttcaattccttactttgcttttacttcatagaactccctgttttctattgtttgtgttacttattagaatataacctctgtacgggcaggcattttgtctgtcttgtttgctgctcaatactcggtgattagaatagtgcttggcacataaaaggtgctcagggcatatgagttggatgcctgctgggaaagtgctaatgggatggaatttttagtcttaaaaagaatgcttttggatgttgcctatttcaacatttttttcaaagataatctaatttctgatttacccctttaaattagtggtatgatacaggtattattttttgatgtattttatagctttcgtcttcagccaaagatgatcaaacaatttgtttcctgtcctataacctaagtttgtcactaggtatttttttaactgcatgtgaaagaaacacatgcaatagaaattaattttttattactataaagaatattcttttttttttatttttccataggtttttggggtacaggtggtgtttggttacatgagtaagttctttagtggtgatttgtgagattttggtgcacccatcacctgagcaatatacactgcaccctatttgtagtcttttatccctcgcccccctcccacccttcccccaagtccccaaagtccattgtatcattcttaggcctttgtgtcctcatagcttagctcccacataccagtgagaacatgcgatgtttggttttccattcctgagttacttcactttgaataatagtctccagtttcttccaagtcactgggaatgccattaattccaggactattctttaaatcttatttcatatatttaaaaaaaatcacattattgatcatgtaactgaacatattattttaagtgccagttcataggcaaattatgagcagatttatatactgacctccctaatcctcgcatgatttgtagaagaaaacaagtgaagccccattctctaactattatacaatagttgggttactggtttcatacctttaggtgttattgtataagctctagtctctccgatgttgtttttagattgctaactcagctactatatgttggttattaatttttagaataaattatttggtgacccaattaaagaaatttgagatggggtggcragtagctaggatcaaaagttacaaatggattttgttttcatttagatgcygccgaatcctcaaatggctgtagcaacaacatgaatgcctgtcagcagatttgcctgcctrtaccaggaggattgttttcctgcgcctgtgccactggatttaaactcaatcctgataatcggtcctgctctccatataactctttcaytgttgtttcaatgctgtctgcaatcagaggctttagcttggaattgtcagatcattcagaaaccatggtgccrgtggcaggccaaggtatgccaactccaatataagtaagatttgacttcatctggcaccaggttgaaatccctggtgccatgaaaacatttcttcatgtgtggattcagtgcataatgaagctttcctttccctttaaatcaactggcacagcctaaagtgtttttcaaactttagtgtgtctcagaatcacctggagggctcacgccaacacagctccagacctcgtccccagatttttctgattttgtagtctagggtagggccagagaatctgcactcctaataagctcccagggcatgctgacggtgctggcccatggatcacgctaagaaccacaggcccagagcaatatagaatgtaggatgggtttgcaagaagtactacagagttggtgttccaaagaactgtgccctatttctgattattaatggagatttatggtagaaggtatactactatttaatatggtaatgaaatagtccacaaatatgatttattaatatatatttggtgaattgaagcaaaagagttcacagtgtcastccctctttagtaatcatatttttgcagcactttgtgcttacatactgtgaatgtatgaaacgatcacttgcttcctagatgagccaaggtttttaggtataccttagcacaagaggaactaagagttttctaacatcgctaggagaatgtcacaggctaaagagagaaatagagggtagaaaggaaggaaaaaaggatgaagtsaatgaaggggttgtagagatggtcagaaaatacagaaatgcacctggagaagggaatcagagagcttccagtcccacacgtcctcctgcctgatggtcatgttcacgtggacccatgactcatctttgtttttccatatctaaaaagttatggatctaagttatcatcttgtacagatatgacaaattcaatagtttttttctcccagcttttcattaaaaaaatgttcaaacacagaaacgttgaaagatttaggaaatatccttataccctttaccaagatttaacagttgttaacatttcttcacatttgagctctcaatttgtatgtgtgtgtgtgtacatgcatatgcattcacattcattttttatgaaccttttaaaaataaattttaataccatgccactttacccctacatatgttagcatacagtttcaaagggcattatgaaatattcataatcatatttctccagttggcctcacaatattttatatatagctgttttgttccatccaagatctaatcaagattcatgcactgcactgggaatatctcattagtttcttccagtttggagtagttgcctctagctttttgctatgacattgatgttttaaagaggcagacctgttgtctttgagaatcccacactgaggatttgtctgaatatttagtctgtctttcattttttaccctgcagttctcatgaaatggaagttaggtctaattgcttgattagatcaaggttaaatacatttagcaataatactttataggttatgctgtgttagttgatacagaatcttattaggaagaacataatgtcagcttgccctgctcttagtggcatttgagtttgatcacttggttaaggtggtcactgctacactgctgctttttaaagctgtattttttttccttcttaattttggtggaatctatgcaatcacacttaggccctgtgaatgtcttggctcccaagcaccttttacccattggttttggcagccatggatgatccttgtttgaaatgattatttaatcgaggattgcaaaatggtgattttcttattttagcattccctttacatttgttagataatattcttctataaaggaaagctcttcgtgtctccccggtttactttttaaataatttattattattatgggctcaaatttttattttttaaattcagtgtgttacagtcaattactgtaatccttcttttgatgttttagtggatccattttggccagggagaacctcttcaagtggcgacctgtatatttctgtgtatgccttgtttcttggtacaataagatgtttcacactcacttcgtaccttccctgcctaaacctataatcaacatttctcccgggagccagagctccttattgtgggaaagagtagaaaccaagatgtgggtctgctcactgcaactgggaaaaaagggtttcattttgtaatggggagatgctcagagcagggggttgggaatgagggtttgagaggaagggcagacatttaaaagttctaatttcagtgacagcattttttaatgatcttttcttaacttccaggacgaaacgcactgcatgtggatgtggatgtgtcctctggctttatttattggtgtgattttagcagctcagtggcatctgataatgcgatccgtagaattaaaccagatggatcttctctgatgaacattgtgacacatggaataggagaaaatggagtccggggtattgcagtggattgggtagcaggtatgtaagctatatggtgattttaatatgtttgcatctctgtcatcttattttatgctagaaagtttagcctaactccatgtgctacaggtttgtttttctagacaattattaagaccatttaagatacattgaatctagattaagctacgtgtctatttgataaatgatacggtgtttcagtttacagatttataacaaattaatccttatcattttcttctgttattaacataatctggagacaaaagtggctaaaatattaaattatgtggatttgttttttttacacttagatttgcacctgatttctgcattagaaattttctaaattttcaagagaaagagatataaaaatataaactatggaacagcattcatttgctttgaagctgagcaattttagttgccaaattcttaattgcttccttttattcatatataaaaatcccttagatcatgagatattttattagtaatttttttaaatgcctggtccagtattatattaacttagttgtatttattcatgcacataagcttgaataacccctcatttttatcactcatctgagtaaaaataccactcataattagtggtattatatgttttggaatataatccaattctacataaaatcagtatcattgaatcaagcttggtgagtaggcatcacttagaaatattagcatgtaggcagggcgcagtggctcatgcctgtaatcccagcactttaggaggctgaggcaggcggatcacctgaggtcaagagttcgagaccagcctgaccaacatggtgaaaccccatctctactaaaaacacaaaarttaaccaggcatggtggcgtacgcctgtaatcccagctactcaggagcctgaggcaggagaatctcttgaagccgggaggtggaggttgcagtgggccgagattaagccactgccatcaagcctgggtgacagactgagactctgtctcgaattaaaaaaaaatttaaaaaaaggaaatataagcatgtattatgaaaatctaagtactataataagagtttattgcaaaaagtaaatatggaagtatggttaaataaagctttaattgggttcctaactcccgttcctgaatagaaattactatttctgagggtatagataaagcagtagtcagcaaactatggcccgtgcgtcaaatgcagcctgttgcctgtttttgtaaataaagttttattgtaacacagctatgcccatttatttgtgtattgtctatggctgctttcatgttacagtggcagtgttgagtacttgtgaaaccatatgctctgcaaagcctaaaatatttattatgtggccctttacagaaaaagtttgccaaccctggattawaggattggaaatgagcaaatgcatacatagcaagtagagttaggtaatgaaaaaatgtatcagtaacatatttcacattggcctsatttctctagaggtggtttgaatcagatataggaacaaaatatgtgtgtcttggtagtagcattgatagttcaacaacagactttcaactacatgaaatcaataatttgtggtcattctctacttattatactatcttcataaagttatctttttattctagcatgtacataaggcccaaagggaaatggacttttggtcacttttagaaggtccatgggatgaaaacacctacattagttagaaagactaaggaaaaacttcatgttaaccttaagttcaaagaccatttgataacattaataacaacctgagatgctgctggtgctccctctttgctacttttatcacattgggatggaagttgtgctatgaaaatgtatatttagagtgtttcaagtaggtattaagcatttagagcttcagatagaaaaggagggacattctggaaaatatacctttcagtagaaagtgggttatgatgttgctatgaattctaatctactttagaagctgaagataggcactttctctctaaatttgaagacacaatctctataattcctaggagtaagaacttatttttctaagcctagactgggacactatcatcttggaaaagacaacatatagtgacccagacttcaaccttatatattttgttctgaatttgtaaagttctccctttttttcttcttggttctccattgatcagcrtgcactttcatttttcccataggaamtctttatttcaccaatgcctttgtttctgaaacactgatagaagttctgcggatcaatactacttaccgccgtgttcttcttaaagtcacagtggacatgcctaggcatattgttgtagatcccaagaacagatacctcttctgggctgactatgggcagagaccaaagattgagcgttctttccttgactgtaccaatcgaacagtgcttgtgtcagagggcattgtcacaccacggggcttggcagtggaccgaagtgatggctacgtttattgggttgatgaytctttagatataattgcaaggattcgtatcaatggagagaactctgaagtrattcgttatggcagtcgttacccaactccttatggcatcrctgtttttgaaaattctatcatatgggtagataggaatttgaaaaagatcttccaagccagcaaggaaccagagaacacagagccacccacagtgataagagayaatatcaactggctaagagatgtgaccatctttgacaagcaagtccagccccggtcaccagcagaggtcaacaacaacccttgcttggaaaacaatggtgggtgctctcatctctgctttgctctgcctggattgcacaccccaaaatgtgactgtgcctttgggaccctgcaaagtgatggcaagaattgtgccatttcaacagaaaatttcctcatctttgccttgtctaattccttgagaagcttacacttggaccctgaaaaccatagcccacctttccaaacaataaatgtggraagaactgtcatgtctctagactatgacagtgtaagtgatagaatctacttcacacaaaatttagcctctggagttggacagatttcctatgccaccctgtcttcagggatccatactccaactgtcattgcttcaggtaagtgcactccaggtgctgcttgtcctgcaagtagacacaatggggtcaacacacatggatgactgagtgtttctaatgcatatgagactctaatgtctttgtgtgtrcttgtgtgtgtktytgcctgtatgtgtccaggtatagggactgctgatggcattgcctttgactggattactagaagaatttattacagtgactacctcaaccagatgattaattccatggctgaagatgggtctaaccgcactgtgatagcccgcgttccaaaaccaagagcaattgtgttagatccctgccaagggtatgccatcatcttccttgttatatttctgtctgcttatttctggaaaaaatggggcctgaaattatgttcatagatagccaatgtgttatgggcttataaaactatggctacagattcaaaaatgaaagcatattgagtgattttacgtgggaaggagggtgcagcgcatagctccctttgatggcagaaaggttggcaacatactaggaagtcaacaccctgacttactagatctcctttggacaagttgtgtaagtagaaatgaagtttcttttgccatgttactggcaatttgcaattaaagaatattgtccttttttttttttttaaaggactatgaggttccctgtgaattaattattgactccttttgtatgactaggtacctgtactgggctgactgggatacacatgccaaaatcgagagagccacattgggaggaaacttccgcgtacccattgtgaacagcagtctggtcatgcccagtgggctgactctggactatgaagaggaccttctctactgggtggatgctagtctgtaggtgtctctggttactcatgtgggtgttaagaagaggtttttcttccatttccaaagaagagggatttgcatcatgtgatgaaaatatagcatgccagatagacattgccagaatatagaatcacagttttaggaactatgtttatattggaacttggtgaacatactgtgaaaatttatctatatcatgcattgaataattatgaactaaaagacatctaaagatgcattgctaaatatatctataatttcagctataattataaatgtattttctcaatttagaattacaaatgaaattactcaacttacattctgcaggccctaggtaactgctataaaatctgaatgacttttaaatgccaattgatattatgtttttttctgggctttagcattcaatgtcttttagaaaattcttttcttaaaaaaaaaaaaagaaaattcttttcttcagtctttgactttttgtcatcttttcaaatagaccctttcttctctggcaagcttctcctcagcgcatttcttaatattttccttttgtcaactctaattttgtatgtaacttctccaagtaccccccatatgtctcacattccagtcatcctaatggaatagttgaagggatgaaatgattttgtttattatggctggtgtctacatatcgggaatcttaatttttcttgcatatttctttggaattttagtcttttgatgccaagacctaacctcctgatcttttctttattctcctatttgaaacaaagcagtgatgctttgagtctaagcttggattattctaggtaaacacctcaaggtactcaataaacatcaaattgaaaaagtcactaaggaagtgggatggaaaagttattgttttattgagagtctgctatgtgcttaacactgagttccatgcattacatggattatttcatgttttcctgtttctaatatcaacctgattccttttgtaggattactattcatatttggaagtcaatgattttatataggctattgtttgataagcaaacaagacctcccatcaccagaagaaacatttccagctgccatatgccccatttgaaaagaaagtttgcagcttgtgtaaacaatgatgaggcgcatgcattgggctgccagttgaaaacttaactcacttgagatttcaacttctaaatttttttttgcttcattttaggcagaggattgaacgcagcactctgacgggcgtggatcgtgaagtcattgtcaatgcagccgttcatgcttttggcttgactctctatggccagtatatttactggactgacttgtacacacaaagaatttaccgagctaacaaatatgacgggtcaggtcagattgcaatgaccacaratttgctctcccagcccaggggartcaacactgttgtgaagaaccagaaacaacagtgtaacaatccttgtgaacagtttaatgggggctgcagccatatctgtgcaccaggtaaggcactgaccatgaaaattagaacatggagaataatgatcacaataccaattggtaaggaaagctgaagttctcacaggagaaaaaattcaaattctccttgatgtcagggtaatttatgaaacagacctggggctatattttgagaggaagacttggcaggcttcttttctaatctatatggagcccttttatgaaagcattttcttttattttatttttgagacggagtctcactctgtcgcccaggctggagtgcagtggcgggatctcagctcactgcaacctccacctcctgggttcatgccattctcctgcttcagcctccctagtagctgggactacaggcacacgacgtgtccagctaatttttgtatttttagtagagacggggcttcaccatgttggccaggctagtttcaaactcttggcctcaagagattgcccacctcggcctcccaaaatgctgggattacaggcgtgagccacagcactcagcctatgaaggcattttaaatacaagcttgatggagttagaaagaaagatgaaggccttggctgccctacttcatgtcttgactaagaattctgtcaatgagctggccttccttataaaaggatttacattttctgcttaagaggtattatttatagtttgaaatatttctggtgatatttgcgggtgggatcatatgtgcttcattgtgcattttataaagaacaacaaattcacgggaagatgtgccttttgatgttgttgctttgcaaattttgctgagaagagtcgttgatatttcctgttgtttagaaggaatcggcacatttattagaaattggtgattgctcttcttgatggaaaagtgactcagaatatagttaaaaggttaatgggcagaacttccatggcgcttcttagggagcatttaatgtagaagctgttgcaagtgctattgtggaggggtcaatgtgaacsgtggctgcatccatcttttacttcttctgggattatctttcttcaggtccaaatggtgccgagtgccagtgtccacatgagggcaactggtatttggccaacaacaggaagcactgcattgtggacaatggtgaacgatgtggtgcatcttccttcacctgctccaatgggcgctgcatctcggaagagtggaagtgtgataatgacaacgactgtggggatggcagtgatgagatggaaagtgtctgtggtgagttggactcttggcgcttttggtaggagctaatggcatcttgatgtcaagtgtttggtatggaatcctgctrtgtgtgaatgtgtttgaaatgtgtgcctaggcatcctggtagagctgaaaaatgtttcctctgataatccagactgtttctgttaaatcacctctgtagtggttaagagcacaagcacaatcatcatcctggtgatcgcatttgtaatctgtatagacctgggaaagttacttaatatctcaagcctcagacatctcatctgtaaaatggagctactactagggttcttgygaggagtaagagaaacaatatgtaaaaatcccttagcatgaggcatggtgcaagctaagtctagcttagcttgggactaaggaaacgtatcattttaccaattttcrtagcacaaaggtcattatttcaaaaattttatgaaaataacttccaatcctcagcttccatctgaatagagtgaataaaacacagtggactttctcagggagttctgaggttggttaccttttcctagcagactgtgataggggctaggagtttttattttcctgaaataaactataattgcatgctttttgtgattgagataaattgagattatagagaaacagaatgactttgatttgtgcttaaattacttgatttgtgcctaaaacaattttaaaaatgtatacaacatattttgcttaatctaactaattaaaagtgttatctcactttgcatgcagtccattttgcagcgttttttgccttggaaggtaaattcaaagtgtctcttttatttaattrtatctttttaaaaattaggataatgttttaatcaagagggtttgttctcatgtttttcctgttcttagcacttcacacctgctcaccgacagccttcacctgtgccaatgggcgatgtgtccaatactcttaccgctgtgattactacaatgactgtggtgatggcagtgatgaggcagggtgcctgttcagggactgcaatgccaccacggagtttatgtgcaataacagaaggtgcatacctcgtgagtttatctgcaatggtgtagacaactgccatgataataacacttcagatgagaaaaattgccgtaagtttatcttaagtgcttattgtgattttgggtctgaagtcttggatcacaggagatgaaattattatataaaaaaaaggctttccaaaaatraaaaccctaagtatttatctaaaacgtaaatttttggctaggcgcggtagcaagtatcaacaaataccaatcttgtttcatttttctctccttttttctagtattttaaagtgactcctagtcmtgcacttcactgataacattttggaaaataactaccatgccattataaygcctggcaaaatcaaaagtgcttactaaatatccctgagtacctagtccatgttcaaattttgtcacttatccccaaaatgtatttttactgttctctgttcaagttagggttcagatgagatctacaactgattttgattgttatmattcttcaatctcttttatgccacaacacttcccactttttaatgtcattgattcattagaaagattaggtgatttgtcctgtagaatatctcacattctggacttgactaattgcataattgatccatttaatttatcttatccctcttatttcctatgaactggtatgtagacctagagttttgatcataacaggtgcaattctttgggtaagagtatttcagaggtggagctgtgcctttcctgttgcatcaccttatgaggcacatgatgttttgttgccccactttaagtggattctggtgtcagcctgaatcatctcttatgaagctcccatcatcctttcacccagtggttttagcatccatcggtggttgttccgtaaacccattatttctttaagagttatgaatgggctctttagaattctagtgttcctgccgcatttattagctgaagtttgataaagaagacatttcccttaccagcttttgttggtaattagaatctacaggataaataccttttgcttgtcaattttcagagtaatgagttggtgacaaaggagaattaactttttgtttagtttagtttagtttagtattatattgaactctttgatcttcatgtatttgatgagttttaatacagtgctgtcaactgttttttcttggtgcccagttgtccaaacttaggccaatgggagtccttaacttgaattttctgttctttggcatgaccccaatccatcttcttatagctcaagcttgtcttatatttcctgtcccagtcctggaattagccacttatccaaggagacctcattccctttgtggtacttagaaattatcacagggttgagttgctcattcctacttagctttcattgcttctagtccttttcaatggtcagagctaggaaatacagtttttaaggaaaaaaaatttttttatttttttgagatggagtcttgctctatcgcccaggctggagtgcagtgacgcgatctcagctcactgcaagctctgcctcccgggttcacgccattctcctgcctcagcctcccgggtagctgggactacaggcacccgccaccatgcctggctaattttttgtattttttagtagagacgaggtttcaccatgttagccaggatggtctcgatctcctgacctcatgatccgcccaccttggcctcccaaagtgctgggattacaggcgtgagccactgcacccggccagaaaaaatttttattgatatttcccattgaaatttaagattacaggttgtttacattttagattttataatgacatctcttcttatgcttaaaatcatagtttctcttgacatttagttgttttattatatagtaatttcaaaatgcctataataatttcaacattattataaccactcaaagaatactattaacaataagtctactaagtgcgagattcttcttgctttttagattatgtcccactagagatatgcagtcaaaggtatgactttaaagatatttggaatttttttttctgcagggttatgctatcaacctgatatatagttagctttatctattgctgtttccaaattttattttattttattgattttatttgtacaaaatagcatacatagttccaaagttaaaactacatgacgaggtgcatttatagaagtccttcatttcttcctctcctttctgcttcctctgtgctcttctcagtctatccagagagatgacaatttttgttagtttatcttttctttgttgttattgtttttaatataagcatctctctcttgctacacacacacacatacacttatatcgtcctttttcttacacaaaagttagcctactgttttgaatcttgctttcttactattaacaatatatcctgaagattatactgtcattacttatcagtatatagaaatcttctttattcctttaatagctacatattactccattgtgtggaaatgccatagtttattttaccaagagttggaactcttgttgatgctattaattaatgaaaacagatgatttaagttacaaaccagtgtctcctctcccttctccccagtatcagctggaaatatgtttttttactacagaatctataggtaacataagtatcatggatcctgcctttctgatggctttgaaaatgccgcccttccagtggtttgagttccacaatagatgtgttagcacggatactgttcataatacatatttggtggatatattcctaatatttatctggttgyctttttcaagctgatcgcacttgccagtctggatacacaaaatgtcataattcaaatatttgtattcctcgcgtttatttgtgtgacggagacaatgactgtggagataacagtgatgaaaaccctacttattgcagtgagtaagataaaactgctttctttctatcrttccagagrtgcatgttgtgagctaatacaaagatatgaagcgtgggtattcgggctgatttcaattgtcatttcacattgaccttctaagtagaggtggtaggcagttgctttcatatgtgattgcaggggtatgagaaactctttctctctgttccctggctagaattcccagaccctgaatatttcttccagagatctgctactattggagagccatttctcccagtgttgaaagccttttgccttcatgtacttaggcagaatttgcccgttaagcccttataatttactcttaatattattatagtggccatcagtaactgaaaattatttttttttcagacagtctcactctgtcacctgggctgtagtgtagtggtgtgatcacagctcaccgcagcctctgcctcctgtgctcaagccatcctcccatctcagcctcctgagtagctgggattacgtgcatgtgacaccatgcccagctaatttttgtattttttgtagatatggggtttctctgtgttacccaggctggtctggaactcttgggctcaagcgatccacccatctcagcctcccaaagtgctgggattacaagtatgagccaccgtgcctgaccagtaactgaaagtatctttatatcccctagatacgttggaatttcagaaatctctatttcgtatttagcaatttggttcattcaaacaatttcctgtatttatagctcaaattaaaaggcctttcttaagtttgataactttgagactattagtgtaaatagatacataatttaaggatttagtgattggacttccctgttctgtgtatatgtagttaaactcttgtcactggcccctcccaaggaaatcaaagggcatcataattatttgtcaccaaattagggtacagcacaggaagaggaatctgttgtaataacagcagcacaaggaagcagaattcaggttgcagccaccagatagggctagacagataggaattattgctgacttttcagggacctctgcttccattgtcagttctcccctggcaaatcatcagatatcaggggccaaagcaaaacggccttatagaccagaagaattacaagactttaattagatgtgcacccacataacaatttggaaaatgcatataaccagagctacctaaaattactsgagaaaagagtcaatgttcaaacataggcagagtttcccacttactcaactaaaagtctggtattccaaggatgaatacgaagataactttgccaactttctagagttattatctaacatagctaaaaggttgtgtgtggagcgagcttagatatgatcacattattgttttgcttttaattatcattgcaatggaatttatttaatcttacattatagtagaaaaaataaaaccaagacttataatttgtgatttcatttatcacaaagatagttctttggtatttctaacaaatacaattttttttttttgatttctggaatctagaaaaacaaattggggaattggggcaggattgacttccttctgtctcccatacttcttcctccccacagaaagcttacacaagcatccattttccaggctcagtcttccttttttggtaactattatctagctcagagatagaggcagattgttaagactgatgggaacatgcttrtgttttgctcatgggttttatcttctttccctcctgcagccactcacacgtgcagcagcagtgagttccaatgcncatctgggcgctgtattcctcaacattggtattgtgatcaagaaacagattgttttgatgcctctgatgaacctgcctcttgtggtaagagagtaagcaagcatgaaaaacatcacgatgcagctagacaacttcagtctcttccaactgcttcaaatacagaccagggtcatggctgctgaatgcttggacttcctgtcccagctttcatctggaatgctgacaccgctcagcggatattcattaagacctgttagtggagagcactgtgtggggagctgatcaggatacggaagctgctgattgatgctgataaaatgaaattatattggtgatgcacctaatacagtgcttagctggtagaacttaattttagttggctctcaattgaagtttctgaatttggttgagtgctggcccagaaagctgtcagaggacctaaaagtgattggagtcatatacatggggaaggagtatattaggagcatgcatcctcttcctgttctctctctgtgccagtttatgagcacaagaggcccaagaagttgcaggagcctttggttgtattcctggggacagttatgccctgtttacatttggaggctgctatttgccttcacaaattctaatctatatccatgcacattttttacataattgtaaaaatataaaaatacaatcttctacattgctttaaaaaacctgtcaataaatcatattgctatataggagtcagaaaactatggctgtggccagttgcctgtctttatagatagcattttactcaaatgcagccacatatggctgctgtccctctactatggccacgtcctgtaggtgcaacagagaccatagggcctgtaagcctaaaatatttactatctagttaaaaagtttgctcgtccttgtcttcatactgccttttaatgactataatattccattgagtggttatagtatcatcaaattaactgcctctattattaagcattaggttgcttttattttattcctctatagtatatatcattgcagtaaatattaacatcgtatttaaaacattttattttcaggatattttcttaggatcattagtatagttttatagctgaagtcaaactattttcaattccagttttctctcaggtttaaattctgtgttgaagagtggtatttggagtgcttcactaagttctttttccccaacactgaaagttttatagaaagcaaagggcacatagagttttgaggacctgtaaaggaaataactaataactgctggatgagtagaatagtcttagagattgtttcaaatgtatgaattattggttcaaatatatgaataattaatatgagtttttaaacttctctatggtaacaaaagccatagtaatagcagtgagtaccaatgacctgatatatttaaataaaaataagcacataatmtatatatgaatatatcctcattgtagtaaagtaataatattcagaaatatattttaaagaaataatacgatgtacaaaaaagtaaaatttacattttttcatccttctccaatcccctcactcctcaaaggtaatcactattaaaaggttgagtgtgaatttgacttacttttatcttttatatatcttactttacttttatatatcttgatatatagattttaaaaaaacagatggagtcttactatacatattttctgcaattagcttttattttttaagcttaacatcatgtcagcaaatacagaccagcctcattcctgtacactgccaaagaatattttaaaatgcgaatggtccatgtatttttatccttttcctagtggttggacatttaggttgtttccattttttcactatgaaaaacagtgtcagggtgaacatcctttgtgcacatgtggaaagatccttatggtctagatgtccagaaatggtgctgctgtatcaaaggagatatgtctcttcaaaaaatctggatcaggccaggcgcggtggctcacgcctgtaatcctagcgctttgggaggccaaggcaggcggatcacaaggtcaagagatcgagaccatcctggccaacatggtgaaacctgtctctactaaaaacacaagaattagccgggcgcggtggcacacgcctgtaatcccagctactcaggcaggagaatcacttgaacctgggaggcggaggttgcagtgagccgagatcgcaccactgcactccagcctggccacagagtgagactctgtctccaaaaaaaaaaaaaaaaaaaaaagtctggatcaatgtacacacttttcatagcagcttctgaaagagcctgtttcttgttactgttatgatataggctgtgtctttatcagttgcaactatactttctcttgccttaggctaattccagggtcccctgggtttgggagcctatgacaccttcattagttaaataggaacatgtggggttagggttagagcatctgaatcagtgatggctaatttgaagtagaagagtgacttattttaattcagtatttattgaacagtggtgttctaggaacttttgggctgtgtcagtgaataagacaacaatccctacccacatgragctaatattctaaagaggggagacaggcaaccaatcagtaaattgtctagtatgttgaaaggtggtgctaagtgttatggaaagaaggaaagggagcaaggaagcgggcatggggagtgcaggcgrggggagactttgcacaaaacaaaatggttttggatgaaaagtagattttaaaatagaaacatgtgaaatagtaggtaattcatatctttcctgggaaaagaagtgttctttctctaccatacacataagggaatattgtatctcattttagtcaccaaagataattagggctttgcactgtcagttgactacttttacctcaaactgttggtcgctggtactagtcttattggaggactaccctagatgtatataattaaataatgctctgtttcaggttttctagacaacccatgctacarccagcttgtctccagattcctggactgtaaaccactttttttcactgagaatgctattgatcttttcaggtcactctgagcgaacatgcctagctgatgagttcaagtgtgatggtgggaggtgcatcccaagcgaatggatctgtgacggtgataatgactgtggggatatgagtgacgaggataaaaggcaccagtgtcgtaagtgaagccaattaattcctctgcagagtcacattccagggaaacacagtagagttgtttttctgtgtttggagagtatgattgcagatttctctgtaattgaatggacactgatagaatgttacctttgtttctccatgctgggagtgtttgatatcatccacttaaatgcttcagagtgatgaaaaatgactttatgtttactttctttctcttacatttggctaatggacataatgtcctacatttctaggggaaaaaaaaaacccacaaatacttggttgtctccttttcttttttcttttctttctttctttttttttttttttgacaaggtcttactctgttgcccaggctggagtgcagtggcggtatcatggctcagtgcagcctccaccttccaggctcaagcgatcctcccacttcagcctcccaagtagttgggaccatacgcccaccaccatgcctggctgattttttatacttttttttttgtagagacgaagtctcactatattggctaggctaatctcaaactactgggctcaagcagtcctcttgccttggcctcccaaagtgctgggattacaagcatgagccactgcacccagtggttggccactcttaatagcaaccttcacagtataacaatgaactgtctctrgtttcctttgtcaccttaaagcggcatggagggaggggtgttatgcctcttgagtagataatggaacatcattttcattaccaacagggtatggaaatcttagctagttcaagaattaatctaatcggtgttagaataatgtctttctatggtagggcaatagactcaatggctccctgctgcttgcatctgatggcaccctcctgtgttgtgactttggtggtgggtcacaactccacatttaccctatccaccctatccactgacatgggtggttttcagctacacatacatggattgtggtgtatgcatttctctcacctgtctttaccaacatcwtcttctttcttttgtttcctattcacctgcaatgagtctggataaaacccctgttcttttattttgtggacactaatgatttgatgtcagcatctcacctctttcctcatagcatcatggtttctgacaactctgttagcatatgcctttcctctccaccccaatattgcttggggtggtagctataatgtagttggaaaagcactaaatttggaggagaaagacctaggtttgaagccccagctcttcacctagttctatgactttgagacatccagttaaccatctttgagcttcagttttctcatctatacaaatggtgtaaaaatacctatytcacattgtgcttgtgtgattatactttgtaaactaaaaaaagktaccaaaatataaggcattcggtatccagttaacaaaatggtagtggttttctgaagccctaagggaaaaagtatgaccattctaatgtattttatggaaaaataaatgagacattttattgtattgatttctttgaaaaagccagggtccaaagcaattaaaatggaatctttggaggtatttttattatgatctattattataatagcagtgtaatttgtctacgtgttttcctcccatttcctttcatacttagaatggtaagtaacattaaagcaaagagaattaactgctgcactgagctctcatgctttctgattcttgcgtgctttggtttcagagaatcaaaactgctcggattccgagtttctctgtgtaaatgacagacctccggacaggaggtgcattccccagtcttgggtctgtgatggcgatgtggattgtactgacggctacgatgagaatcagaattgcaccaggagaacttgctctgaaaatgaattcacctgtggttacggactgtgtatcccaaagatattcaggtgaattgaggattcagaagttacccagcatgcctcaaatgtccatgggggctgggctcacttacctatcaggcaccccgtggccacagtgcccagggcccatgatgcttttagtggcttatgaaaatgtttggattcctttccaaatcaaagggaaaaaaaacttttacatcaaagaaagtattttaatatataatattaatatatctggctttataccaatatgattgcattaaaatgaaaagaagttacttgaattattaatacataataccatattaacaatttaaaattaaatataatttttaatatttttatggaggaaggaacccaagaaggcaaaaatgcctagggcctgtgaaagacagaatctggccttgcacagagggccagggagatgaatggatagggcttgagataagaattctttcttgaagctggtgacccgcttagttttccacttggagtagaggcattggtattacaagaactgtttcactctcttctctctactacaagaaaaataacagcacaagcatgatgataaatagagcttggctcttaggctcagagtcaagtagaggcaggtggagtgaactgagacaatgtctccaactaaggatgcagacattgatcaatatcatgcagaagggctggaaggccagactttctgatgctctctttttgacagaagttggaaatctggattttcatttgaaatactctgattttaaatgctggaaacaaattttaaaattcttaaaacactgtgtggatcaaacagattcggctcacagcctgctggtttgggggacctctcctgcaatgttccattgtttgacttcttacctctttctccaaatgggcctcttcaaacagtttatatacattcttaacatcccaacttctcatcatcccacttaacaaatacttggattatggaaggaaatggagaagaacaatttgtaagtttcaatcctgattgactaggaaaatagtacgagcattagcaaaagtaggggagtccagaaaggcgcttgctcaaggtggaaggtgagtttgacatagtaggacttcctgaggtgaaagtatgtcttaggtatttgggcacaactggagccrtgaagagatattgcttgtgccaaggactgttaagggacacacacaggcacattgagagcatcaggaatggccaccttacagcatgcgaaggaagacagtgggaaagatatactaagtaggcacaagatcagagaagcagagtcacaggggccattgactggaggggcaggcagctcatcaacaggcgctaatgtaccrttggagtccagtgtggtgtacgattgtgtgtttattgtggtggtcctgaggaagaaggaggaggtgaaggagcagggactcagcagtaatttaaaaagtagataaatgctatcaggaaaatacactctgtgggtgattcatcctctgatgagtggacattgctgagaggtgrtagtttgtgaactgacaatgcaaagacattcaagaggtggagctgtcttcttttgtagtgaagctgcagtagaatatgctttgtttgtatttaagtaatatgaatgtaaagtgtagatttttattttttgcacctaaagtggataaatctttgtctatattttctccctactgctcaagagttctattgtgttgcacttctatagtttttctgaatttggtaaatagctaatagcattagtcttagatgtaaatatattctgaatacctaggcttagactctaggcacaagaatggtagcaggtgttgattttgatcagactccaagttatctcctttattcctcccattctgagctttctgggttcttcctttatcattactatgatctcacagcacagtaacatttcctctctccctttctttgttcgtccattgttccttccttcactttccctccctttctctctctctttctttttttccttgagctttctgaatttccttgaaaagggctatagtagaagagaaaaaaaaaatactgtttgtttgaaaacctgagctatcagcttctaagtaagtccaaaatctgtgtctggagtagcctctactaggtgtgctgttagtgtgcatctccttgcttgcttggcagaaagtgtgctccccatttggtacagtgggacaggagatcatttttcctattgaccttctttttttcttggctcactactgatgctgctgaaaaacatggatgataagactgaggggtgacaatttggtgatgagctggaatactgacttgcaatagtgtctgaaagcttggtgatttgcttgatgacttgtttttcctcctgcattggatctaaattagacaaaggaaaacattggtgttttcaaaccatttggaaatgagttaaatagctcccgggagaccaaatgaagctgagccagtctgccttgaccacagctttcttcacaattacatgcacacattttgctgtaaatcatgttgacaaggccctgggtttatggatggcagtgctggttagcaggcctggttataggtcrgttgtaaaactgaccacattcaccgttgttgccttcacattttgtaatgctctatgtgccgctcctatgctttctatgataaattgttcaaaaccattagctttgttcactcttatcaaagattccttgatgcatatgtgagaccccctttagacatcataacttttatgggatcttggagtaatatggagaagaaaggccagtttggctcacagaacttcaggaaattatattgttataatgatgcctgtgtatgttaggtcccgagatagcttctagtactacagcatgccttcttcctttgccagtatgccatgctaacctactagcttgcctttattcacatcaccatgaagactcacatctcatgatagatggcaggagtgtaatgaaagatggaaggaacaggactgacaatgtaaacgttattccagtgggaagatatgtgttcttagaggacacacccaataatcttatttataatatatagcactcaccctatgagtttccatttgggtatgggcacttttatcatgtgattacccagtacattgccagtgcctactggctatctcattatctgttgaacatagatagtgccactgttcataagctgtctcatagatctgatgtataccaaaattacaaaagttgtatttaattagtttatcaactaaggaaaaaatgaatgcaattatttttaatagctatagacctactaattatctatagctattaaatggtagcatttaatggtagcatttctaatggtagcagccagcccctgaggaagttgtgtggaatgccaaatattggattcttctagaattggcgattagtggggtagacgaagatgatgggggaaaggggatcaaggacactggtgatcttgtcgaaatggttgacctggcatttaggtagataaagaaggaagcaaaaccccaagtgggtaatagttgaggtttattgccaacctctctgaaagtggtactggatctcatgatacaggtgtgaccggcacaatgactgtggtgactatagcgacgagaggggctgcttataccagacttgccaacagaatcagtttacctgtcagaacgggcgctgcattagtaaaaccttcgtctgtgatgaggataatgactgtggagacggatctgatgagctgatgcacctgtgccacaccccagaacccacgtgtccacctcacgagttcaagtgtgacaatgggcgctgcatcgagatgatgaaactctgyaaccacctagatgactgtttggacaacagcgatgagaaaggctgtggtgagtacaacagaggatttgggaaaaggaaacaggggagactgaatatggattctcaacccttcacgacttagactttccaacctgtcctctaactacaaagttaccataaaatcactattcctgatatagcaaaaggttaccaaagtttcttggtatataagatggggacacacatttttttggaccaattctttgcttagatagtcattagagagaacagaagatgggcaaatattcaggccatcatttaacattattgccaaataaggtactcaagaatgaagggaaccaggttgattctctttgaattcttgtaatgactttttgcctgaagcatccctctgctagaactcgttggcctgttcttcatttttgtcctcaggtaattgaatgggagagtttaatatctctctcaccccaaccaccacaagtaaagcagttgagaatccacagcatgggcattgtttgcttagcaccatcttgaactccataatattggcagttcgtcctgtttgtggtgtttaatccttgtaaccattgtttcatgtatgttgatattgtctctgtaataacaatttagagaccatatcctttcatttattttgttttctttattccacttgttcattgtcagtactcattgaaagcatttgcctaattgacccagaagtatgtaatgtagtttttatccttatatgaaagataagatttatatgaaataacattaaaattaaatgctagacagaaactgctgtggaaatgtggagaagagattatctatgcataatattaaaaaatctgtgcagcaaaccaccatggcacgtgtttacctattataacaaacttgcacatcccgcacatgtacccctgaacttaaaagttgaagaaaaaaaaagaaaaaaatttaaaaatcatccaaaaactggcttttgctctattgtaagaaaaacttctataaatttctaccaaagtttcaaaaaccatttaataaattaagaaaaacatgtgctatattatacatttatacaaaaatcatagggaactttcttatgtttactcctaattcatatagattcccattgcattttaattaattttgccttacctcaactataagaattaaatcctcaatagtacataattcaaattaaaatttttagcttgaagacgaagtgatctcagtaggtctcatccaaacctatgaaacattcactcttacaactggaaggagtactagtgatcttctgtaccctgttctctttgcagataataagactgtagcccatagatgggaaacgaattgtttgggggtgcacagtgaactagtggaagagcttggcctgatatttggataatggattttgcaatgcatgaagttttaatctattgctccttgatgagtagagaactaataagaacttgctgtcctccctctgtagatcatttttgggtgaggttgcccatgtgttacaggaccagccagagggacatgtagtgttgtgttgcacctagtgttgagctcatgccatctcgtgagaggcaaatgtgtgtatctctttgtggttccrtgttcagtgatgtcacactggaagcctgagcttgaccatggtgtgaacagtcacactggaacatgctacaaatcagagcatttagaaaatttttcctgagtcctgtttgaccagcacactggccaggctcttttcttctcctcttctttctcatttctcctgtattagttgttgaaaccactgatgaaggagtaagttggtgaggaagttgaaaaatagtgacttttcaataatccacagtctttggaagtctttgttgtctgtcttagcmtgattcattaagaattggcactgtttagtagaaatgttgactttgaaccattatagtgagttggtcgttgatattttaggatctctaagaactgctttttacctacaggcattaatgaatgccatgacccttcaatcagtggctgcgatcacaactgcacagacaccttaaccagtttctattgttcctgtcrtcctggttacaagctcatgtctgacaagcggacttgtgttgatattgatgaatgcacagagatgccttttgtctgtagccagaagtgtgagaatgtaataggctcctacatctgtaagtgtgccccaggctacctccgagaaccagatggaaagacctgccggcaaaacagtaacatcgaaccctatctcatttttagcraccgttactatttgagaaatttaactatagatggctatttttactccctcatcttggaaggactggacaatgttgtggcattagattttgaccgagtagagaagagattgtattggattgatacacagaggcaagtcattgagagaatgtttctgaataagacaaacaaggagacaatcataaaccacagactaccagctgcagaaagtctggctgtagactgggtttccaggtaagaaaacactgatgagctttttaaaagttaaaaattaaaaaattctaaccatgttttcatcttgataggaaattaatttttcaacttgggttaatatgcagatacatttaatgtttctgcaggtttattttctgctttgtatctgatattcaaatgatagattcagaacagaatatctaattattttaaaaatttatagtatcatttttatggaaagaggaattgcaagggaagagagttcactgttgctggccattcacttaactggagatgatatgaagggacgattcatgcattcattggtgcattcagtcrttacttcctgagtccctcctacatgcccagcgtgatgacaagcagcaggggttttgaggggaacaaggcagacatggcccttgctctcctgaagtacatagscttgcttacaatacttgtcattggccgggggcagtggctcacgcctgtaatctcagaactttgggaggctgaggtgagaggatcgcttgagcccagaagttcaagaccagcctgggcaacatggcgaaatctgtctctaaggaaaatgaaaaaaattagccaggaaaggtggtgttcgtctgtagtcccagctactcaygaggytgaggtaggaggatcccttaagcccaggagatgcaggttgcagggacygagaacatgcatggcactccagcctgagtaacagagtgagaycctttctcaaaaaaaacaaaacaaacaaaacaaaaaaaacaaccaatactagtcattcccagcatgggctgggcgtgaaaactggagaatggctaacatgagactcttgttttgagattgcccttatggaaactgacagtctttaaggcaggccagtgatattttaactaaactaccagatgaaccacacttcttaacatctctattgaatatcaaatctatcggattcttggcagcataaactaattggctttgtggtcaatagacatcaatctgcaggcactgtaaagatgtatgctgtaaagattcttgttgcagtcagcccagacctccagagggctcttccccacatccttatatttgactcccttaagggtaaagatcctaaaatgggtggggacagttggcttcccagttctccctgaccagtagctggcctgacataggtgctgagtgcttgctggataataaatgaaacrttgactaagcattcctattgtatgtatcaattcctgttttacgtatcctacatgtcaaaaagtatagtgattaatgatttccaggaacagaactgagcatggtactgttcttgtcaccatcctttgttccactgcagaaaaaataatatttgaactgtaagacattgtcattcagccctctctctcagaaactgctagaatgacgtttctcttggatttcagctatttcctctctatctcggtgtgttctttatcagaagagaattaaatacatgtgaggaagatgggcaagaaagtctgggtgagggtagggtaaacttttcttgaaagtccaggagggtgcacaaccaggctcagtgttcctgaaaacacaaaggcagaatggagcccagttacatttacattggtagggggcagttctaagatactagctacactgaaattagaaacaacttttttctccaatattaataaatatttctgctgtcagcaytagggtgtttggtttccaaagcccttgcatttgatatarctttttaaaccaccattacgcacattggaagatactgttggctctcagttatcttaatttttccagtagtggagacggaatatcttctccatgttttcttgagaagaatctgttcacaggatgtcttttgactgtggaataaagagaaattaatgggaaagcagtaagctcaacagagtagagtgccctatggggtagccagtctgccaggacttgaatggtaatagcaacaggaatactaatacgacaagaataataatagcaactccttctaagcctgttgtgatctgaaataatataatgttttaaaaagtccctggtctgaggcctggcatttaacaagtgttcaataattagctactattattctcactgttcttagtgtctaccatgatggaatccaagattgtagccatctcattcatcaggatttactcatttacccaagtgaattaactggcaagacttgtacatatatggatactcattctttcttgctgaagcctgaagcgatgctactgtcctaactattcagatatccagcatgaatggttaagcgcgtacttgttgcaaagaggcattcaggtcttttggaagggaaatcattctccttcattctccttccggttggaattgattatcaaatcctaaatgaccttctcactataggtgcatttaaccctttggaaggttatggatgctataagactctggtgaaagccctgggcccctttagaaagtacacagatcaccaaagctggcttccctgattctgggtaaagaccttgggttaagaacacttaccttataagaaaaataaattttattgaataaaaatacatttataacagaaatgtccttgaggtagcagtttctaacagatcctaatatgtttctaaagcttcttaggtttgattaagtgaaatgtgtctcaggttgagaaactcattttgacagcctgtctgacagaggcagggatgtctctttatcctaaggatgtcataatctttatcttaagaatgtcataattcagagtttctctgtgcagtttcaatgacacacttagacaagtgtgtttccttgactccaccatttaaactgtaattcatgatactcacctctgcttccctgttctgctaagcctttgcactgcctggagagggtgccttatgctgcatgaggaaagtaaaaccagacccgtcgaatgaagtgtgtcccccgtattttctacatgacaccaycttaaagtgggmattattgcacacagtcttgcaccctctgttgcctcactgcaggaagacaaacttcctgttttcccctgccctcatttgcctgaagaaaggtgacttctaacaactgtctgtgattctcaggtagcttgggtaggaaactgggtggctaaatatgtaccatttcacaaagtgactgtattggttaactcctggctctccattttagaaagctctactggttggatgcccgcctggatggcctctttgtctctgacctcaatggtggacaccgccrcatgctggcccagcactgtgtggatgccaacaacaccttctgctttgataatcccagaggacttgcccttcaccctcaatatgggtattgtctccctgcaatcctgggcttttctttcacctccttcttctgcctctgttamcgagaaggctgttcatgtaactatctcaaggccaatgtcttgctggggtttgtcttctgcttttcctacttggtaaattgtttagtgtaatgagtagaagcatggcttcttcaaatcatcatcatcagctcttctgttttcttttccctgacacacttttgcacttttcaagtcctgtattttggctgcatgcaaagaaaactgtggtttcagaaaaccgatttctttactggactctcgaagtcaaagccactgaaatccagttaactatgtttatttgtgagcattttctgtacattgtccccttcctttttctttttwagattatttgctgttagctctctttcttttctgaatgcagaaaagaattcagaatgcagtctgctctacagaatgcagactccatttctctaaatggagaaaaggtgtgtattttggctactgacttcttttggcatcagggactgaccctttgtgtttgccctgacaggtacctctactgggcagactggggtcaccgcgcatacattgggagagtaggcatggatggaaccaacaagtctgtgataatctccaccaagttagagtggcctaatggcatcaccattgattacaccaatgatctactctactgggcagatgcccacctgggttacatagagtacgtacatagaaaagcataaaacaattgtgtaactgtttatttcaaacatcagagcttgtgattccagtctattagtcccctctattgtctaactggcctgtctgttggaagtcattcgggggaagtcacacttctaactaaaactgctgagctctatggtatggtgcagtagaaagagggtgaacttttaaatcatatggatcagggtttatgacctgatgttttcacttcttattgtttttttatctagaaaatggggctaataatctctccccatggtagtcagctcagtgtgcaactcatcttaattttttttatctctttaatttgctctcccctatgaaatatatgattaataaattttagtatttgagaaaaggaaaagaataaaaggatctggaaaactttccctaaaatactttggcacatttatggttaagtgcagtgcagtgttttaggtggcagtagagtctgttaacattaatccaatatgataaggcatttacatctttctggtaataggataatttttaagtgtgttaaatatactgttcaataaaaaatactcattgtaaaaagatgatacacattattaatcaaaaattaaacaacaatacccatattgaattttgctagttatggcctagttggaccatagtawtgtcttctgcataagcatttatggataacgatccaggaacagcctgttgcactcagaagcatggaaatgccattcattcagtagaactatttcaaatttttttattttatttttagaaattcctttcttctgttatatttattttgctgccaaagtcagtgtagtaaagtttgaagttctctaacaccatgctccctggggacatgccactgaaaaagaaggaatacctggcacacacgccagtgctctttcttcctgtgctcatggcaggcataattaatcaatccaagtactttctcttgttgaactggttcatttgctacactaaggtagcctttagcattctcattgcagaatttaccgtagcagatattaactcactcttagggtagagactaactttaattagaagcagtacaatattatttctagtttacttataccattttgatgtgatatgctgatggtaatacccttagcccttcccacagtgtgtgtatcctctcttaaaaggcacatcaaagagctgagttagctttccatataatcctatattgaattagtagaagcatcaagatgttcaaagaagcttcaacaactttctaactgacatttgttgttctttgggtcctatagattattcttggtcttgaaagcttagtaggtgtcactcagcatacatttagacagtgtttccaggagcattagagatgaaaaaaggaattttctagttacacaatattctgttcactttttgataaaatctaatatagattatttacgtagatggattataaaatttaggcagtagattttagtctaaaagtcaaatcataatatgaggcactgtgatctgggaataaaggaaactttaatattcatgagccatgttaaattggttacctcttggagaggtagcaatgcctgtgttcagaaatatatttcatagatgcataaagcaatagatttttatagagcatgcaattgattccttgtacatcttgggatgcaccaacacatcactggarctgtgcctgtagttctactcttacttttttttttgagatggaaattcgctcttgttgcccaggctgaagtgcgatggcgtgatctcggctcaccrcaacctctgcctcctgggttcaagcaattcccctgtctcagcctcctgaggagctggtattacaggcgtgcaccaccacacctggctaattttgtatttttagtagagacagggtttctccatgttggtcaggctggtctcaaactcccgacctcaggtgatctgcctgcctctgcctccctaagtgttgggattacaggcgtgagccactgcacccagctgtgtagttctactcttgacaaaaagtactcatagagatatctgagatctctctacagagattacagatgaactggaagggaaggtctcaggactactttctggtctatgatttttttagaaaaacagatggtggctaggtgcagtggctcacacttatagtcccagctctttgggaggctgagcagggcagattgcatgaactcaggagttcaagaccagcttgggcaacatgacgaaaccctgtctctacaaaaattacaaaaattagctggatgtgctggcacctgcctgtcccagctactcagaagactgaggtgggaggatcacttgaacccaggaggaggaggttgcagtgagccaacattgtgcaactgtactccagcttgggcaacagagtcagactatctctagwtaaataaataaataaataaataaataaataaataaataaatcagatggtgactaatttctggtcatttacctgcatccttatcaacaaaggccaagcacatcttcaagttttcctatgacttttataagttaccataaattatattttgggaaatatttttaacattgcatggctaacattatcaggtttcttagttgctagcttgttctatctcctgtttgagttttaggatctgttccaaatttttaaaatattaaattttcactattttagaaatgatttctgatatagacccacagtaatgaaagcccttggaactgagaggacttgggaatttggctgtggatcctttgtaacatcttgaaatcggagaaccttctctggaggtttattcatctgtaaaagtattcgctaatggtgccatggcacgattaataataaatgtcctgctggtgtttgcaaagttaaccctgcaggcctgtaagttgtgttcccctcaggttatactgagaatgcaactatctcctagaataacgtcccctcyggaatgttaatgagaaggtagaattccagtataatattgctatcttctgatttcttccaatggtgttggaagaaacaagaatggtgttcaccccaggatatcaaaagggtgcttaatgaggaacatcactataagaggccataaacctacaacagctataacagcttcatccgcaggaaagcagctgtggttaggaattagtgattatttaaactcctgacactattcctattttgttaagtattgctttttcacttctacatcttttgttcaatttgaattcatcctttaagtttaatttttgttttaattaaagactaggagttttgaggatctgaacttatattatctctaggaggtagaattttattgatttgtgaattcttttatcctgcaagacattagaggagaggaattacctttatcacataactgtttctgcttactgctgcaggtactctgatttggagggccaccatcgacacacggtgtatgatggggcactgcctcaccctttcgctattaccatttttgaagacactatttattggacagattggaatacaaggacagtggaaaagggaaacaaatatgatggatcaaatagacagacactggtgaacacaacacacagaccatttgacatccatgtgtaccatccatataggcagcccattggtgagtaggtgattgaggggtttggcaaggttgccttgggttatgtgcatgtcatgattgtctttaagcatgaacttcgtgatttacaaaaagtttrttgcacttgttagtgttttcttcaaagcatatgctgaaagttgacagtaggcaaatatctttagagtttatcccccttcccctgggaaagactacctagaactcttcatcttcttaaaactcgctcaattcttcaagatcrtctttttttttttcctttgtttttgataagatttaacagttatcatgttgccatatttacttcatctatttctatgggaagactgaagtattttaaaggaattaaaaatatggcatttcagccctaaatactaaatactaaataaatgcatatgatattgtattgtgtataaattagatattattcttatcttctagaagataatgtcaagagcagtgcgttttagtgttttttaagtaagagaacttgtttttatttgattgtgaacttatattccttttatgcaattaaagcaactttatgatttagagtctgaaataaagataaaggtctgaaatatattttggggatagactggtttttgtrggtctgctttgttgtgatgtcttgctaaaacatatgataaacttggaattaaggaaaaatgagaattagcaaaataaagaaatttagtatttctttctggaagttaatattcttcatatcatttttattagaagttcaagcaaatattcacctcaaagtggtgaccaggaaaattagtaaagatgctgctcagtttattcatccacattatttttggccaaacttgttacctgtatacttagaatgagggaatgaatatagcatctgttggaaattaaaactttaacctaggtctaggcaaatgaacataagctaagtttactgcctgctttcccaggacttggagaaacacatcttttctagtcagaaacaccagtgggtatagctcacttctggtagcatataaatgagctttcttaaagcacagggttgttgcttgtataactctatcatctgttttatttaggaacttttgggaaaatcataaatctaggatagttttttttttactaagaggtgatgagtttaaagtcaagatgtgtaatcagctaatctgtgcttgatactctctttcagcaaatgaacacatattttcttccttttccactagtgagcaatccctgtggtaccaacaatggtggctgttctcatctctgcctcatcaagccaggaggaaaagggttcacttgcgagtgtccagatgacttccgcacccttcarctgagtggcagcacctactgcatgcccatgtgctccagcacccagttcctgtgcgctaacaatgaaaagtaaggctctctttcccctctcctcagtgcctctctagcccgtggacagacattgaccttcaaggctccaagggatgggagttttctagtgagacaagattttggttaattaacttggttcatgtggaacacagcaagactctcagcctccaacttcagataatattttccatgaatagaaggagcttgctaaccaaactgttatgcctatatatgcaaactttcatagaaaggaagcaaaccatatatttctcatttctaattgtcttaagtattggagccagagtgtatataagtacatactgaaaaattgtccctagaagtaatagaatttcactgtcttttccatgtctatgccggcctagctccttagctgcctatgctaggggatccagggttacacattcaaatccatttttgatcatttgtgtttgctatgaaacatggccacagattattttcttaacaatgtccacaggcccattgataactaggggacctgagttagagagtggcatggagagaggcattaatgcagatcatagcatctaagatgcagaggtagacgattgtagtgattaaataagatatctgagattaagaatctagcatacatttatcgtgagaaagaccctcaacagtttttattgccctccaacttcccaaacaatacttttatatcaccctggcagacaatctcaaccaatcactgctcctagaacacagctcaaaacacccactctttatttgtttattgttttttttttgtggaggaaatttattcatcatattaagagcacattttcagtttgtatttggatcttaagaaacctgttctatcttgccaagttatgttttctctgaaaatacaccattgtaactgagatttaattgatcctcttctagggccacgagagagctcatgcatgtcatttcttggaattcagtgttgacttcttctctccagataactgttgcccctggtgctttgctaaagaagtgctgtatgttctctgtgcaggtgcattcctatctggtggaaatgtgatggacagaaagactgctcagatggctctgatgaactggccctttgcccgcagcgcttctgccgactgggacagttccagtgcagtgacggcaactgcaccagcccgcagactttatgcaatgctcaccaaaattgccctgatgggtctgatgaagaccgtcttctttgtggtgtgttgagtcgctttatgcctctttttccgacttctatgttgattgtatacgatcatgattctgtgggtatttcctgaatatcatgaactaaaaaccagttcaaagtcctagaaggaaactcaggctccatcctttttctatttttatgaagtttttttttttttttttttagaaatcttaaggtttttacaaggcaaatggttgaagtagacaataagttgtctctactggtggctcttcaccatgtgctgggcattgaatcccctttgagagctaacattgaggaggaaacgagaggtttccacccccatttttaacagggactctcagttgtcatatttatttatgtttccatttaaaaggcaaaaaaaaaaaaaaaagactgagcacagtggctcatgcctgtaatcccaacagtttgggaggctgaggcaggtcgatcgcttgagcccaggagtccaacaccagcctaggcaacatggcaaaagcctgtctctacaaaaaatacaaaaaattagcctggcatggtggcatgtgcctgtaatcccagctacttgggaggctgcagtagaaaaatagcttgatcctggaggttgaggctgcagtgagccgagatcgtgccactgcactcacttggtctcaagaaaataaataaataatcaaataggcacaaaataaaattcccccaaactaaaaacaacacatcaataacagtaacaaacacaaagtttgaagactattttccagtaggagaatagggacagaggaaggtatgcttaacakgtcagggtgttcagttcttatctcttaagtctgtatgcaataaagagatatttaagaatttgggagacagtaatagtcaaaagaagaagtgctccrtgtagtagtactgactgataagtacattaggaaataagtcctctaaaaagaaatcatgatcctgctatccaggattcactgatgtcaattaggagctttcattcttgatgccttccaagctgataaccaaatgtccctgctctcagagaatcaccactgtgactccaatgaatggcagtgcgccaacaaacgttgcatcccagaatcctggcagtgtgacacatttaacgactgtgaggataactcagatgaagacagttcccactgtgccagcaggacctgccggccgggccagtttcggtgtgctaatggccgctgcatcccgcaggcctggaagtgtgatgtggataatgattgtggagaccactcggatgagcccattgaagaatgcagtaagttcctgtgggaggaccaaggcatgaccagagcagggagacacgaggaaacttccatggggactgagagaggacatggagctttctttttcagctgatgggatgctcccccttggcactccctgcaaactctggcactgcaaggcagagtatagctgtgtggcttgcaggtggaaccagactctgtttctgaagtggctaatacctccttttgatacatagaatgtctaaccaaccagaatatgataccaagaacttatattttatatatctactgctttctcacttgagccacagagaaatgttatgaggtagggaaggtgggtgtgaaccaattccattttacagatgaggaaactgaggttcacattaagtggatggttacattactgtttagtgtcagacctaacacttcaacccaggttttttacttcaaaccctgtccttccccaaccccacccacaaagttatactgtaaaacaaatgagtggtgctgacatattgagaaaacttaggactatttttctgctcatggtaaacagatcacatctaaaacagacacatatcgccagaggcggtttgcttggtaacatggtcattgttattcctcagtaccacaacctcaatgtgacaatggaaaggtgctttcttgtacyttcagttctgactttgatgcctcctcccttttcagtgagctctgcccatctctgtgacaacttcacagaattcagctgcaaaacaaattaccgctgcatcccaaagtgggccrtgtgcaatggtgtagatgactgcagggacaacagtgatgagcaaggctgtggtaggaggggccacaggggagtggagggagggacaagaaagtgcacatgtcaagtgccatttattagatgagagatgagagtgtatttcccatgtcatcttttctttgtttacctctgtaaaaaaatggttgattcttctaataacatgttacatttttgtagcattttgcagggttaccaggggtatttaatttgtagcactttaagtcatgctgtcattgaggaagacgttattaagatgttagaaacttgtgtaatttcttccaaatgtagaatccttattcatacttgacaagtttaaattgtttctctaattttataaattggttgaaattggtggaaaggggttagagaaaagacttcgtatctatctctaaaaaggatatttccaaattaggatatttcttatttggggattttcatattctgaatgtctctctgattttccctgttatctattggacatctgtagtctctctggtaacatgggaaagccagataaattaatggaatttgtcaagattagtcatagtctaacttgaaaccaaagcatctggagtatgtgtgttgggtttagttggaagagaagtaaggaagatactaaattcttttaagaacactgagtccaattgactgaagataatatgatcaaaatatttatttattatggcatcattttagcctcccataccaggcctttgttgcaaattacaaaccagataccatttcattctttgcatggtttctaccaatgggaatggatcgagtttcaagtggtaggataggctcagggtagctaaaagagggaatgttgaccatgaatgttgctggcattcctctctttgggagcttcaagagtgagctaatacaattctcagactgtctcacaaggaagccartactactttgtgcatttctctgccaatggtttatgaagtctttgcaatgactgctttgcagaggagaggacatgccatcctgtgggggatttccgctgtaaaaatcaccactgcatccctcttcgttggcagtgtgatgggcaaaatgactgtggagataactcagatgaggaaaactgtggtgagtgttcacagtcctatggtccttatataccaccagagctgtgatgtttgctttttgtccataattcaactgtctatgtcattgatcctcaatgggtaggatgatatcaagctgtctgatctctttctttctgctggtcagtacatttctactttctcttccactaaagacataagcatctccttctgagatgtttcaaatcaagcttttggaggaaggtatttactgaagaatatcttttatgtgttgaatttatttacatccaacttttttttccaaaagaagttgaggtgacttatgataaaggaaaaatgtaataagataaatagaatagaaatagaaaaccaggaccagagaagtagagggaggaagggtgctaacccagagacactgcttcttaagctctttccccaaaatggccttcataggagaggagagagaacttgtgtttgcattattacccttcctagaatagttgactattttaggagggctaayagttaattaacaggacaggttttagtttctctctcccagtcgaaggtattgactacaaggcattggatagggaggttgaggaaaggaagccaagaggctgagatcatatcaaattagatggtcagaacacactcaatgtgtgttctgaaaacaagcttaatgaagccctgcccagagtgtatatcactgacccatgatatgcgtcaatttctaattgactaatgaaacacattctaactttgtttaccttttggaagaaaaaagtgatcaccacttgcgataagcaatgagagatttaggaagctgactacacctgcaaatatcagttagctaaaaacttatacaaaagggtaatccaattggcattttgtcttttattaataaaagtcaatgttgaatcctataagaggttatctagagtttcacgaaatagaaaaaattaagataaaatcaagctgggcatggtggaacacacctgcagtcccagctacgcaggagcctgagcagggaggattactttagaccaggagttcaaagtcagcctgggcaatgttgaaagatcctgtttcaaaaaaaaaaaaaaaaaaaaaaacagagagagagagcaagagagaaagagagatcagatcacctttggacaaacttcttaataaaggccattctttacagactcaaaattaaggtgaaaggtctagttttggagggtgaatgatttgcccaagcacacctctggggcttgggacacaggagggtgctgggcacccagggcactatggtcagctcacaagatgtctcctgtatgtgattcctggtgcacactcatggccaggtgcctttcctttccagctccccgggagtgcacagagagcgagtttcgatgtgtcaatcagcagtgcattccctcgcgatggatctgtgaccattacaacgactgtggggacaactcagatgaacgggactgtggtaactgtcatttgagaagctyaccatagaattttgtactgtgacagtgtaggggcttcaaattagtgtttataaggcttttagaggaaaattatttttgtatatgtgtaatatgtaaaccttagcataacacagtatcttytgctctgtattttctatgcattattcttaactcatagcagtctagattagtcataattgaggaaaatagcaaggaattttaaacatttaattttaatatcaacacttcttaggagcagattttaatctgcgttagccttgtaaacaaagacattgatcttgctactattccacggaaagtcaccctaaggaatatgcatgtgctcctatgactctcttgtgtagagatcagatcattgacagagtaatcctaaacccaaagtaatttttatagctctttactgatttggtgttgggtcttaggaaaattagaaaacattgaarattggggaattccgatttctgaggaaaagcttaagagctggagattatttaatattagggagctaggtacttccatctctgtatgttgagtggggaaagtgtgagttttgagaatgtattaatttgctaaccacaagttgtgggtttgctgtgagccagtcacagggtgtagataggaatgtgatggagtaaccactatactccaggtacctaatatctgtctgaaaatgacaaggccttctyggaatgacaatcttttctcttcagagatgaggacctgccatcctgaatattttcagtgtacaagtggacattgtgtacacagtgaactgaaatgcgatggatccgctgactgtttggatgcgtctgatgaagctgattgtcgtaagtccctagacacatatgtagtactgcttacctgagagcatggatatgatagtttagacatcagtccgctgccgcttcttagattaaaaggccataagtattgtctgttcagcatgcactgataatgatcagttcacctgagttctaagtcatcataatcatacatttcacaatggccgttcaagtgtacttccttgctattttaaatggagaatatattaagtaatctgtgctaacaaagtatttatatattatcagctactatacaaatcattaattagataaaaaacatttcaggtaaaaaaatattcaagcaacgaatacattagtataaagaacttgggttgggtattcgaacatattgaatttatagcattaaaatttttctcagtcacacgatggagtataaaaatgattaaaacttgaagggggccagcccctccacacctgtaggtatttctcctcaggtgggatgagagactgagaagactgagagagatcaaaatggagtttcttatgtcttccttttctacatagacacagtaactgtctgatctttcttttccctacaaaaactggaaagccaacatgattactcagatttgagtctttatggatcacttgaatcaatgcaaactgtttatacatcattattgctgatccatcaacaataaccatcatccatgataaycatccatgatggttatcgttgatgatgtggttgccaaagagactttataaatgtatgtgggtaaaaccagtcttgacatttgcctgtagagattaagtccagtgctgtccatgccatggatgattcatgccattggaaactgactgggctctgacaactgcccttaagacatagtccrttcaactttcagacaggtcaaggccactatacatcttgatgaataaagaagagcaggctataatggcaagagccaaaggagaaatagcaggaagcttccccaaagtagtcaatttgtataataatttgaatatgtttttttcccccatggcagccacacgctttcctgatggtgcatactgccaggctactatgttcgaatgcaaaaaccatgtttgtatcccgccatattggaaatgtgatggcgatgatgactgyggcgatggttcagatgaagaacttcacctgtgctgtaagagggagagaaacggagtgaatgggagtggtgttgtctgtcaaatctcattgkttcttacgtgtagcatgtgagcctggagagcagttgtacaattgtttaggaatggacacaggatcagcgttggtgttatttcactgggtcttccagcttcagttctctctgtaacctgagaaagttgggaaaacctccatgtttttaaatgtattatggccttagaaaacaatgtctttaagggaaatgttgcttgaaaacctagtatgcataaataaaggcaggtctgttgtggttgaagtctgaggaagggtagggaggaggctgtacctctcctgctgtatcctactttgggtgcccctgaagtaccctctccaaacccctagagcttcctggagcacctttagaaaatgctaagactttcttaatctttacagtcacttccttttaacatggtaattcaaggccatctaattccctcttgctgaatgatgcatatatatatatatatatatatatatatatatattttaaaccctgcttgtttgtgagtctcaattcaggtacatgtcagtagcagaggaggaggggtatttcaaaatcacatgccctggcctcaccctaggcttagacctgatggagcagaatctccaagaatgaagcctgcacatacgtatttttaaaaggcttcttagccttttagtttagtcccctggttgagaactactgattttaatgaagtgaacgtaaatagagtttgttgcagtcatwttgctacatgctttgagtcattggaggaactctagggtaatagttctcaaaagtgtcttacctggactaggaatgtcagtgccacttgggaatatgttagaaatgcaaattcatgggatgcaccctatccaaatagaaattaaaaatcaagaccaaaagaagtagaggaaggaaaggcattaactcaaagaccctgctttttgagctctttccccaaagtggccttaattttgtgggaaaattaagggcccagcaatctatacattaacaggcccctcaaatgattctgatgcaaactaaagtgtcaggattttgtgtaagtaaaagcccttaacctaggagacaagacctggagaagcactcctgttggaagttcacgttgcatcttccatcccctttcccagcttcatcactactcatttttagcccagagatttgacttgtgaagatgatatatcttagtattttgtttctcctcagaaaactttaattagtgttcattatatttcacagttgcatcccaacatttttctttacttgttaggaactagccttgttttgctttgaacttcatgaatcttgagacacatcttagacatgtttaactttcaaagaagtccttaggaaatctcttctctccataaggtaaaatgcccatagctagtaaaaataaactttggagagtcagagacacagctacattaaaaggtttccaatactgttttataatattgaacttgcctttcacagcaaataattattgcaatagttctattaacaatacttccaagaatcagcccttagatctgaccctttcccctcaaccaatcttattataagtctctcctcttgatccctgtgtgtgataccaaggcggaaggaaaatcagacagcccaaatcctccatgtgaaagacagaccacatgtgaagaccacatgtatgttgagttcactgcatttgtggtacacgcatagtgaaccatgttccctgtaccaaacaagtaggggacctggggactacccttgagttcctcacatctgtacaggcagcagctagaggtctcactctggacagcaagtgtgtcagggtttgattgtgagatatcgattttaaatgtaagaggtgagggaattcaggaaggaaaatccaacacaatttaaagcttcaataaaagactcatgcggtagagactctatgacaactgccatcaggaggatcaaacaaatggcttcctggctgttaggataagagtccatgtactgccagtctgtccagcctcacagccaccattgtgctccacgatccatgctccagccaccgaggcctttattcaggtccagagacctgccatcctcctctctgactcagaatctatgggaagtttcttccaagccttcctctccctaacttaagtcagatcaccccagtagatgtttcatagttgtaattgaatggttaatttgaaaagcctgtttctctactagaatgaaagttccatgaggacaaggactgtgtctttcttgtttcccatcatatctactgcctagcacagtgccttggtgtgtactatacatgtaaggtgtatctgctgattgattaatcaaatgagtaaatgagtgcatgaatgaagcaagcctggtgctgacactggagtattttagatattgacacttagattctactgttaacttgtaatttcatttttctatctttcctttcagtggatgttccctgtaattcaccaaaccgtttccggtgtgacaacaatcgctgcatttatagtcatgaggtgtgcaatggtgtggatgactgtggagatggaactgatgagacagaggagcactgtaagcaaaagtcaaaagggagaaggaaaaaggaaggaccccaagtggtctgcagtttggaaaatgtgcctctgggatttcagtttgttctatagagttgtgcccatgactgcagatctctgctgacataattgtttacaagrccatgcaaacacatgcattgcttacatgtaaccctgcctgtttcttcctgtctcatttgagcatgatgctggcaaatccattaatttttcagtctttgtttgaacatttaataagccttcccctcctcttttctcataagaaactgagaacaaacactaaatactgattgagccacacctcgcaaattaatagtttattttttcaaatatgagatttgatcatccttcagccttcaggagttgctaattgctaatctaggcaggtgcccagctgcagagatcatgtgaagcaaggcagcactggtgttaacagagcttatctaatatccttgttgaaaatgaaagttcatttcccagaagagaaaagtgatagattagtttaagatagaagttccaaactggctgcatttaacaatcgaggcattgaaatagctgtactttttctgcactttcaaaatgttttaaaatctatccattgaaggggaaagttgaccaattttctgggcaatttaatttgcctagaaaatgtcagtgaggaaaatcatttccccgactccaattatttttttccccaaaaagacattatctgggaaaattaagataaatgcctgatttctccactttctatttcttgtattgatgtggtcttagaacgctttgccacagaatgcttacttccagcccccatcccagaggagactgtcagggaggactttgacactaccacaaccttcaagttcgtattcctgttatcattattactggcagagatagcattaatacattatagcattaatatgtttatttgaggcatagcgcaaaagcatgaaagcccagaaataaaatatttttaaagaatttgagcagatttcccccttccccaaaatctctttccatttcccctgctaaaaatgccattttttaaaaaatggagcaagacatttgtagcacatggtcaaatcccagagtggaaaaaagaatccataaacttctattcttttcaaggaacagggttttagtctgggagaccactaccagtcaccacaggaagcaacctgcaacatttcaatggcttaaaatggcaaaggttcatttcttgctcatgtaaagtttaatgacagtcaagcaaccctcctccatcccataattatgccatcagggacacattcaaggttgccaaggcaggagaagatcaacatggtggaggcacacagcttcttaacttcctgagcctggaaatgacagacatcctcttgctcatagtccattggtcagaaccagtcacgtggccctgctctaactgtaagggagactggaaaatgcaagaatatgcattctcatacaatttacccttgtgtcactaaatactcctttatgattttcttctcacacacagaacacccttaaccccttcccaagggacatagctcatagtccattcmgaaactgaaatccaggacctctgggtaatgggcagtagccactcaatcagttccagatgtggttcctcttggttgrgagacccataaactaataaacaatcagtgccttctgygcctgataggtattggcggaacaggggcaacacaatagaaataaacactcccattggaaagaaagaattggagactcatggccatcaccaatgtatagcaattctgaagtcccactgggctgggatgacacatgttagcacaggacagtcctgattcatgtctgctgccccagtggaattatgaatagcaccaccttcactttcaaaagcacactggcttggaaaggagagtaaattacatggccactctgggcagacattgtaaaggtcccttctttggggagtggagggtatttattgattagctcatgcctctgctctgggaggagctcctgtgttaaaatgtctctcactgtttctgactctaccctttgagagttttttcttgtctattttcctctgcaaatgaagagggaaagggaaatatgctaccattagggccagcacggcagctttctcaccccacttcttgcttatagaaggtcgggagcccaggagttgttttttgtttttttttccaagtctcaaacagtcatagtattttggtttatttggttatatctttctctcagaaacataccaggcatttgatctgtttgcttctagcctgttctaaaagttagtaacctgacctagtgctcttttggagacatagttctcaaatctgcttttttctttgctttctttccttcatagagttctgtctgaacttattgtcacttacatccaatccatgtagaaaaatagatgggcagtcattttatccaatgaggaggttttattgggccttcgtgtctcacagccttttaaacttcagacttttactgtttgggatgtagatacaggtggcttttctcacacagcaaatttctgggctttattttatttctgcttgtaaggtaaccagttcttcccttaggttctctctttcttatactatcttgccaaactcaggaatggcaatcaatgcacattactaacattctatcttctaacctcgctccatgattgacaggttcagtaagcatgtgatctgccttccagtttttccgaggtgatagctttatcaaatgctttgactttgcataacatgatctccacctttcctgcctccactatcagtgtccttgttgcttgcctcctgactgttaatccaatgccaaatattttatgtttttattatggcagtactctacttccctcatcactctatgttattcggagtaattaatactagctgttgcaaccagcatatcctgaaatctcaggggtgtaacataatgaagccttattgagcactcataaaggccaacgctggtttcacagccctcctgcatcttgcagctgtgctgcctggaacacatggcttccaaggttgctgcagcagcacaggagacacggaggaggcacgtgtgcttttcattgcttcagcccagtagtgacacrtggcacctccaactgacagtacgttggctagaactggtcacatggtcctaacccagctgcaagggagactgggaaatgtagggaagcactygtttatttggtaagcacaaactgtctctgtcaaagaaggaagtatcttgcttcataaaagaaaaagttttgattttaacttgtttttacatkgcaggtagaaaaccgacccctaaaccttgtacagaatatgaatataagtgtggcaatgggcattgcattccacatgacaatgtgtgtgatgatgccgatgactgtggtgactggtccgatgaactgggttgcagtaagtaaacacttgtttttatagttcattgtagtaactcaggtttacctaattaaaacatgcaataacataatgtagacactgaccacattttctccttaatgtactttttgcttgaattccagtcaagcccatagctagctgtgactgagtgcttatcctagaccagacattgtgtcaaacattctacatgcctggtagcaatcttatgagttagatgttattatctctttcttatgtacaaatgagcaacgaacttagaggttaaacgaattggccaggtcttactgtcattaagaggttgactcaggatttgaactctggtctgtttcactgcagagcamgtcctcttcccagtccactgggtgcctcttagcactttaaggctacatattttgtttattagtctgcacattatggtgggaggatgggggagggatagcattaggagaaatacctaatgtaaatgatgagttaatgggtgcagcaagccaacatggcacatgcatacatatgtaacaaacctgcacgttgtgcacatgtaccctggaacttaaagtatatacatgaaaaaaatcttaagccaaatgcagtatccttggtacctgaaaatccttctgagggtgtttgatcaagaagggaacgccacaggggacctgggaagggacatttatttttatttttaaagttgagggagtggctggatgcagtggctcatgcctgtaatcccaacactttgggaggccgaggcagacaaatctcttgagcccaggagttcaggaacagcctgggcagcatggcgaaactccgtcttaacaaaatacacaaaaatttgctgggtgtagtggtgtgcacctctagtcccagatactcgagaggatgaggtggaaggatggcttgagtgcaggtaggggctgcagtgagctgtgattgtgccactgtactccagcctgggcaataaagcaagaccttgtctcaaaacaaacaaacaaacaaacaatcaaacaaaaaagaaagtagagggagcactttgtgtaggaaaaggatgatgaacataaccaaggaacaattctagctcaatattttgatggaaatgttaaaatgacatgttactaagttacacctttgtagtccatttatgactcataaagtgctttcacatacattatttaatgtgttactcaagttagccccrttgagttgctkttattgtctatgtaataaagctcagagagcttaagtaacttccttgtggtcacacagaatgtcagaggcagaattggagcagtcatgtaagtccaggttaggagggctggcctctggatccctgccactagctgtgccactttgggcacatactgacctctccagtctttggtttcctcacaggaaaaaggaggcccttctccaaactctaggagcctgtgacttagtcatcctagtgagctccatgtgctttcaacttcttgggctctaattgactttttcctgaggcatccaaaggattttctatcaatttttctcctgcgtgagttacgaagaggtatgaataaccagccatattgagttggcttgccatttatttcacatacgttttctgtgggacttggagttattgacagaatgaagtgacttgataaaatattttaaaagcctgaacatgatagaatttgcaaaactgaatggcaggtttgggttctgactcccagagactgataggtggcttaaaatagactacagtactttcttttcaaatggcatttaattagtagcaggtttttgtttttttttttaaggaaataagtagcacaaacaattcgggtatggaagcagcttctcttttcagatattaagtgaatatgtgatatggaattcagtcttatttctctgggctaataatttgaggcatagaattcttttttaatatactagttcttgggtgctgttaatttatttgcctttgtcttttttctccttcctcctcttctccttcttcttcttccttctcctcctcctccttcatcttcttcttctccaaaagcatcactgaagtgtttaagacacattgttcgattttttaaaattgaaggtatacaacatgacattttgatrtacttatatatagtgatgtgttataatcaagcaaattaacatatccgttatctcacatagttatctttaaaaaaattatttttgtggtaagagcacctaaagtctactgtcttggcaaattttygggaatgaaaatacattagcattttttctagcaccattcaggtataaaggaaagaaattaacctcaggttgcaaatattatttatgtgatcataaagatagattgacttgctgtttctctggtagttcttattccttcttcataaaatggaaagtagggtatttcttttataaatagagtgccatatgtttgggtttggggaaatcagttatacgggttaaaatggtgatcattttcaaatgaaaacaatgataagaaagccctcacattttaggaagaatcctacagtgtcgtgtggtttctgctcttgttaaggactcttgcttcacaaaagggtgactcatttagtggatcacttggtccagaaattcttgactcctgggacccctaatccctttatagatttcagagctaggaggaaattacaaagtctagtgatgcatgtgagacccatggaggttatgtgactggctcaatgatatccaagttaataaacataggtcagattcatttagcaatgtagaggggatatcactgctaatctcacagaaattcaaaggacagtaaggaaatactatgacaaattttatggcaataaatcaaacaacttacgtgaagtgaataaattcttagaaagacacaaaactctgaaaatggctcatgaaaaaaatagaaaatctaaatagatgttttaacaatgtacagttgttaagagctcctataataaaggctaggatctttattataagactttcatgcatacagctttgaagtctgcactccaagggcagcattccattgaatttcattgtactttattttggttatttttctttttgaaacccagtgttcttaatgtactcagaccacatatagtgatatgatcatttaccctaaaggactctgagagtgattaagttcacctcattgcatactatggaaaacagatagatataaatctattttgatttgaaagaattaaatcaggagataccacagtctctttggctaaaatactcagaagcctatgaccaggagactttttatttgagaggtagatgaagcttaaatccttaatggagataaccactgcctctctttcccccattatcactcactatctatgttcatcttcgccagtttttctgtaagacctaggtttggggatagatggaggataaaagaagcaaactgataagaatgacaaggatgaaagccagatggcttggatagatattggtagagacaagatcttggggcaatgatgaacaatgaagtgttagggtaaagtgtgagctgttaaaagtctgtcttggaacatctggatcagaataacagggatcatttatatgggctctacaaaaataaactgtgtttttttttttttttttactgtgaaagttcaataaaaatcaaaagtaaaaatcatttgaatcccatcactaaaagagaactaacctttaaagtttggtgtacttttgctatcttttttttgcatatgtatatgtaagaaatatttcttagtattttgaaaaattaagaaatattctatactaaatggagtttttcagtctttttttcaatttattataggtatttcccatgtcaaagtatcatttgaaactataaattttaataatcacatagcaattcatcatgtagataatcataacttattgcttctaagatgtatttttttatattttaacatctttgaaaccaagatatatatcttacaattaataacatgtcagcgtaagttccagacatattcaattttagtgttacataaagtaatggtgcatcattaatgtcttagtttttttatactataacataatttattccctatcactgaacatacattcaagttgtttacaaatgttcttattgtaaatatttttataatccttaaacgtaaattatactgcatattccttctcaagggaaaattcattaacatggaataactgggtaaaagagtatgaatatttttaaagtccttggtgcatacatacatagtacaaaatttctttccttgtgtactaatttatggctctaagagcagttgtatgatttagaactctatgtattttactgcamcctggtcaacacttgatatacatgtatatatttgtgtgtgtgtgtgtgtgtgtgtgtgtgtgtgtgtgtgtatataatcaattggtcaatgttagggaaattatagtcttcttaaaattttataatttcctcctatttgtaactttgttctaacctatctgtatccatgtcttttattwatttatttatttatttatttatttatttatttatttatttctatctgttatctatctatcgatctatcatctatctctctatctatctattgatctatctatttgcaataggattaaagatagtagagcaggtggtaatagctgtagagtgtcaggcttcatagttgtgcagtccagaattggatgctctgaggataagcctaggagtgctgcatataatgtgaaaattgcctcamagttttagcattatatgcatttatctaaatggtattcagatcacgatcagaaataggaatcctgactcccccagtgccctctgtcctctccaaggcttatggaaaggggttatctcaagatgtcctatagttggttacgagtaggtgcttcttttgatacaccacttgactgttatttgtggctgatctggtttgtaatgctgggattttgtttttcagataaaggaaaagaaagaacatgtgctgaaaatatatgcgagcaaaattgtacccaattaaatgaaggaggatytatctgctcctgtacagctgggttcgaaaccaatgtttttgacagaacctcctgtctaggtagagtatattttttccaattcctgtttaggtgaactttacatctaaggttctccacccactcccctttgttaaataaatcactatttaattcccttaatggtaccatactcatggtttcatggttctaggtcattaaactactcaagaattgctttcccccacctgcatgcatgctatctgaccagtgcctacctgagtgcttgtcagatactgtgtgctcagtagagtctgtggaattgatatgaatgatgaaggccttggtgatgatggctgcttattgcaccagtgtgtgaaatcaaagttaatttaaaaaacaaactaggcttactttcttcattgtaagtcaaacaaccaacacgtatttattatacacctacttacgccagacatagatgagttgtaaggtatggagtcagaaggtagcttatcaagatggtgagtgatgagcatgattttaggtgccttttagtatttgaatttactgtttctaattcatgatatgtcatagtcagaagattgtaagagttccttttggacttgaagcttaagaactcaattgaaaaactaaatcaatgactcctgttcctgaagctggttagcagaagtgaagagacaccgaacaatacaacacaacatatgccttctgaaagggaaaatgtgctctgctattgcagagtcatagagtttaaatcctgtctccattgcttatcagctttgggactgtgggcttaatcgtccatacctcttaaagtcttttggcaagactaaacgaggaaaatatttgaaaagcatgtgaaacagtatctgaaacttagtgtttcacaaatgtttgtatcattgcttattttcatctgtacccttctcggtcctcattgctggtgaatatgggtttaaacagaagcaagatctctaaggaatggatgggaacagatgttgcgtatttggttttattttgcctacagatatcaatgaatgtgaacaatttgggacttgtccccagcactgcagaaataccaaaggaagttatgagtgtgtctgtgctgatggcttcacgtctatgagtgaccgccctggaaaacgatgtgcagctgagggtatgatgggttcatgttgggattaattgacttttggggaaataaatactgctaagtacactatacgatgaaagaaacttcagcttctcatagtttttcttttctttctttttttttaaactcgccagctgcttctcttccaacacctctttagtcgctccttctctctcctcccctgccagcttaaaacaatagctacatcccccaacaaatatgtagcaattaaaacaagagccaggtgttacttattataatggatttagcctcttgtctaccttgataaaaacttcaaaaagtggacaagatgtcatctttcttaaggctcaaacaayaacaaaagcttgcctatgggatggtcatcaataaaaggaaggtaacaaggccctctagctcccactccactgagaataagatttgaggcccagtagtccaagagggctcgtgaattggggcaaatcaaggacatatcccttttgtattgttcatggactactgatcacaggcagaaaggagtctggcacagtcataacttcaatcatgagttttacgttttaggttgatgccagtgtctgacaatcgggcctaataaaacagagaaagaatgtaagtcagatgtattatactccaaattccagaggcctgatctaaatcatcatatcctagttaagaggcatgggtctttattttgaatttgaagtttgtactagagtttaaggaacttgataagaaaatagcactttattttgtaaattaagagtaaatggccaaaatggctgttcaatttcttcatacaaattgagcttttaaagcatacatttgactagcatacttacatattttaccctcaaaacactgttgacagtgaatgaaaactagagtgaaagcatttgaacagttggtctggtaattaagcagcaattttttaaatgtttaaatcctttaactaaggacatgactgaaacaaattggaatattcatataaaacataatgtcaagatagaggaaatatataaaatgaacttttaaaagttacttaaattggattcagttgacattatgcaagtaaattaaacttaacaaattctagacagtgcatcttgggatgagtcaccattaagtagctgctttaggttaaaaaaattaaatcaaggacaagctaggtttattttgtcattagctaggagctaaattgggtcatagagctgattacctgctaaaaagaatcataaaatctgtcaggaaacagtaaggaatgagacttttctggtaaacttttagtaagactataaaagtatttcttctgtgagatagaatgtctgcagtctwgtctgttttgatgtcagtaaataaaaacaattcagtgaaaatgaggactgtacgtagggttctcagtctagctttgttccatactaccactgagtacaaagaataaagaactgataatgtccctaagagacatattagctttccacttgaagtggagaatgtcaagtcacggattttgtaacccagttggagagtcagctttattgattaacagagatagtcagattcctataaaaactcatgttctttaaaaaggggacaggtacatactgtgcattttatatcctactttatataggaaagtataattcaaacagataaagtagccctttgtttgtttacaggtagctctcctttgttgctactgcctgacaatgtccgaattcgaaaatataatctctcatctgagaggttctcagagtatcttcaagatgaggaatatatccaagctgttgattatgattgggatcccraggacataggcctcagtgagtataaactttggcatctttcattgatattaagtgactttatagaattttaaggtgttgacttttaaggaatttattgtttaatgagtgaattttgttgcattagtggaggaggaaactcttccaatccagcatgctcctgatgccttagcgtggccttgaatcccagccaagctttcctgatttctttctaaaactcctccgatcactggggtttatcctttctggaccatctcacatcttcttgtattttgaaatttccttgtccttgatactgcagatcttgttccttcctaccattgtacaccttgaaaatttctactcagacctcaaagacccagtttaatgtcaccacctctgtgacaacttctatcactccttctggcagagttctwtgattgctcaccatgaatctatgtcattttatggcacatgttactctaagttatatagctagttgaccacataatatctttctatcctctagacatctgctttttggggacaaagactgaatctaatttatctctaaatgcctagcagctgacccaacatctagtacactctatgtggtaggtgatcaaaaaatttagttgaatgaaggaaaaagatgaataatgcttattgttgaatctctcatggctctatctggtgttgggggagatgacagtagggtaggagtcagaaaacttgtcttctgtgcctgtaaacttatcttttatgccagtctcccttatctactagctttgtgatcctaaataattgtaacgattctctgaatctcaattttttttctacaaaatcaaagtagtaatcttgttctgtctgcttacctctgagagttgtttggaagattgaatgagatagtagatatgaaaggctttgaaaactatcaataactataccaatgtaggatttattattggtgtattttcacacatattcatgcaatacaatacacttttcaagaatggtgcatacctaggaaagcagcaggtgtccagtgcatccctctacagtcacagtcttcctatgcttttaacatgcctgctgtccaccatccttctgtctgtatataaaataggacttctcgttgacatggcttctttattgcctctgatcttgagtatgctttcaaattctcaacagcctgccctggtttatctctatacattctgttttggaaactagaacttgatcctaataagagtaaataagcactttgttgaaatacgtttaaatgaatcacttttaaatagagatgactaaatctcactaagttctcagttgaagcatttgtagctcatagctcaagtttgataggttttaaagtttgattatactgatgtcattgaattattcatattataacaacagtgaggagggaggtagagatgtcaataaacgaacagtacttcacctgattagacccctgttcttcctttacttgatgctcttgacatgaaactgacctgtgtgtcttcctctgtaggtgttgtgtattacactgtgcgaggggagggctctaggtttggtgctatcaaacgtgcctacatccccaactttgaatccggccgcaataatcttgtgcaggaagttgacctgaaactgaaataygtaatgcagccagatggaatagcagtggactgggttggaaggtaaatttgccatacattccccccttacctgttctgttttcctggttagagttctctactgcactccatgggccatgagtgagtctgggcctggatatgagtacactcagccatgggtgcagctgggcagtggttgggcttgctgaagccccagcaactacctccacttaccccagcatgtcatggagacattatcatatcctgtattctttgtgggccatgaaaaaaattgggaaagcacccaggtcaatatctggatatagatattatatctaggatataatagtgaatattatatttactataagtgaatagcattcttgccaacagagttctggattccaaaagtaactttcagtatggcagcactgctcattttgtgaagaaatgggacagcctcacaattctcccagcaaagcagttgagatgaaactttttttctatggtagttatcttggggacgaacaatccacatcttgtgtttttagcaggcttctagttaaaacagattggaaatttgactaaagaagtctttggaattgagttaatagaggtgtcagtctcttctgttcttctagaccttctagtggcccagggaccagagccacacattttggatggtttttaagtagaacttaagtagggttatcatcaggtaggtgtgcgaggtacaaatggatgtggagaagttagtaagctcattcttcaaggaagaggtttgcactgacttacattggtgggaaaatgattccttgaaaatgaaccaataatgcaaacatgtttgagggggaaggttcaggagwcactactctcctggagaatggatagttattttcagtgtaaattctttttcaccttttaaaaaatgtggctggtgttcctggaagagcatctttgaagaagctaattgggtcccgctgtgyctgcaggctaacaggagactcattttagcattttcagtcaagaaacagggccttagagtactgttgctagagtcaggaactcaaaactccagacattaacactctcttctgaaaaccaaccagggaatggcagatctgtcttcttgtttgaagttttacctctktctcagccttaatgaataagagaattaagaaagtggtggaactttttctgcttgtaagagactgagacctgcagcctcagaagtggaaataaggcaggacagtcttgccgagtttgttattttaaaaggctgtttccactcatctttgagctgacaccaggttcctattgattctaacggggctctttcctgaggaggaaacagactcatgggcagtcagagttaaggcaccagccccaccgtgccttatgacttctacctagaagcccatgtctcataataatgccagtcagaggccagtctgactgctgtgtctatggtagttatcttggggacgagcaatccacatcttgtgtatttagcaggcttgtagttaaaacagattggaaatttgactttcctgtttagtctttggaattgagttaattccattgtggatcctgcgtgattcaggtgctttggctgttgggcaggagtcccctcaattccttactcttccaagtgtaacctgccaaacatgtccccttggctgtagttcycccaagagagggggactatggtctgatgatagktatctgagcagctgtctcaccagccaaacgaaatgctctcatcttcaaacctcttacccagtaatgattactctaggctttgcagttgtttaactttgtccctctgaattcaggcatatttactggtcagatgtcaagaataaacgcattgaggtggctaaacttgatggaaggtacagaaagtggctgatttccactgacctggaccaaccagctgctattgctgtgaatcccaaactagggtaagtacttggagaagtcttcaacatctagatatttctccctggattctcatcaaattccatgtttcttataatttttttttcctagtttaactgaaattgtccttcaagtttttgggagtagcgtctatgactgtttcaagaattataacatgcccttgagatcatatagaaccaaccatttctgatggggaaattcctttagaacacatctgagaatctttctagttacatggattccttgccaaatcagagctctgaactctaaagttctttgtggatataactgttttaagtgaaggtttcaacagaattgtttttcctttcatttggatgttttaaagtaactcattcattgaaatccagctagggatttggtcatatttcatttaaaaattaaacatttatatccaaaatatataaatatttaaaatgacacatgtataaatatatattatccatttgtakaaatattccaatttgcaatttatctataaatcatctcagtgtaaatgagaacaagttttgttatttttctctacatttcaagacatttatttgaataatcactaagctgaaatgacttggtatttacatattagcttagcttcagaatagtgacactttaaaaaagttttttgaatgaccccaaataattttcctacttgggcaggaccagtctagccctctgtagatatgccagtatttgtaggtagaaccctatgagctgttattactttaattctgttatatttcatatgttaaatcataccctcagaaactcagcaatgaaatatgaaaaatacttgactgatgagattaacctgtagtgaggacttgtcctcagcattagtcattgctgcttatatcttatctacacaatatattaggagcaaagagatgcagtgtgttctatggtgtgaatgatgtgactgtttccagtgtgccgtttaattttttcctctgtaactaatgtttaaattcatctgatattattatcatactctgatatccctccactgtttttttcatagaaattcttttttttttttaatttttttggagatggagtgttgctctgttkcccaggctggagtgcagtggcatgatctcrgctcactgcaacctctgtctccaagattcaagtgattctcctgcctcagcctcctggcagctgggattataggcacccaccaccacactgggctaatttttgtattttcagtagagacagggtttcaccatgttgggcagcctggtcttgaactcctgacctcaggtgatccatctgcctcgccctcccagtgtgccgggattacaggtgtgagccaccacacctggccagaaattcttattttagtctttgtaattcctttctctctggaatggctcagtgtagtcctgtgagggataggaagtaagaaaggagtgagaaagggtttcactgcctaaggcctgcagacccgacctacaacctcctcatttcatgatccatttgaaaggctcatcatccataagttttataagcataagcatatatgatgtgttgaaccttcttacagcttctgcggtataagatctgccagtgggtccaaaggatgatgaagatgataactactgataataccagcaacagcaatgagaagtgccaacatttattctattcttgctgtgtgccagctactctgctaagtgtcctacatatataaactcatttgaattgtacaaaggatctataaattagtcataggtttctatcccttatttacatagatgggtaaaataacaccatgctccttcagacagcaactgttgactataatataagatacaaagggagaattgtcatgaggacactgctgaaaaacactgtgatagttctcctaccttacaagggttcagggaagctctatggaraaagtakcactgaactgaatgttgaaggttgggatccactggtagtataaccagtgataaagtatgtgacatgtgaggtcaatgtgggtgagagtgagaagggccacttcccagagaaagtgggactgacatagaacctagatggatgtcttgggtactgataggcaaaggagccaggccggctgttcagaagcycaggcaatagcataaacgaagtcatggaggaaacaaaaatcattctgtgtaccttttgtgtgttttttccattccattccctacgttttgttttttttagttttgagtatttaatactttttaatttaaattaaattgaattaattaatttacttatatagacagggtcttgctctgtcacccagactggagtgcagtggcatgattatagctcactgcagccttgaactcctgggctcaagcagtcccctgcctcagccttctacttgcacaccaccatgcctggcttattatctttaagaaaacagcttatataattcacatatggtatgtatggtatgatacaacttacccatttaaagtgtacaattcactggcttttggtatatgcagagttgtgtatccatcatcataatcggttttaaagcattttttcatcaccctacaaagaaaccctgttcctctgagccaccattttyctgccctcagtacctgctaatctgctctctgtctctatagatttgcctattctggacatttcctacaaatggaatcctacagtatgtggttctttgtgactagcttctttcacatgtgtgtcctttttaatgaaaaccaaacaaggtggtatttaccagttgttgagactttaaaggcccctggctgcattttttccagagcccagtttgtctaaaatccacacattcgtcagtagaatttaaaacttggcctatgcctgatgactggtttagactacaggctgcaaagcagcggctggtgggccaaatatggyccataggacatatttggctgggacaacacagagctttaagatttttttttttttaacatagtgctgacatttaaaatttaagaaaagaaagaaaacctgtatttcttgctttggaaatcagaggagcggattacactgggtaggtctgccttcctgggcactgacaggagctcttacacagggtcttgctctccgcatcacttgatatttacaaccgggatctctcctcattcatcttacatacctgttcctctccaggtatttgaaatcatgcaatccctggtctaggtaattcaatgtgagatcatctttgcttacatagacccttgctctacaattaattattaattggatgcaaaagacatatttaaaaagagttgctgggtgtggtggctcactcctgtaatcccaacactttgggaggctgaagtggggggattgcttgagtccaggagttcaagaccagcctgggcagcactggtcaaaccacgtctctactaaaaacacaaaaaactagccaggcatggtggcacatgcctgtagtcctagctactcaggaggctgagatgagaggatcgcttgagcccaggagtgtagtgagctatgattatgtcgctgcattccagcctgggcaacagagtagctccatgaagatagaaatctttgtatgttttgttctctgatagatcccaaacacagaacagtgcctcttacacagtaggccttcaataatatttcttgaagagtgaacagctttcataatacagctttcataatgcattttaaagggtctgaatatccatccttcggccaatttctattaaggaggtgcagttttcaagaaggataaatcatatgtgctcttgygcccctatttttgctccccatcttctgtaaaatataaaactggtgtcactgagcacccaggtccctgagataaacagttggtttccctgtaggtaatgccctgtgctctgctgtagtggagaagtcttaycaggtgagatgctacagtgaagaaatcttctgttataggcttatgttctggactgactggggaaaggaacctaaamtcgagtctgcctggatgaatggagaggaccgcaacatcctggttttcgaggaccttggttggccaactggcctttctatcgattatttgaacaatgrccgaatctactggagtgacttcaaggaggacgttattgaaaccataaaatatgatgggactgataggagagtcattgcaaaggaaggttagaaattarttagaaagtaatatattaaattaataattaacatatttctaatgtctttgcctgttttctcaagaaggagccctgctcttaggaaatggcttatatagttttttagataccacccctccacccccaccaactcccacctgctgaattaaatgcagatgagttcattagcaataattaaatccttttcgtcctttttacacaactttaaaaaaaaatgcttctcagcagaagatattgaaataactgagtttcctgttaggttgccccagtagaggtggtttcatgtgtaccaatgttaattcatgtctaaccgcttctggacacattcattttcactttactagattgcccagtatgcacaactgtaaatatctaggagatgaacattttttgttgttgttgttcagactctgcagaattgcaatgacccagcacatatcacatttttcctatttggtcagatagatgtcttatgttcaaaagaaaacataaaatcttgccatttaaattgttttccaaaaatgcagtaaaatcagtaacttgaaagtgagctagggccctgtgattggtgtcgggtggtatacatcaatgtggtttaatttctatcttcttgacctcctaatgcagcacactttcacagtcccatgtagctaaagtcagcctgaatattcccagagcttcaaggcattgtatgagggaataattcaagcagaatgacatcagatctagaagtggcggtagggtgtagtgggtattttcttttcaataaccttctgttttgtttttcccctgtgggtaagcagcaatgaacccttacagcctggacatctttgaagaccagttatactggatatctaaggaaaagggagaagtatggaaacaaaataaatttgggcaaggaaagaaagagaaaacgctggtagtgaacccttggctcactcaagttcgaatctttcatcaactcagatacaataagtcaggtaatcaccaactttggtataagatgctcctcattacttggaaatcttatttcaaaataatggctatattgctggaagatggcagtagataacaacaagctaatctcttggtgcatgaaaggggtatatgtgtatgtacgtttgctgggggagaggaacgttttaaccattttmaccaaagaaagataaaattggwggtcaaatgaaattatgcaaaccatcagcaggtaagtaaaaatattagccctcatcattgtttggagtgatggatatgtacttctaggccacagaatccagcagacatcagtcccctgctaartgtgagttgggttaacaagtcacaaaatgggtttcataggcatcagaaatcttatccttcccattgcaaggctaggctagtcaggtcaacctgagatatgtaggtcttagtttaaaatggccagtcatgtgcattcctacccgctcccctctgtctcactttcccacttctgggccctgcttcctcaggttacctgtgcgctaatttatccttcagcagtgtgtggagcaagatgaaaggcaaagggaagtgaggaaaggaaatagccttttactaagttcttrtgtcaaattctctcttcagtgttaattcagccatctattacttcaattaccttataaagacctcccaaaccttataaagacattttattctcatctcaaataaagaaactgaggccgagacagatttagtaacttgtgtgcctaagtcacataacaaatgggtgagttttaatctcagaaatgaaataatttttaggttcaattctatccaacccaaaactcagcatcttgctgtattggcccagtgttcagtatgccaaagtcccaggttgaatgctatggatatgtggcctttgacaagttactcccttcctgtccccatatgtgagtcatgggtggagtcyggggttgtcttgagtctgctgatattttgagaccttgatcagccttgaaaaattgcaactcaaagctgagactcccatgagatgacaggggtggcaaatgccttttctagggcatggcttccttgttttggaagtatatcaccaaaacactccagaatactccagaccctaccaatagaatagcttttgtgtcctaagtgcccttgcggctctcacacttggcaattttaaaggtaggagaggaaggcacagtacacctggaaaggctatctcccctccctaccgcctctggaccctgaggagaaggcagaggaaagtctggaggctgcccctgaaggaaaagcatctccctccggcagctgatgctcagggaaggcggctcctttggaaagtgctggtggagtgggggtgggggtgggggtggggatggggagtacagccccagcccagcctgtttgaaccaagagttctgaaagttgagcatgcctcagaattatctggagagcttgttaaatatagattcgtgggccccatctgttgcacttctgatgcaatatgcctkaggtggcctaagaatttgcatttctagttctcctgtgacgttgatgctgctggttcagtgaccacattttgagaaccgctgctccagtcccttgctactcagagtgtgggccatgggccaggagtcttgggatccttatgggagctggctagaaatgcagtctctcaggcccaccccagaccttctgaatcagaatctgcattttagcaagattccccaggtgatkgatagcacattcaagtttgaaaatctccactctggagggccgacgaaatggtaatgagacagatattgatggaggcttttggaagatgtgttactaatttatagctatgctttgtctgtggttacatcttgaatgacagacaatcaggatcacagaatgttagtctgagaaggaatgtaaagattatccactccagtacaacccttggataaatcataatacatgctaaggtagaattaataaggctctagacttacctagggagcttttaatggtaatacttgaactctaccccagaccaattcaaatctgaatctctgtgaatgggcatcaataggtttttttgtttgtttgttttttgtttttgagacggaatcttgctctgtcgccctggctggagtgcagtggtgcaatctcggctcactgcaagctccgcctcctgggttcacaccattctcctgcctcagcctcctgagtacctgggactacaggtgcccgccaccacgcccagctaattttttttttgtatttttagtagagacgaggtttcactgtgttagccaggatggtctcgatctcctgacctcgtgatccgcccaaagcggcctcccaaagtgctgggattacaggtgtgagccaccgcgcctggcctggcatcaatagttttgaatagctcccaggtgattatgaggaaccattgctctaaattcccttttcttgcaattaaggtaactgaaacccagaagaaatgtctccttggagggttggggtggaaatcacatccagtatactttggatagaccatatgttatgatctgtccagttttgggtagtgacaaatcttggtayaatatgtggatctcactggtcttttgaaccatckcaagttgtttagcactgagtagattttgaggttaggcagtgaaccagatacccaccttccaaacctctcagggcagcagagaagataagtgatgccaatagaaaatgtgagtggtacagaaattggctggagggcccagagagggactatcccactgcagtgtggtggcagagatgatagtgtaaatgagggtgagtggccagctgacacrtggaygagaggtattgagaggatgcctaggctctgctgtcacctggcagagccacttccagttgctgggtattcaggttattcattctgtcaggacctaactgctgttctcacccgctttccagtgcccaacctttgcaaacagatctgcagccacctctgccttctgagacctggaggatacagctgtgcctgtccccaaggctccagctttatagaggggagcaccactgagtgtgatgcaggtaggagcactgcccaagcagctatgggggcctgggagcactcctctgctgccttcaggagtcagaagaatccctgtatgctgggtcctttgcagcagagtggggatggctggaaggagggttaagggatgtgggaggtatgaacagagttgagtgggacttagggggcaaacagaactgtgttccagtgactgctgagaattatttgctaagatctgcagaaatatagatccagtgtccctaaatctattgctgtgttgttttgtaaagacattttgaagagtgagtttttataagacctctacctcaagctggattcccattgccccagaatccactcaaccttaattgtagctcctcagggtagagaaccatgtycagttttgacaactgaaaaagggctaccttttgaaaagtgctttatattatcaggagacgaagaccagcatgaggaagctgtggtttaattctagtcccaaacgctgtgggtgatctattcttggcaagactttttttcaatgactcttttaaggagttaataagccggatgggggcgaataactagtgtccctaactagcatccggtgctggaaaagcctgtgaaaaagtcgtcctgcaattcactagcggcccattttatggctcacatccttggggccttcccccagttttagctgatggggaaaggaaaacgcttaaccaccttctaccaccagggggagcaggcagttagaccaggaaccaccctttgactcattccaaacaggctgaggagttggcaggtttagggaatgaatccagggagaaaaaactgtttcttgtcacccctcttcccctactcttgcactcatcccaacgctactggggaaatattggtaggaatccaatatttcgagccatatttggaacaaaatgacaatttcaggctttgagatttgttccatgctgtggatagattgttttgccacttactgcaatttcacatcgtgggagcagtgtggtcctggttgtcacctcatctactacttttctcatttaaactttttgccaagtggattttattaagattcttgttttaaagaactttaaccgaagtaagcacacgaatgatggcagtcattccatatagggcctcggtttggtataataattaagcaattagtccagtgagatttcttgagtgccagctatgtgccaggcactgttctaagtgctggaggtaacagaggtgaacaaaacagacaaaaccccctgtgtgtattgagtttacattctaagaggacaataaatagagaagtcaataaatayatggtagttcaggtggtactatggagaaaatgaaggcagaggaagagggatgaggatggggtgagtggggattgtcctttagatagtgttcagggaagacctgtctgatacagtgaacattgagtggagactcagattgaaggactgagccaggagggtatctagactctttaaataatatacacatgtaacctatacttattaagcatcttcaatataaaagacactgaagcactaattccccatcaggcacaycctgggagtatgtacaggcctagctgggagcagggacttggagtaagggcagtttgggaggacttgaaaactcaggagctctctagctaactgcctatcaaatatctctatatctgtagctatgtgactgcctgtggactgatcaattactgatgctttggtgtctttagttgaagtttcaaggtgggcctacattaaactcttgattttaactgggttcayggaggagaattctgaaaacttcaaatgagaatgtgaatattttaagagattattttaccactaggttcttgtaactattaatatatgtgctccagagtctagtacctctccattgttttttgggaaaaattctataaactgccccctttctttccactaaatgtatgttactctccaagaccttaaggaaactcactggacttagggggaaggtaagctttgacagggagactaattggctggcctgcccctcctcccacccctaacctgggccggtttgcatggtgtgggcactctgctgagtacagctgactaacacctgcatggctttcccttcctgcagccatygaactgcctatcaacctgccccccccatgcaggtgcatgcayggaggaaattgctattttgatgagactgacctccccaaatgcaagtaagtctgaatgttgaggtcccrgctataggccttgcctcttctggggaaatttgagaccttaaagtagccaggaaaacaaatacaggaacctcaccagttcactaattcttacattttaaccagcttgccttcccttgagggagtctacagagaactgaggcagtgcttctttaactagaatgtgcataagaatcccgtggagatctggttcaagtgcccattctcacgcacagagattctgcatttctaacaagctctaggtaggccacagggtcttggaccacactttggggagcaaggagttagaraattggcagcagcattttcctactcacctggtattgttgattacaacagggctgtgggagaagagctgtctgcagggctgctttagtacaaggcactsgtgatgagcagaaagactgggatggattcggaaagaagatgactgtgttgcgaaaactctaacatggagcaagataaatggatgtctttaaaaagcatttaatgaaagcatataaaagaaagaaacataaccatggtttccatttgtactctctaaggaagcattgcatagattagacaccaataggttttcgtggccagactcaccccctcagtgccacagctactccattacaagtgcatttctaaaatcagagcactgttctttctgcttgtcttctcttggcagaatgaacaaaagtcatgcaggatacattgtctgttcaacatgtaatttatgcagtcaaagctctctctacttcaggatgtgctcagaaaaatgcagtagaagcctaagawcataacagctagtgaatgatttgctttttcctttcaggtgtcctagcggctacaccggaaaatattgtgaaatggcgttttcaaaaggcatctctccaggaacaagtaagttttaagaatgtgagcaacttggaaattactcatggcccctacattgaatgctgtcacagcttttctacttmacccagtctttgaaggagtggttctagcccccagtttctgccaggattgcgggctcccatgtgttgatgtgctctctgctatcttcttctatagccgcagtagctgtgctgttgacaatcctcttgatcgtcgtaattggagctctggcaattgcaggattcttccactatagaaggaccggctcccttttgcctgctctgcccaagctgccaaggtcagtttcattatggggaacgttgatgtttgaagcctaagaaattcatatgaagccatgtgaaggacttagttttctttctaagttaaaaaagcacaatacgcagttcaccgattccacagaaacaaaaagtagtgaggatgtaaagcagtcacttcaaatcccaacttcttagtcaartgcttctctaaagcctgagtgacaagctgtgttttgtagtccaaatggttgtgcctactggtaggtgttcaggtcagagaggagtgaaaaggcagctgtgtgatggcccaggctttatccttctatgtgctggactctttttcttttagatctcatggttcaggaatgtgctttaacgtttccaggtagctaagggaacttactaccatatttgacagtgtaaatttagagtgggaattgagcattacatttgaggaagatttggcaatgtggaggagagggtactattgtgaaaggttgtatttgttgtttttgttgttgttgttttaaataacaagacactgttttggttacttctttccagcttaagcagtctcgtcaagccctctgaaaatgggaatggggtgaccttcagatcaggggcagatcttaacatggatattggagtgtctggttttggacctgagactgctattgacaggtcaatggcaatggtgagtatggtttcaaaatgattatttgaaggttgtcatttatagaataaatactttttataaagaacaaaattcacctagagaagactgaaatacagtattaggcctctcagaataaggtctgcactacacaagttaggaaacattaggtttgttgctgaaaggtgtctaaaaacattggtaataacattggaatttacccctgctctaagccacgctgttgaattggaatcatgaacagtctgaagtttaacttgaatattgaagagctttctggtttttttgagggtggtgtgtgaggaggacatgatattttgtttttatttgatgacttttatatgtataaaaggagtagggaactatatttttcctagtgtcatatatttttctgccaatgtatagtgatgaaataaacagtgattttagagttggcgttggtccagaccacggctctgccacctactaagtatgtgacaatagacatggagcttgatatctctgaccctcattgtccctatttgtaaaacaggtaaaataatacctcctgggaggaccaaatgaaatactttatgagggggctgccacagtcttggcactgagggggctttctgtaatcagtattgggaaaccactttcagaattttgtctctccctcaaatctttcattgttttccttccctgagaatattatattatccattctttttccttcccctctctccttattcttcttttcttcttccaccattatccttttctctgtggcccagacccaattcccaagtgagttatttaagagaatttggatataagaagaatgttaccatttccttgagttggtaaattagtgcatgttatgttactttgcataataatttgccatatggaggtcttgtgttttgctggcctttttttttttttttttttgcaagttctcttttgggtaacttatgacgtagcacctagcgtacctccaggtgtgaggaaggcacctttctttgtgtgtgaaccagattagtatggtgtaatctctctctstgtttctctctctctctctctctctctttctgtctctgccatcagagtgaagactttgtcatggaaatgggraagcagcccataatatttgaaaacccaatgtactcagccagagacagtgctgtcaaagtggttcagccaatccaggtgagaaaccatacagtcttttctttcagttactgctgtcgctggatcttaatctattgagtcatgtcttaggattttcctaaccttccctccaaagggaaggaagcatagtgagtggtccatgctgcagctgccctatctgcaggaacaggaccaacccaaggacataagacctgaaaacaatcagaatcctgttctgttgcacagtggtggaggtttggcagccatgccggggctgctggccaagaacctttcattttgagtggtgtcagagcaagagaggtctgagtcccttcaggggcctgggaaacacagtgcctgaagcaccacagcttctctacaaatacttgtgaaatgaatgagtggagaattgtcaggtcactatacaggaatttggggacggggcccactctctggttcttgctgctatcccaagcatgtggtttgaggtggattaaagggagagggacctcttatgcttgctgttgccatacttttctgaaaagtacaaaggtctctagagttgatgggcagatatctaaatttccttgttgcagccttgttgctcagtcatctttttttgtgtgtgtgagcaacaaggctatttatttcacctgggtgcaggcgggctgagtccgaaaagagagtcagcgaagggagataggggtggggccgttttataagatttgggtaggtaaaggaaaattacagtcaaaggggggttgttctctggtgggcaagagtgggggtcacaaggtgctcagtgggggggagtttttgagccagatgagccaggaaaaggaatttcacaaggtaatgtcatcagttaaggcaaggacmggccattttcacttcttttgtggtggaatgtcatcagttaaggcaggaacaggccattttcacttcttttgtgattcttcagttacttcaggccatctgggtgtatacatgcaggtcacaggggatgcgatggcttggcttgggctcagaggcctgacattcctgccttcttatattaataagaaaaataacataaaatagtattgaagtgttggggcaaagaaaaaaatttttgggggggtggcatggagagataatgcgcagtgtttctcagggctgctcaagtgggattaggggcggtgtgggaacctagagtgggagagmttaagctgaaggaagattttgtggtaaggggtgatattgtggggttgttagaagaaacatttgtcgtgtagaattattggtgatggcctggatacggttttgtatgaattgaaaaagtaaatggaataagagaaggagaaaaacaggtattaaaggactaagaattgggaggacccaggacatctaattagagagtgcccaaggaggttcggcatagccctgccagcaaagattatttatttactttaagagggagttaagagtggcggtttggggatagcaccacgagatatcagctgtgacggcttggagaaacagtgtaaaccggtggtataaacaagagcagggcatttatgagtagttgagaacggtgaataggagtatgactagacagaagatagtagggatgacaagttttttggggtgcagtccaagttggtctggtgtctggaatgagactggggcttaataaaaaggagcgtctatacaggagcttaaatggctgtaccctgtagcattctgaggacaggcctgaattctgagaagggcaagtggtaaaagtattgtccagtcctttttaagttggtggctgagcttggtgaggtgtgtttttaaaagaccattagtccattctacctttcttgaagattgaggaccgtaaggggtatgaaggttccactgaataccaagagcctgagaaactgcttgggtgacttgacaagtaaaggccggtccactgtcggactgtatagaggtgggaaggccaaaccgaggaattatgtctgacagaagggaagaaatgaccgcagtggacttctcagaccctgtgggaaaggcctcttcctatcctgtgaaagtgtctacccagaccaagaggtattttagtttcctgacttggggcatgtgagtaaagtcaatttgccagtcctgggcgggggaaaaaccccgagcttgaggtgtaggkaagggagggggcctgagaaattcctgaggagtagtagaatagcagatggaacactgagaagtgatttccttgaggatagatttccacaatggaaaggaaatgagaggttctaagagactggctagtggcttgtaacctacatggaagaggttatgaaatgatgacagaatagaatgggcctgtgaggctggaaggagatattttccttggtctaagaaccatttgccttgtgtgggaagagattgataggtggaagtttcagcgggggactaggtgggagtgactaatgtgaaggagaaaaactgacygtgagggacagaagttggaacgctagctgcttttttagctaatttatcagcataagcattgtcctgagcgatgggatctgatgcctttttgatggcccttgcagtgaatgactccagcttcctctggaagtaaagcggctttgagaagcgtttttattaaagacgcattaatgatagaggacccttgtgtagtgaggaaacctcttgcatggtggtgcaggatatggaaggcatatatagagtcagtataaatactgacatgtagtccctttgcaagagtgagggtttgacttaaggcaatgagttcggcttgctgagaggtagtggagcggggcagagcggtagcctcaatgatagatgtgsaagatactatagcatagcctgcctttgctggtgagtggcgattaggcctggtggaactgctatcagtaaaccaagtgtgttcagggtgaggaacaggaaaaaaggaaatatggggaaatggggtgaatgtcaggtggatcagagagatacagtcatgggggtcaggtgtggtatccgtagtaatgtgggaggctggattgaagtctgggccagaaacaatggtaattgtgggagactcaacaaagagtgagtacagctgaaggagctggggaacagacagtatatgcgtcaggtgggagaaagaaaatagattttggaagttatgagaactgtagagagtgagttgagcatagtttgtgatttttagggcctctaaaagtattaaagcagtggcagccgctgcacgcagacatgagggctaggctaaaacagtaaggtcaagttgtttggacagaaaggctacagggcacggtcccggctcttgtgtaagaattctgactgcactaaccatgcctaggaaggaaaggagttgttgttttgtagaagggattgaggtttgggagattagtcagacttgatcagcagggagagcatgtgtgtttttatgagaattatgccgaaataggtaacagatgaggatgaaatttgggcttgactgaagtaatgggggctgtctgtgaagctttgcagcagtacagcccaggtaatttgctgagcctgatgggtgtcaggttcagtctaagtgaaagtgaagagaggctgggatgacgggtgcaaaggaatagtaaagaaagcatgtttgagattcagtccgtcatctttaagaagagctgggagatgaaataggaatataggtgaagggaataactttacataaggtctgcatcaatagccccagcgccacttttactgcttgtcaactgcgaacatgtatctcctttgtcacaacaactatggccttagtgacaatgaataactgtcattgttaacacctaatgctccttttgaactcgagatatggcacattttaatacagaaactagaaatgtttattttacaaatattttgtgattttaagatcggaaatgtttaaatcttgaaagcattttccctgatcctctgataaacagatatgaaaactttaatcacatgataaaagagatacgacatttcatttgacatcttcacttaaaataaaatgaggccatgtatacaaatgcatatccaagtttcagaataaacaagtaatgaatgtgaaaatataggaaaaggagtgaattgtctaccttgtagtttattatgcattcatggtaatttggtcttaaaagggaaccttggaattgtatgaatgttatagaaaaatgcgtagaagattattaattctatcattctcatcttttcaaaaattcaacctctttttagtagtactatgaaatcttaatttccgaagataggatttattaatattcaaagaaattattaagatccaaagataggattctcagttcatcagtgaggttggggaattattcttgctgttcttctaggatttggcttccagtatataactagagtatgattatccaaaaatttggtcaacagtgggagtaagaaggtatagagaatacagtagaaattgctagtaataagtgagagtgtgaccagtgagggatgtatttgcctcccaggattaaggtatgaggtgacttagtggttgctgctcttgattttggggcggtgggagtgatgtttagtcctggcctactgggtcatgcaataaaaatggtgcctgatgatgtctgtgggagaacaagatggcaaaaagagccagagttggtacaaactttacagcaaatttatttactactaaattctttcaaaattgggtaaaggcctttaacatgtccacaggtgactgtatctgaaaatgtggataataagaattatggaagtcccataaacccttctgagatagttccagagacaaacccaacttcaccagctgctgatggaactcaggtaacagttgccgactcctgaaataatgtgggatttggaaaaactttgggatgactgggtttttattamccttaagcaaacaagggagattctggaaggctcaaagatctcaagatgtgttgacagttaataaatataattttttaaaaagtcatagattgaaaaactttccaccaaataaagctacattctaacatcgagttgggaataatgttccttgtaacataggaggacatgtcacaaagaagaacaaatagacttctggatccagtatcttcagaccagagacatttaagttgagaaattgactcagtatgaataaagatttcacggtgtcaaagatacagatgaaagatccgtctgtgtgtgccgtgatttctctacagcatgcatctttattctttcaagctgttcttcgctctcctgctattacagatctttaccactagatggcactaatttttccattcatcatccatctattcattattggccaaccaatcatctaactaacgttattcccctcgatgtgtcagggatggtgtttaatactggagattgaaagaaaaaaatgccactagatggagcttcttaaacatgcctgcaggtcctttgcaattggtacactatttggtctgcaggaagaaattcaataaatatatttgatattaaactctgtattaatgtatatcattagttttaatgaatgcatwtgcagctataccagatatagctgtttgaatctggacaaactgttttacttctggggctagagtcctcaataatatttctcactgggggcgctattggcatattgagtgggacagttctttgtgctacaaaactgtcctatgcactcagggaatttcagtatttctggtccctgtccactaaattccagtagtgtctcccctaattcagtgtgaccccagaaatcacctcccctccccaacacatgtgcactcactcctggttgagaaccgctaggatctggaatgtctctgttctaagattctatgaccaattttgtgaagtaatgtaaagaaatgaaagtctaagagtagttggaaattttaccattttatacaatctttatttctcaaatttcatagtctataaacattgatatcttggtaacttggcagtctcattatcaccttaaacattggtttctgttctgctgatttaaatcaaaataaaatttgacctaaattgatgctgagaagagtctatatcaaggcttctgtacaccttctcaaattcccttatttcttcttctcatgtcacamacacacacacacacacacacacacacactcatacactcacagacatacataaatattgtctagaaaggaattttcagtttcagatttttcaagggactaaacattttttctttaagctrtattaaaaatggattttgaagattaattttccacagacacacggatgcttgaatgtcatatatytggtcctccaagcctgagtcaaccccaagctagtgccagatttattttatattttcaacattttttctcagtccatctctagtctagtgatcttcttcactaaatagacattttccccagctggtgcaggaaggggactgtggtggggaggctgtaacctctgatctgcatgtctgttatcagaaacaaaatgtaaactgacagtctctttcaaaggagagcagatcttcaccaattgtagtcctttctttctcttcccttttgtaataccttggttcctcctcttacttttttacattagtgaggctgagaccctctaaaatgtgtcttccatgttatgtccagggatctcactgtatttcttccctcctgggcactgagttaacagccagcatgctttaaaagcagtagaggcgcttgggtgagatcacctaggttgatttgaatatgccagagtcccacaaatgtatctttcatccataaatatgttgaaagactaacaattaaaaacatgggctgggcacggtggctcacacctgtaatcccagctctttgggaggccgaggtgggtggatcatgacatcaggagttcaagaccaacctggccaacatagtgaaaccccatctctactaaaaatgcaaaaattagctgagtgtggtggcatatgcctgtagtcccagctattcaggaggctgaggtgggaggattgcttgaacccgggaggcagaggttgtagtgggccgagactgtgacactgcactccagcctaggcgacagagtgagacttcatctcaaaaaaaaaaaaaaaaagattcagttctatcattttccaaaagttacattgatatgcataggatcccccaaggagacaaaaatgaaagtcaccgtccctttcctcttgttagtaattgcttaacttcaagttagccatttcattttgaagcaatgacatctaagagactttggcccgccccacttaactgtaagcgcccagaggcagggctctgacctgaatgtcttcatgttccccttgggggcactatgtacaaagcaggttctcacttgaatgtgggttaaagtgaagacctcttctacttctgtagccctgtgttccccactcctccacaggctggtcccctgctgtcacagagtaagagacaccccataaaacctgtgggctccctcagctcctgttgagagtaggctgtctgttcccttgtctcccaccaggtttttatctggcagtcagcatgacaggcaacttttcagtaaagcgtgggccacgcaccatggtccagggtgattatctttgggttctccagtttatgggcctctgggtcccctgagtaatcattacctgcccttctacctgcaagttagttgtataatcttgctgtgactcagcaagtataggataataagtgtacctacctctggggtttgttaaaaaaaatcagaaacttgtaaaactcttagaatagttcctgacacatagtaagcactcaataaatgttagatgtttttgttattattattgtgacacaggagggaatgatgaagggagaagggatactcttgagttgaccaaagaatgttactttagggaataagagttacagtttggctttgccatctccacccaattttcaggcagccccagaaatctctttttctccagatgcatcttgtgcatgtctgttttatgtgttctctctgtactgaggtaaccaggtgatttgcttgtagatactatggcacaaattctataatatataaatttgaagtcaaagaagtgtttaaaaccattcgattaaaagagcccagagtttcagttactgttcagggaccataggaggaattgaacaatttaccatatgggctgaatcacatggtcccaggtcccaaattgctttacccttcagtaagaagaaattttaaaactgagacaggaggaaaagaaacccacaaaataattccattactgagaggtttttgttttccccttttcatttaggtgacaaaatggaatctcttcaaacgaaaatctaaacaaactaccaactttgaaaatccaatctatgcacaggtaatttttaacaatttttcttagcacagacattttttcttagaaattatttgcttggttaaattggacacacacttagattattctgagcagagtggccacaartagtcttctttatgaaaaaccgtgtatggtgaccttgggggaataaatggctgattcctgttacattgtattcttagatrgagaacgagcaaaaggaaagtgttgctgcgacaccacctccatcaccttcgctccctgctaagcctaagcctccttcgagaagagacccaactccaacctattctgcaacagaagacacttttaaagacaccgcaaatcttgttaaagaagactctgaagtatagctataccagctatttagggaataattagaaacacacttttgcacatatattttttacaaacagatgaaaaaagttaacattcagtactttatgaaaaaaatatatttttccctgtttgcctatagttggaggtatcctgtgtgtctttttttacttatgccgtctcatatttttacaaataattatcacaatgtactatatgtatatctttgcactgaagttgtctgaaggtaatactataaatatattgtatatttgtaaattttggaaagattatcctgttactgaatttgctaataaagatgtctgctgatttggttggtgatcattatagtaaatgatccaacaagaaaaggaattgactggggacctttagccgtgtctaaagaagaggcaccactcatatttcctataaaattatctaggaaaggaatccaggccccgctcttgggtccatttttacacattagcacttaattaatgttcaatattacatgtcaatttgattaatggctatgttgataggggccactatgtgttgtatagacatctggacttgactgtagactcctcagataatacagaaggtaggaaaagcaattcagtttggcccttctgtgtgttggcattgtctaaccagaactctctgtttcatgtgtgttctctcactagctgccaagacaacatttttatttgtgatgtctatgaggaaatcccatatcattaagtgccagtgtcctgcattgagtttgtggttaattaaatgagctcttctgctgatggaccctggagcaatttctcccctcacctgacattcaaggtggtcacctgccctagtagttggagctcagtagctgaatttctgaaaccaaatctgtgtcttcataaaataaggtgcaaaaaaaaaaaataccagttaagtaaagcctcaactgggtttttgtttctatgaaaatatcattataatcactatttatttcctaagttgaacctgaatagaaagggaaaccattcttattaagctttttattaggccctgtggctaaatgtgtacatttatattaraatgtactgtacagtccagatcttttctttaattcttattggttttttttttttttttttttttagagatggagtcttgctatattgccaaggctgatcttgaagtcctgggctcaagtgatcctcccacctcagcctcctgagtggttggggttacgggcgtgagccactgtgcctggcttccagctctcctcttaaatagtgggtatagtctgcacaacaggaaccatggcaggaatatacactttcccatagcaaatagcatacctgactctctgtgctaatattgcacatttgttaaacaatgaatgaadggatggatggatggatggatgaatgratgaaacatatactactgattattttattccagagttctcaaaatatttgttgctgatattttgagtgctgactgtaattactttgattagataaacaactggaaataatgctgctgaaaaagttctaataaatgtgtattttatcagatgttttctgtgtgcttcataagccccagtcatgaatcagttgtattttgctgtgtaaaaagcttgaggctttgagtgctcttagtcacaccaattctgtaccactccttcttggaattgaatccagagcaatttgattgaaaatcaagcctctgcattcatttttttgtgtgtccatgatattctggggtaagttataggaaacaaataactctccagaaatgagaagttatcagagtcgcaggtaaccaccagtatagccagtccttgaatgctgtccatggctaaggcagagcagggaggaaaggtgcatattcctgtttctctaataactagcgttcccctaacagtcatttgtcaagaggacaatttcccagccagctccgttaagcatagggtatgggccatcttcccactgttaatctctctgagcctcagctgctgcctctataaaatagggggctcggttgtgagaccccagtgtgggagtgtaacccaacacccagcataaaatataccttcaatcaatggaagccatgactattatcatttatgaagtaaagggaaaatggaacagccatttgtgtgttttaaaaagttccttgggtcatttaacgaagagccttggttgaaaatgacgattctaaatagaaatggctgctctttcttttttagtggaggaggttacagaggtgaacaagattgtgtctgggcctttgaaaggattaacacgtatcttgtctataatgaggctgaagagcagatgataaaaagtttggtcttgctttactgtcatttgaaggtgataggaagggcagtaaacactcctgtacatagaaatgggaaaaggttgagaagacggaagtgcatattcacatcacagcacagggaactgaggcaccgctgaaataaatatacctttcccagattcctccaaggatcccgaggagttgtttgagtttgttgtatatattctggatatgagtcccctgtcaagtgaatagtttgcaaaaattttcttccatttaacaggtggtctcttcattttgttgattgtttcctttgctgtgcagaagctttttagtttatcataatcccatttgtctatttttggttctgtttcctgtgcttttgagttcttagtcataaattatttgcctataagaaagtccaggagagttttccctaggtttttttctaggatttttataattttgggtcttacttttaagtgtttaatccattttcagttaatttttgtagatggtgaaaagggtccagtttttttcttctgcatgcagctaccgattttcccagcaccatttattgaagaggatgtcctttcccccgtgtaggttcttgttagctttgtcaaagatcaattggctcttaaatatgtggctttatttctgggttctctattccattctgttggtctaggtgtctatttttataccaatatcatgccattttgattactatagccttgtagtcaggtagcgtaatgcctccaactttgttctttttgctcaggattgtcttggctattcgagctcttttttttggttccatttttaaattttttttctaactgtgaagaatggtattggtattttgatggggattgtgttgattctgtatattgctttggacaatatagtcattttaacaatattaattcttccaacccataagcatggagtatttcgccatttgtttgtgtcctcttcaatttatttcatcagtgttttgtagtttttcttgtagagatttttcacctccttaaatttattcctaggtattttttttgtagctattgccttcttgatttttttttctcggctagctcattattggtatatagaaatgctactgatttttgtatgttaattttgtatcctgctacttgattaaattcatttatcaaacctaggagtttttttggtggagtctttagattattctggatagaagatcatattatcatcaaagagggacaatttgacttcctcttttacaatttggatgccttttatttctttctcttgtctgattgctctagctaagacttccagtactatgctgaattggttaaaagtgggcatacttatcttgttccagttcttagagaaaattctttcaacttttctccattcagcacaacgttatctgtggatttatcatatatgttttttattattttgaggtattcctagtttgttgagagttttcattctgaagggatgttgaattttatccaacgttcttttctgcatctattgagatgatcatatggttttgttattcattctgttaatgtgatgtatcatgtttattgatttgcatgtgttgaaccatctttgcatccctggtgtaaatcccactggatcttggtgtattatctttttaatgtgctgttggattcagtttgctagtattttattgaggatttctgcatctgtgttcatcagggatattggtctgtggttttcttttttttgttgtgtccttgtctggtttggggatcagggtgatgctggccttatagaatgaattagggagagttccctcttttttggaatcatttcagagggattggtattagttcttctttgtacgttgggtagaattcagctgtgaatctatccagtcctggacttttctttattgggagactttttattatggattcaatcttgctactttttattgatctgctcaggttttctgtttcttcctgatacaatcttggtaggtagtgtgtttccaggaatttatctatttcctagattttccagtttgtcagcatatagttgttcataatagtttctgatgatcttttgtatttctatggtatcagttgtaatgtcttctttttcatttctgattttgtgtatttgggtcttttcttggttagtcttgccagtggtttatccattttgtttatatttttgaagagcaactttcattttgttaatgatttgtatttctttaagcctctatttcatttagttctgttctgatctttattatttcttttcttttgttcatttggggtttggtttgttcttccttttctagttccttcaggtgcgttgttaggttgttagtttgtaatttttctacctttttgatgtaggcatttaatgctataaacttctcttttaacactgcttttgctgtgtcccacagattttgatatgttgtgtttccattttcatttgtttcaagaaatgtttttatttccttcttaatttctttatttacccagtggtcactcaggagcatgttatttaattcccatgtatttgtatagtttccaaaattcctcctggtactgatttctagttttactccagtgtactctgagaagatacttgatataattttgatttttaagaatttgttgatacttgttttgtggagtaacatatggtctattctgaagaatgttccatgtattgatgaaaagattgtatattctgtaattattggatagaatgttctgtaaatgtctgttaggtccatttggtctaaagtccagtttacatttaatgcttctttgttgactttctgtctaaatgatctgtttaatagagtgggatgttgaaatcccccactattattgtactgcactctatctctttatatctagtaatatttgcttcatgaatctggctgctccagagttggatgcatgtctgtttagaattgttatgccctcttgctggattgatccctttatcaacatataatgacctcctttgttttttatttttgtttctgttttttactgttcttgccttaaggtctattttatctgatataagcataatactcctgcttgcttttggtttccgtttgcatggaatatgtctttccatccctttactttcagtctatatgtgtctttactggtacagtgagtttcttataagcaacatatagttggatcatgtttttaaatccattcagccattatattttcggaatttaatttttttatgttcaaaattattattgatatgtgaagctccattcgttcctgtcatattgttagttgttttctggttgttgtaaatattctttgttctttactttttctcatattgattgtcattgtagtttggtgaatttctgtagtggtaccattgagtcctttttcttccttctttatgtgattactttaccagtgaattttatatgtttgtgtgttttcatgatggtaaatattgtcttttcacctccaggtttagaactcccttgagtatttcttataggtccagtccagtctagtggtaaacaaattctctcagcatttgctgtgtgggaaagactttatttcttcttcatttatgaagtgcaattttgctggaaattgtatcctcggctggcaggtttttgtttttttgttttttttctttcagcactttgagtatgccatcccattctcttctggcctgttaggtttctgctgagacatctgctgttagtctgctgagggttactagatagattactagatggttttctcttgctgtatttagtattcactctttacctttgactctaaacagactgaatataatgtgccattgagaagactgttttgccttgtgtgtttttggggattactgagtctgctgtaactgaatgactaaatctcttgctagacttgggaagttttcatctactcattaaataggttttctaatcctttgtctctttgcccttgaggataccaataatgcaaatattcaattgctttatgttgccccaaatattacaaagattttgtttattcttttaaaattcttttttctttatttttgcataactggattatttcaaaagggattctgagataatgagattctttcttctgcctgatctagtatactgttgaagctttcaaatgtattgcgagcttttgtatttccttcaatgaatttttcccttccagaatttctatttggttattttaaaaaatgtattttttggttaaatttctcattcatatcctgaattcttttctgatttttttttgtattgtttttcagaattctcttgtatctcactgagcttctttaaatcaatgtttaaaattctttatctggaatttcaaaaatttctttttgattaaaatctattgctagagaattattgtgttcctctggaggtgtcatattttcttgctttttcatgtttcctgggtccttatgttgctatctgatgtgatggttggtgtaacagttgtttcttctcatttttgaatttacttttgcaggggaggactttttctgaagttgcatctatggagttgcttgggtaggatacgttggctttgattctgagtgcatgctgtagtgtagtctctgtatgatttatttgactgtaaacagcatagtagtatctgtgctttccttagtgagttagggtgtggttattactgaaggctgtggtgaagttgtgttgggggactagcatgccgtgtgtgccaatattcaggccccaatggtggcagctgtgggctgaatatgcctatattttagccccaaggtggtgtacaatggtgcctgtgttcatggttactggtgggccaattcttaggcttccaaatggcttgcttagattccagtagtggcagcgatggaccaggtgagtgggtgggttctcaggcaccttggacagctgacatggcataggtgatagcagtagcagaggtaaggtgattctctgggtcacaggcagtatgcattgatgttggtggtggctccaatggactgggcaggccagtctccaggcctgcatgtggactttgctggttagcaccagctgaggtggtag

SEQ ID NO: 5622 - DNA, 41662 bp, Homo sapiens
gaatcatcagcaccctacggaaaattgttagaaaagcaaattctcaaagcacatcccagacttactgaatcagaaagactaaaggcgggactctgcaaatttagttctaattagatttccaagtgatacttatgcatgttaaaatatgggaagcactattttactctgtcaaagcaaatactgagttttatttaggcaaacaataatttatatggtatctggatgttttctaattaaagatggtacctttcatcagagactataataaaatgaaaatgaagacaattaaaacaaaataaagaacccaaaagctgtaaacaccacacagactatgaaaagatgagaatttactgtagcaagtgagatttcaacaaatttgagaaaatggaagggagaggcaaaagtgaaactgattttgcaagactcagaaagtcacaacctaaagtgtgtaaaaaggaaaataagattcaggagatccaccttaactccacagaaatccaaagaggctgaggacttagtggtgtcaaataaaaagacaaagttataaattagcaagtaaattgaggatgcttgaaggtctattcacaagccaattcacccagcctaacttactacctccacaaagagaatgtggtaccaccctaagcaaaggatagatttcttctgtgtaaaattggcagaaaagttttgggattcaaaatacactattcatcagggaaggagaggttgaaaaatatagaaaatgaaagctactggatttctactgtctcctgcccttttgcagcagaagtccattagtcaggaaggtaaacccaaagcaaatgcttaccctgtggcaggcaccaccctaaaccttttatgtattttaactttctgaagtttcaaaaaatgttatgaagtagatactattactaccctcatttatagatttcaaaaagaggcacggaggctgtcaggtaactttcatgaggtcacagggatggtaagttgaagagaaagagatcaaacctaggtggttcagttttccctcttcctttttccaccatgttttctcaatttctttttccaccttcctgttctctcctctcacttctcttagtaaatcttcaaacatgtgttaaccttggttagcaagataatgggaataaaactagggagtgaaaaggacaagatttcacttcttttctgcatttgcagctttattgtttggaaaaaaatcacattacttttgtaaataacaaattttaaaggaaaataattattccttcagttcaataaatatttatttattacatgtctctatgccagctgcagggctggaaaaataaacattctaaacaaatctggttggtttgatttcaaaacatatttaaaatatcatttggtatagtcccatttatttatttttgttcttgtagcctgagcttttggtgtgatagtcaagaaatctttggcaaggtaaatgtcaaggagcttttctcttatattttcttccaggagtttaacggtttgaggtcttacatgtaggtcttttatccattttgtttttgatttgtttgtgtggtgtaagacaacagttcaatttcattcttttgtatgtgaaaatccagtcttcccagcaccatttattcaagagaccatcctttcctcattgtgttctcttggggcccttgtgaaaaattagttgaccgtgtatgtttggatttatttctgagctattttgttccattggtctacatatctgtttttatgtcagtgccattctgttttatataaatttgtaatataatttttaattaggaagtgttatttctccagcttcaatttttttctcagaattgctttggctatttgaggtcttttgtggtttcatacaaatttgcattgaatctatatattactttgggtagtatgaacattttaacaatattatttctacatcaaaccaaaaacttctgcatggcaaaggaaacaatcaacgaaatgaaatggcaacctatagattggaaaaatatatatctgcaaatcatgttctcagaaaagggttgagtttccaagatttataaagaacttatacaactcaatagcaagaaaacatataacccaatttaaaaatgggaaatggacttgaatagacacttcttcaaaaatgacataaaaatagccaacaggtatatgaaaatgtgcccagcatcactattcatcagaaaaatgcaaatcaaaatcactatgagatactacgtcatacctgttaggattggtattatcaaaaagacaagagataacaagtgtcggcaagggtgtagagaaaagagaatccttgtacactgtaggtgggaatgtaggctggtgcagccgttatggaaaacagtacggaggttcctacagaaattaaaagtagaactaccatatgacccagaaatccctcttctgggtatataccaaaagcaaatgaaatcaccgtctcctgaagatagccgcactcccatgttcattgcagcattattcagaatagccaagataatagaaataatctaggtgtccatcaatagacaactgtataaataaagatacatatattccatgttgtgtgtatacacacacacagatacacacaaaatagaatattactcagccttataaaagaaggaaattctgccaggtgctatcacatggatggacctggaaggcattatgctaaatgaaataagccagacacagaaagaaaaattttgcacaatctcacttatatgaaattaagaaaaggtcaaatatatacaatagtggtttatagcaggggtccccaagccccaggccacggacctgcacatgtgagggatctaggtgcatatttcttaggagaatctaatgcctgattatctgaggtggagctcaggcagtgatgctagcatcgggcagcagcggcaaatacagattaacattagcagagagttttgactgcacagagaccataataaatacattgattgcagactcatatcaaaaccctatcagtgaggggcaaatgacaagtgacaattaagctgtgtctggaggcaggctttatagtggaaaattgatgtacttcaattgtacagttgcatctggtggcaggctttaagtcagaatccaacacttattttagtctgtgcatggcccacccattattttaccacttccatctgcacctcttttccacactgtgcacttgtcttagtcacagttttgctaagcccacaagctaacccttgtgaaaaacaagggtttttgttaaaaaaaagtttttgttaaaaacatcaaagtgagtgaaaaacaaacatcactggacagcttctttgaaaatggggaaaaacccaaaggtgagataacagaagactctaagactgctaacaaaaagaaagctgcacttaaaggaaaatgccaagagtcctacttaaattacaggttcactgcaacaggtggttcacattctccaatcctgctttgtataatatgtggtgaccaactgcccaatgaagccatgaaacctgcaaaactactttgccacatggagaccaagcactctgcattaaaagacaagcctttggagttttttgttttgttttgtttaaaaaaaaaacagaaaccatgaaaccatgaacacaaagaacacatagaagcaattattgaaggccaccatgtcatcaaatgtgtctgcactgagagcatcattcatagtggctaactgcattgctaaagctaagaagccctttactattggtgaagaattgatcctgcctgctgctaaggacatttgttgggaacttttaggagaggctgcagttcaaaaaatagcacatattcctcttctggctagcaccataactagatgaattgatgaaatagcagagaatatcgaggtacaattgttagagaggattaatgagtcaccattaatcctctctagcaattggtatgcaatccaggttgatgagtctactgatattgacaacaaagcaacaatgcttttttgtgtgtgatatatttttcaggaagatgtgcacaaggatatattatgtgaatttttgttgccaatcaaaaccacagctgaagaactatttgtctttgaatgattacatatcaagaaaactgaattggttattttgtgtaggtatatgcatggaaggagtggctgccatgactggatggctttctggtttcactactctggtcaaagagaccagaatgtgagtctatgcactgtgtcatccacagaaaaatgctggctagctgaaaaatgttacctgaacttaacaatgttttgcaggatgtgacaaaaataatcaaccacattaaagtacattttcttaactcacatctgtttgtgcagctctgtgaggagatggacactgggcatgcatgtcttctcttatacacagaaatgagatggctttctaaaagtagatcactggctgaaatttttgaattatgagagctgctccagagatttattttagaaaatcagtcaccattggcggcacatttcagtgacacagaaagggttgcaaaacttgcttacttgtgtgatgtattcaactcgatctatgaactcaacttgtcgcttcaggagagaaggacaactgtgttcaaggaagcagataaattggttgcattgaaagccaaactggaattatgggggcaacgaatgaacattgagatttttgacatgtttcaaacattagcagagattttgaagaagactgagccagcagcttctttctctcagctgatgcatgatcacctatcttagctttcaaaagagttcgagcattactacccaaccacaaaagaaccctgaactgggaatgaatgtatccatgacccatttgtgagtaagtcaggtgaatcgattttgtccgtactagaagaggatcaattgcttgagatcacaaatgatggtggccttaaaagtatgtttgagacagcttcaaatcccatgttctggattaaactcaaggtgggatatcctgagattgccacaaaagcactgaagagtctgcttccatttccaacatgctatctttgtgaagcaggattttctgcagtgacagcaaccaaaacaagattacggagtagactggacataagcaacacacttctggtgtcactgtctcccaccgttcccagatgggaccttctaattgcaggaaaacaaggtcagggctcccactgattccacattatggtgagttgtataattattttattatatattacaatgtaataataatagaagtaaagtgcgcaatacacgtaatgtgcttgaatcatcctgaaaccgtctgccacccggccctggtccatggaaaaatcctcttccgtgaaactggtccctggtgccaaaaaggttggggaccactggtttatccagggtcatccaggttggagtggggtcaggagaaatggggaaatttaggtaaaagtatacaaagttacaaacacgtaggatgaacaaatgggaagacctaatgtacaacatgagggctatagttaatgatagtggtattcaggatttatgctaaataagtagattatagctgctcttgccccaaggggggaaatgtgtaattataggagttgatggatatgtcatacaaataacttaaatacacagaataaaaactattttagtttaaaaaggaacaatatttataaaaaaataaagtgagctcgaaaacattcaaataactgcttaaaaattaaaaagtaatatcacataatttaatagaaggaaagaaagagcaagacagcaagaaagaaaaggcaccataaagaaaaacaattttggcccctcctcatttgtagtcttaagctgcctctactccctcgccttgaaaagccacgggcttccgagggatggaggtcaaagccagagtaaagaaagttcccgggggaggccactccccagctgatgactttccagttccagttagtgtcggagtcccagttcctctccttaaccaccggacaaacgtctctggagtctctccaatgagcaagaaagcaagtcgggggtaggggaggggcctcacaccagggggtgggcgcagtccctcctccagctccttcaccctccagtagtctcgtgggtccccgagcgccagcgcgggaaccgggaaaaggaaaccgtgttgtgtacgtaagattcaggaaacgaaaccaggagccgcgggtgttggcgcaaaggttactcccagacccttttccggctgacttctgagaaggttgcgcagcagctgtgcccgrcagtctagaggcgcagaagaggaagccatcgcctggccccggctctctggaccttgtctcgctcgggagcggaaacagcggcagccagaggtgcgcgggcggctttctctgccgcctcctggggacttgggcgcgggaactgcgcggagcctgcgctggggccagggccggggtcaggtgtggagggcaacttgtggggaaccggcgcgagggcccgcaggttgtgtttgctgctctgggggtggaggatgtggggtgaaggttggggccagaaatgcaagaggcctctgaaagggaccctggaagtggagcaggtacacggcaaggggccccaggcggcccagcggcacccgggctcaccccagaaccattcgaatgacaaggggtgccctgcctgaaaacgccttgcggggctcagcttccccttagctacactgctttacaggtagagagcggccctgaatcctgggtagagtctgggctcaggagcatgtgccagcgtagtggggctattagaaggaatggttaatacagcctgcaagctgtcatttatcagtaagtattcaatgaagtccgccggagcccacatctatgctaggccctctacaataccagcttaggaaagatagtggcggtatctagcacggttcctaagaccattagctccagtcaggctccccgactttaaattcggcctctactgcttcacgtctgtggactgtcagccactttcttcttatatatgttctttccattgcctcatctctgaaattgtgtaactattaaatgagctacagagtattaatgtaaaattcttagagcagtgcctggcgctacagraagtactcagtgaaagttagctcttattattttaaatatttgacaaagttcctgcttctccaagctgattctctggttcccaggtggtttcattcatgcactgttattcctggaagtcttggcatggccacttcccagttccaggaacaggcagtcgttgttttttctggcttatcacattgagatacatggttactacaagtgacacttaaacgtgtcagrcartttgggggctcccttcttgaactttttctaagagcaaacctttgtcttaatgccaccctgtttacaacaatagtagggctttgaacaatgagaaaatgcggggaaatgaaaaagacatataaagggaaagagtggatttatgcaattggatagaaaagtggcatgtaaaatagctggtttatagatcaaactgcctttagatctgtaaaggagcttagagtacatacaggtggagagacatcaratgtgtgtgagcagacccttatgtacttctccatcttcatctctaagactgtctccctcttttgctctgtaacctcactcgtcttcctttacttgaatgagggacgttcctccagctcaggaattctacctatgaagttccctctatctatgatgccctccaacaccccacccaccatacctccatagaytagttgatttgagacttccttcatctcctagtctgacttttcttaaaccccctaccaccatctaagttagtgccccataaccctttcttatagcaacattaattttatttatagcasttagagtatttttaataatatatttaattcttaattgtctgtctcccctagtgtctaggtattgtgctctagtgcctggtatagtgccttgcatgctctatgccttcaattaattccttwaaaaccacacaagctttatatttagtgaatatttatataggaagaatttctatgtgtatatatgtgtatctgtgtatatacacactgtattgcactgccctgaatagtgctaaattaaaaaaccaaaacactttttaatcasaacttaatagttgcactcttcaattttccatatgttcttttaagaagtgattagaaaaaaatgatgtctccatatgttgtctgctgctgtaaaagaatacctgagacttggtaatttataaaggacagaaatttatttcytacagttctggaggctaggaagtccaacataatcatgtgttgcttaaatacaggaatacattctgagaaatgcatcatgaggcaattttgtggttgtgagaacgtcatagaatttacttacacaatcctggatactatagccagcctactatttaggctggggtggtggggttgggggtgttgaggagagtcagattgagagctgagggaagtctcaaatcaactagtctatagacgtgtgggtgagtgggttggtggagggcattatagacagagggaacctcacaggtagaagtcctgggctggagggaacttggctcattcaagaaaaggaatgaccagtgaggtggcagatagcctactagacctagactgtgtggaataaggtgttgctcctaggctagaaacctgtatagcatgtactactgtaatgaatactgtatgcaagtataatacaatgtcaagtatttatgtatctaaacatagaaagggtacagtaaaaataatcttatgggaccaccatcatatatgtgatctgttgttgtggtgcatgactgtatggaggcaccagcatcttgtgagggtcttcttactgcatcatcccatggtggaaagtggaagggcaagacagcaagagagagtggaacttgatttccttacaagcctactctggcaataacaaacccactcccaagataacgacattaatctattcatgaaggtagagtgcttataaactaatcatattttattaggctccacytcccaacactgttgcattggaaattaagtttccaacacatgaacttagctcacacattctaaccatagcacctggcctagttaaagctaagtggcacaagagtaaattgaaattcaagccttttctgtcttacataagaaagataaccttaaaagagtcttttaacaaatttcactgaaggatgtcagtcttccttttttcagtgaattagagacatcggtgcaaagaatatgaattattaatcatcttaattcagctagttagcaagctgtatcacatttattaaaatcacttttatttctatgggtttagtttcaccatttattaggaggaaaggaagcaaatttgtgagggagctctgggttgtcaggaaaggcttttcagagtagtaaagcaatcaaatgagaataactgattcagtatttgtttcctttgtctctttggtttactttttagttttgtagaacacttgatcactaccatctcacttggtcctagttgatgtatcatctacatttttattcaaggtttaatataaaatgctataaaaggctatcctaaactggttttaagcatatttrttttgtttgttcagcataaaatacacaagaggatttttatggaatgrctccttgttacaaggtactttgcatttataatcagccacagtcacctcagtttcatcccgtatcttacaagtatgatgtgcygtatactcaaagcctcaccacctgcttgccccacccatttgcttaaatgtatcaattttttctaagcttaacttttaccaaaactggagttcaacagatgaatatttttccttcttagatgttaactaaacatttttaaaggtacaaaatttaygtacaaacataacccaaatgacatggaakttacttgatttgtgacttacctctgtaatgttcccctggcctacttgaaattcctaccttycctctagtctagtrtcttattctcagttattcggaggaagttagggacctagaattcttgttttcagagcagtagaattttgctaacataattcaaaacatttatccctatcttggggcttgaagagaatgtgaaatgctttatcytctgttttgagggaatgagggaaggagcttgttcttaggcaattaacaagtaaatttaaataaataatccaaatctggtgtgggtaaacaaattttagttttaggaactttcaaaattaagtatgcttcccctttgggttccagattttacagtaatactttttgaaagcagtaagataaaaatttcaggacctcaagagatgggtcaaaagagtttcactgtaatatgaattttgaagccagaactggaaatcccctgtgctgtgtcttcctcttcgtggtagtagaggttacagttatcaaatagtccagagaagcaatgggaacttatgatttctgatagaaaaattttaacagagatgtacttgtatgcaaataatatatgatgcctcagtttcctccaaagtcttagttaacagagttagaaaaaatcagattatatttgaagttctgtgttcatactggagtaattattattccaatggtacaatatacaacataactttattacattttttggtacagcataaagatgattttccctttctctgagtatttctgaaatttaaaatgaaataagtgtggtagaagccattatttatgaattatcatgctaaattaattaactcattaattcattsagggcacacccagttattccccaaactgagtgatgtatttctgggaatagacttattaagcttgagaaaacccaaaggatcattataacagcaaacaggaatgtaggcatccacatagtggatgactttagtgacctggcacacagtgccttatctacttrgcacatgtacaggtacaaggaacacttaacattttgcaccagagcttattacataccaytttcaatgcttgagatattatataaatgctaaaattctaaaacctatagtaaagcaaagacccagattttatactgcagtagttttgccagtaagtctcatcctcactaacttatcttttaagattaaaaataatgtaaccaagtgggaagaaaaagagcaaatatgaacaaattgtcattgttttagaatctgcttcttttcctttcyggtatttctgtgcaaggagagaatgatctctgaccttgtgaaaggcaaataccatgtgtattcatggttgttattcatttggcaasgacttgaaactcatgacactccctgctgaagatcctccacctattcttaacagctgggctccccagctcctggatcaccaaccagtaccagtctgtggcctgttaggaactgggcttgtacagcaggagctgagcagctggagagtgagcaaagtttcatctgtattgacagctgctccccatcgctcacatacattaccacctgagctcaacctcctgtcagatcagcagtggcattagattctcataggagcaagaaccctattgtgaactgcatgtgtgagggatctaggttgcgcactccttatgagaatctaatgcctgatgatcggtcactgtctcccatcacccccacatgggactgtctagttgcgggaaaacaagctcagggctcccactgattctaccttataatgaattgtataatccttttgttatatattacaatgtaataataatagaaataaagtgcacaataaatgtaatgcgcttgaatcatcccaaaaccatcccctgcttcactggtccatgtcttccacaaaaccggtccctggtgccaaaaaggttggggaccactgtttaccaggatgcatagcatgggtttatgaattccctatctttgcagcacatcctttatttctggcttgcatgggacttgaaagcctaaaacaactaaatgctaagaaaaattatttttaaaatgatgacaaaaatattttctatttcagatgtatagatctgcaatccagaaactatgaatttttttcagttgagtagtctgtttgccaaaaaataaaaaaaaataaaaaataaaaacttgcctaagtktcttctcttacattttatttaggatttgcccttagacattatttagtgcttttctgaccctgtagggamggtgagaataattgaaacactagtttcttaaaatttctgttaaaattggttaaaggccatagaattttttttttaagctaagcatgttatagagaggtatcctataagaagcaaggggcaggtaaagmctttagagatgtatagtccagtgtgttaattaaaggatactacctacttctaattcggtatgtattaatcttttctgatatatctgttaaagtactcttcgcatatttttaaaaaaytggcattttaaagtatagtctttgatggtagaaatgtgagattgacaaaaatcatgtcctcttatgtatgaatttagtcttacacagttcttcatatgwtggaatctaaaacaaatgtagtcttgaaaacttttagtctactttggttacatgtgtttattattgctcaccttatagattaacagcagaaaagtataaattttaatatttctacctttctggcttgaggtctacagcattaatttctgaccagttaatgcaaactgagattcctattgtcctaagaaaatctgggaagttagtaacacaaacacatcttttgatttatttcaggaccacataaacccattttgaattattcaaccattgctgaacttcttgagtatgtataattaagagttgactataattggaatgttcttaagactttaagttgattataaaattttgtgcttaaagttggcaataatcaaaacaaaacaaacaaacaaaaaaaaccctttattttraaacacagtcttgctctgtcacccaggctggaatgcagtgatgacatcatacttcattagascgtcaatattccaggctcaagcaatcctcccacctcaacctcccgagtagttgggactacaagcgcatgccaccatgcttggctaatttttttttagtagagacagtgtctgtccatgttgcccaggctgrtctcaaacttctggactcaagtgatcctcctgcctcagcttcccaaaatactggcattataggcataagccaccatccctggccaaaaaataattctgaaacagcaaggaggaaggcggtttcttcttgggaagtcttgattttagttgagcatgtagagggatcacttgacttattaaccacttaggattgcacagtaagataatttaaagggtagccagcactggagtgggcctgggaaggggatgggcagtttgtgttagtgtgygtgggtccaagataaaaatgttgggtagcagagttttgcctaatgcattgtcgctaaaagggatgaagggcatcgggatctacaggagatggaaaaagtagtgacaggatagtagtgggaaaaactaggatcggatcaaggcactggaaggcagaaatattgagtagaatgtttgctgcaatttatgtttctgtataaataccgagtacaaagtttcacttgggtggtcaaggtgctatggctgtgacaactcctgagagtgggttttctggttaaaaaaaaaaaaaaatctctgaatgcacggagtcgtctcaggccttctcaaatttgcaaagaacaggtccacaagacctacattycccaagataattgcagtagtgtgacctgataattaacattttttgctttcctgctggaacattcctggggcccagagactgggccaagcatttccagtccaaagactgggaactgaaccaagcatttcctttagattgttcaagttgtgaaggttgatgttattagcttggttactacttggagtcttagctcatagtgtgtctttatggctttctgcctcactggaccctcttcccaaaaggctttagaatgtgttcaccatcatgagctgaccaacaatttctaaattcctactcagaaacacagcaaggggaatgcagtcaagcacaaagggyttaaatgamcagataaggctgsgctggatgaataaagaggaatatcctatgaatgtgactgtgtagttttagagtatccckattcaactgttatatttgacttgtggccttgtagacagtgtgttaatgtcagatcttctttttcagaactgttttaatcatggacaaacaaagtaagtaatttattttaaatgtttactttcctccttataatgttaatctgttggtaacttgttatttgtcataatgttttattcagtgtctgaaagtgtataatttgttttctgttgtttatgctccagaatacaatgtctagttcagtattttgactatagagaagatgtacaaaaatagcactatcactaggttcttcattaaaaatacgaaagccttttggaaagctaagaaatgctagatttattgggaaatatgttctgtaacatatatttaaaccacaacaatattctctttgtgtattttatatgtataaagattattcaagtcatactaattaacagataataagatttgagttcattgtaataaactcctcagatacacacctcaatgtatatttcatcacagacacatgtttgtattttaagtaaataccagtcattatgttctggctttttttctctcaagaaaattctaagtaagatggatatttatcaagcaagtaataaaagactgtcttattaagatatcaaggttctgaagaacagagggaaaattatgttcaaaattcccactacatagggaaaattaaattcaaaaattaaatcctgtttttctgaaacgcttttctttattctctctttcatctttgttgaggtaacaaaaaaatatttatctgtcactacagtgtcacccttattagatatatgaaataatctccaggactagactccttgcttttcccatgtgaagttttatgattttctttttacttacaaaactcaaagctttttaaatgtaaatttatatagaattatactggtttatttgccacagactttaagttgattccactcaatttacaaaaatgtatctggtgatggtcataggcaacttttaactcttcagttttgtatatataattgtatgtatgtatgaatgtatttgcataaatagaaataaaatgtgtatatgtgtgtgaataaatgtgtaaatatgtatatatacatacatgtagacataaaaaaaagtacctttaagacaatgtgatagacttgtacttcttataagccattttaagttgcatttcaaaaacgcagtaatcaaaccataattaacatgctctttgttctgcttgaacacctgcccattcactcattctccttgtatgaattccccctggaatgcctgaaatcagaatcattgctttggtaccaaaagcccagagattgtgagctcatgatttcttgagtctgtctgttcctgtatatgtgtgtgtgtgtgtgttctatgttatagtattcaaacaatgttgcttattaagaggtatcacaatgtgacatacctgtcaagggtagatctttacttcagacttgcaaaatattttcttgaaatctattctgagtctgatgctgtgtttccaacttaatttgggagtaggggctgcaggcagggccttattagctagagaactagggagttaggtcagtcacttgatgctgagaaatagaagagaatggatgggaaagaatgatggggagtttcagagatttgtgatgattcacaaatcacaaggtatgttgcaatgttygtccagggaaaagtcctcatttgttttttgttgttgttttgtgttatttatttatttatttatttatttgagatggagtctcgctctgtcgcccaggctggagtgcagtggcacgatctcggctcactgcaacctccgcctcccgggtttaagtgattctcctgcctcagcctcctgagttgctgggactacaggcgcgtgccaccatgcctggctaatttttgtatttttagtagagatggggtttcattttgttggccaggctagtcttgaasgagtaggagagcggtttttttgcctgattttacacaatcaccatggactggattccgctgaagtcatcatgaagctatttatgaaggagaaaggccggggcagggggtgggggaaacaatccaatcttcctgataaaaccacacgattcacaagttgagtggtctttgaaagttcataatagagacacatacagaaaaatgtgttacagtgaaagtttgacctatatgttcttctatattgatgccatgtctccatgattctaaaacaaaagactttgaatttacagttagtaattcataaggaaacagataaggagataagtgtagtgtctactgcaccttaagctgtatgaaagcagagccattgtagccacagagcctaattcaagggtgacacaggacatgctcagtaaatatttagagactggctgcggtaggtaaccgaatgactagatagacatgaatattaatatttaggaggttgaaccatttgtgcatatattaagtttactcaagccttattagcaaataacaaagtttaatatgctagtgtattgtaattaaacatggcttttgtgggtcaaaaacagtcatatttggggaatttcatatggttcaacttcattggtgtagttccagagtaagcataacatatataaatactgaagtatattcattattttaaatatttaaaataatacttayagcaatgatgatagatatctttaaaatcatccataattctaccatcttcacatcccattaatttcatttatctctttcttcgtagtctgtatgtaattttaaagctatctttgttttattatcaacaaaacatggaactgaacattcatcagggatgtttcaaaaactggtaattcagccccagtaacttaactgtctcattttatctaaaggaraatttgtttgaaacaaatttgctagttgcaaattagctctgagaacaggcacagcttacgttaagtgaaaattttactttccctatttcaatacagcataagamcayacaagttacaattatctaagtacaatacattgtttctttctaatatatattttatttaatcagacatctatttacctctccttgaattgcagactcacagatgaatgcttctcacccggaaacaaacttgccagttgggtatcctcctcagtatccaccgacagcattccaaggtaaagcagttgctgaaagaagaaaaagtaaaattaattgagagacagagagagagagtgagagtgggagagagagagtaagagagagagagaattgtgcatttgtttttattttagtagttctttttttaaaattatattaatgaaattttggcagcctagttgttcttgattatttttatttggctatcattttgcacagaagtaatttttatttatagaggacagtaaaggtataaagaaagctagtaaaaacaacattaggtttacatttagcaaatgaaatacaagactgtacatcctaaaatacaaatgttaagtaaaatattttattgatcctccatctgttctgaaaattatgatcatttaatcacatttaggaaatttatttctgataaactgagtcatgtagtagcttggcatgtgttcagtgagagtcacatcaaaatagtaagactgcttaaaactgaaagtaatagaaattcagttacctgggaataattctcattttaattttataatgtatatgaaagctttatttttatatatatgctgattccaccctgtatttctaagaaaagtaattgagtcatttgactacatacataattgagtacattttttcttttcaaccaatgcctgaaagaattcagagattttcatttaggcaaatgcagttatcaaaactactagaactttaaaaatagcaaagtccatggcatgtccagatttacaagcagacaggctacccacatcttgaaagagcatcctgaggatttaggaccaaagggaatgtggtttggatagaaggatgtacccactgtgttttcttctctgagtaaacaaatgtgcttaggagctgaatgtcatgtttaattgcctagcaagaaacctccctgcgggtcccggatctcatccagatgtttgcaactgaaagaatatgagctagataagctcagactctcaagtggtggctcatggcaaccttgtctgcactgaagtatcatcacccagaagcacttaaaaatagtagtgcaaaggcactattccagaaaaattaaatcatagcttccagtggtgggactcaaggaatagtaatcttttaacaccccaagtgattctaaggtgaagccagggttgagaacatctgctctaaattcttatagggttggtgtttgaaaaatcattagtaagtctataatattcatccaaggcacttaagagaatgatttaatccaccctatcactaattaaaagtagatatacataaataatacagttcagatataatcagacttgagagtttgtttatatatatagatatatatggctctacagcttgattttgtttctcaagtccaagattacatatagcacaagtcttaagataacgatgctaagagtaaggataatttaaaattgagatcttaccatgctttagtcattgttttaaatgtggagttaatgtggactaacacttttaattcttagaatactcttatgaggtaaatactgtcagttatccccattatgtatgtgggaaagctgaggcataggaagtttgtatcaggcttcaagttctgcctactttaaaaaaaaaattcgtataggtaaatgtgctggtaaaccaggttctgccttctgtactaatagttatgtggtagtttaaacaagttgcagtacctcaaagcctcagagttcctatctataaataagggtgatattttcaatgtaggttgctttgtagagtaaatgagagtatatgtaaaacactgagcacaatgcttgcaaattataaatgacaagtatttgctaacatatttaaaatattttaaatcaattagtctttacataaatgatactagtattcaaatttcaggtaattctttatgcttaattcattgatttgaggagtaatccatcatactttcagagtctggggaaaattatgatgatgttaaaaatgtaagaaattaactcacatctccatatccccactggtctgcctatggtctggtttctgtgctgaccccagtgatctttaaaaatgtaaatctgctcatattacagagagtgtagagcccctattttattagtggcctattacttttaggataaaggctaacactaaactcaggatggccttttccatgctctctctttaacttcctcttgagcctggcttgctgttattcagctagactggctatttttcagatttttaaaggcctatgttagttactgtcccaggacgttgctctgaaatgttctttctgtgactctggcctcctgaactcctgtgcatccttcagatctcagcataaaggtgacccctcaaggcagctgttcctgctccttccctttttctcttcccatctcaatagcgacctttggcatctctagtcataaaaccgtggtctcttacttgaaagcatttatctccaattctaatgaatcaattaattacactggtattatagctccctagaataagtggggatataaagttgtctctctcattaaacaatgatgggcagggattgcatctgtgttttccattgtaaattctaatgcttttccactcctgaaaattttgtaagatatagataagaccatggaactcattcttctgcttaaattcctccagtacttgccaatcataattggaaccaaatccagactccttactaaggcctcctttgatgaacagcttcctgttgctttgctaacagcctttcctagtcgtcttctttcttatgacattcctctctcttttacgcctgtcaaattcattacaaagtcagaggtattctatttgcctttctttcctcctgaagcatttatcactaatcttcatataaagcttttctcttctcatcttttagaccttgatataaattatatttacccaaagtaactgcctcataccctgccctcgctcgcatacattctctccatcacatccatatgaattttttttgttttaaatgtgttttctttctcccagaagttgactgtaagctctctgacagcaggctgcctccttgagaattgtatcctcatattctacaacacagccagtcacattatgatcatttgtaaatattcattcatcataaaggaataaattataaaagctatatttatgatgcattattgtgaggtttattctgtttttctaagccttatttttgaagggcaaatgaattttatcataaatgatccatttaaaagaatttgtaaatttcctattctaagtattacattttgcataggctttaatgttaaaatattgagaaacacagtcctttgaaattgtattccactgctatggaattgctacactgtggaccatacaaacaggtatataaatcttcattgtaatcacacattcgcagagaatatgaagtacatttactgttattaaatttctgcctcttacaattttttgccatccttgtttctcaaattatattttccagagaccaaaggatgttaaattgtgaaatttaaatttctaacctaaatattataatagaattttattttaatgaagaaggacttaggaaagcaatacattatggattaaaacataaggcaaaggattaacccaagcaggcatctggaatgtactaaaagaaatgaygtgtactaaacgaatgggcgcggtggctcacgcctgtaatcccagcactttgggaagctgaggtgggcagatcacgaggtcaggagatcgagaccatcctggctaacacactgaaaccccgtctctrctaaaaaatacaaaaaattagctgggcgtggtggtgggcgcctgtagttccagctacttaggaggctgaggcaggagaatggtgtgaacccaggaggtggagcttgcagtgagcagagatgatgccaccgcactccagcctgggcgacagagcaagactctgtctcaaaaaaaaaaaaaatggaaagaaagaaatgacgtgctttcaccttcaacagtggcactataatattttgggctggacaattcttcatttttagggagctgttctggctcttttaagatgtgtagcagcagccctggcctctacccaccagatgcagtattatcttcccctccagttgtgaccaaaaaaagtctgcagatcttgtcaaatatccctggcagagagggggcaaaactacccccagttctatacatatattataaggcatttgctagaatttcagaattatcatttttcacaagatactttggccctagaaatgctgactcaaagccattattttgggccttctaccaatgacgtgtttgtttcccttgaaggcttgccagaatctttatgtaggtgactctagatcatggttatttaytttcattttctcagatattaaagcatattttccttctgagttttgaatggtaagggtaaggctattcaccgcatactatcatccaaatagaagtggatgtgcaaccacagatatttcattgaaaaatctcagaaagagaaaagcrtattaaacatcacagatacagatgtctacgctgaaatgtcaacttatagatagatggcataaccctaaaaaggttgacaattccatttttggtgcagttacaaatcatttcacttgtttgtatttcaggacctccaggatatagtggctaccctgggccccaggtcagctacccacccccaccagccggccattcaggtcctggcccagctggctttcctgtcccaaatcagccagtgtataatcagccagtatataatcagccagttggagctgcaggggtaccatggatgccagcgccacagcctccattaaactgtccacctggattagaatatttaagtcaggtaatttcaaagacacaaaatactcataaaaaacagaactgtgcttccagcttgcttaaccagattagcaaatgaataattcaccaaagtctgaaatagcaaaactgtatttyctgctaacagattactctaattcttctaggtctggttcaattttaaagcaaaatacaaatgccttagaaaattgtattttctgttatcttaaatacaatctatgataatggccaatagcaaacatttaattagcactgtttcctgcctttgttgtatgcctgatacatgtattaactcatttaawccttattgaaagtctgtgatgtataggtgctacatttttcaaaagaagaaacwgaggtccagagaggttatatagctcactctggggtgagaacctaaagagtcaagactgtttttttaatcccgaaactttggtactgagcgaagtgctctttagtctcaatactgaataattgccttataatttggaagaaaatttaaataaagtttattgttgagtttcaataagtggccccaaacaaggggttaatattttatgtataatatgactcacctttttattgtaactaataaaactgcatttttatgatgctgcttttgttctttggaagacctaattttataaatgccattaataaaggagtaaaaagtcctggattttgttgcactaaattataattaatctcagcaataagaggtttaacatttaattggtgttagaaatcaggtaggtcaaatagaaacaagaaactctgtgtgtccagtctatacacatacaaatattcttgtgatattcaaccagttttcatttcataaatcatttctttcttgcactctctttagtaacttaatttmccacaatgtgcttaagtggcataatcataggaatttttggtcattattatattatgcaagaaatacatagaaatagatattttaaaaatcagagtctcataaaatacataaaggatgttatcacatatgacaaaggttgatattaagtatgcttaatacaaatctgaaacttgtaaaaaaaaatctctttgatggctaaaaaagttaccaatatttcttcagcctattctagaaggaagattgttttctaccttttgaattgtttttgacacataataattgtgcatatttatggagtacagtctggcattttaatgcacatgtactacgtgtaatgaaaaataaggataattagcatatctgtcacttttaatatttatcatttcttagtgttgagaacattccaaatcctctcttctagctatttgaaaatatacaataaattattgttaattatagtcagcctacatagctatagaacactagaatttattcctcctatctagctgtaattttgtattcattaaccaacttctctttatacctctcctccctacccttcacagtttctagtaaccactattctagtatctacttttttttttagatggagtctcatcctgtcacccaggctggagtgcaatggcacgatctcggctcactgcaacctccgcctcccgggttcaagctattctcttgcctcagcctcccaagtagctgggctacaggctcctgccaccacacccagctcatttttgtatttttagtagagacggtttcaccatactggccaggctggtcttgaactcctgaacttgtgatccgcctgccttggcctcccaaaatgctgggattacagtcgtgaaccactgcgcctggcctctactctctacttctaagaaatcaatttttttaagcttccatgtatgagtgagaacattcagtatttttctttctgtgcctggcttatttcacttaacataatgtcccttaggctcatccatgttgctgccaatgacaggatttcattcatttttatggctgatttttattccattgtgtgtattaagaatgaatttttctttattcatttatctattgatgaatacttaggttgattctatatattgactgttagtgctgcaataagcatgagattgcagatacctctgacatattgatttcctttcctttaaaatttttgttttgaaaattttgaaaaaatactgtttcaaaaaaaacagtagtgggattgctgaatcatatggtggctgtaattttaatttttgaggaaccgctacactgttctccataatggctgctctaatttactttcccaccaacagatttccccttctccacatttttaccattatttgttattttttgtctttttgataaaaattcttaactgtacaaagataatatctcattgtggtttggatttcatttccctggtgattagtgatgttgagcattttttcataaacttactggccattttgtatcaattttcttttcttttttttttctttctttttttttttttttttttttgagatggagtctcacgcttgttgcccaggctggagtgcagtagcgcgatctcggctcactgcaacatctgcckcctgggttcaggcgattctcctgcctgagcctcccaagtagctgggactacaggcacctgccaccacacccagctcattttttgtatttttagtagagacagggtttcaccatgtcagccaggatggtctcgatctcctgacctcgtgatctgcccactttggcctcccaaagtgctgggattacaggcatgagccacctcaattgtctaatttttaaaggtactccagtataaatcaattttatttgacctaaatttttccacattaataatgaacacaataaatattttattaattaaaaatattaacttcagttttacactaaaaagtaatataagctgttaaatattgataattggttacatgtactttaaaaatataaatacatgaattttaatttggttagcttataaaaaccttcatttgacatatacataccacttattttttttcctgctatagatagatcagatactgattcatcagcaaattgaacttctggaaggtatgtattcattgttttaatcctgtttctataaagagtagaagtttatgcagataaaggcacattgacctccacaaatataacactctcacttatataggacagttaaaccagttatttacaataataaatgttatcagcaattcatttctaaaatttaggaatcaaaaggtaaaatgctgttatgttgggcacctgccctcgggatattgacactaacttagaaggaaaataatcaaaacccttattttgctcctctcttcatacatcactttttttctgacttctaccacttaagctattttctccgtaattgtgatcagcttaagaatggcacagagccacattccaaagtaagttatcttttttatttggatgaggaagtttgggaaaattatcatttgtgcccacagtttctcttgggagttaagatgaaccctataaaacctttgtatacgaggtcagatgcaggccactgcagtgtgggaggatgctgaccaactagcctgcaggcttggcttcatagaagagcactcctgctcctgctgaatggcctgacatttccttgggtccagggctccttaggtgcaaaaataaacctaggaagccaattaatgttttataatggctgccaggggaagaagaccctggatagatttatgaaccatagtgttttccttctagataaaaaaggtttaataaaaaataaaactctccagtttttaggaatatgtctgctaaattcattttcacctgtctccaaagtttctttccactggtaaaaattagaagatgaattgtataagcagaataatggatttggctaaaatatacaattgtcatctattacattgaagttatttgtaaagcacattattatttataagttacttgattttttttttagtgtatctaaacaaagctttctctggaagacagctttgtattctgaattttttaatgttttatagtatatattagtaaggctataaaatccaaacagacatataaccaaacattacacagcacactatttatctttttttgtagatttataggctttataaatatttgttaaatatgtgttaattatgaaatagaaagttccaaatctaacagtttttaattatgcttatttttcaaaaaagaaatgtctccagttttttttttgtttctttttctccaaaattgaaagtctatgttattttttcatgagtggtataaaaaagatgaagattactcaggtttttagaatctgagcataaactaggcacttacttttttttctcaattcaaaacacagaagacaataaaaatataaacaatttgtttacatttttaaagtaaatgaaaagaaacttaaaggttatgtaaaccaatgttgttttacaaataagctggagatttttgagattaagctacttaatgtaacaattaattagataatgaatgtcctctcaaaatcagcttaacttttttctcatcaaacatttgactatttcagatgttgaaatcagacgttgttcctataaatgcagagtacagggtctgtctgtgtcccaccaaggacacttaaaggagttcatggtggtaagacttgtgaaggccgtctttatccgactcagagtctttccacataggcattatagagtgacttttcctccatatatttattttaatcactcattattttagccaggcttctgacatctatgaccccagttactgaggactatgtacaaatgggacagttattgctcctttctggctttaaatatggagaggtttccaatgtatggttagatatggaaagcccttgatacaaagtatgtgagtgtcagcattttgcagccatctgtttccctcatgaagatagattagcccagcaaaggtgcagagttcacttaggattcccayggtctagatattctgtgagttgaagccttggttgccgaacacgtttgtctaatacccacctcccacttctgaacaactactgttgagttgaataaggatgccctgggtccaatgtgacattctaattcatctttcatttttactccctcggtttttatgcgtgtacattgccttctttcaaaagcattgcaaaaaaataagacataagtaaggtttataagacagtctcaaaccaattgatttaatataaaatttcatagcacataaacagcaatcctcttatattcccctccacattacacataaactatcctgcattagtggacattttatctatacacctagcaccaccgtgcccacccacagcattgccccaactctcagcagaaaagtctctcttctgacagacatttatggaattaggaaaatataacttgtttccagtgtctcacataatgaagggatgggttgcccctccacacttgtgggtgtttcttgttaggcggaacgagagacttggaaaagaaaagacacagagacaaagtatagagaaagaaaaatgggcccaggggactggcattcagcatacggaggacccgcgccagcaccggcctctgagttcccttagtatttattgatcattatcgggcgtttcccggagagggggatgtggcaggacaataggataatagtggggagaaggtcagcatgtaaacaygtgaacaaatgtctctgcatcataaaaaggtaaagaaaaaggtgctgtgcttttgatgtgcatatamataaacatctcaatgccttaaagagcagtattgctgccagcacgtcccacctccagccctaaggcagttttcccctatctcagtagatggaatatacaattgggctttacacctagacgttccattgcccagggacgagcaggagacagataccttcctcttatctcaactgcaaagacgcgttccttcctcttttactaatccccctcagtgcagaccctttacgggtgtcggactggtggacggtcagrtctttcccttcccaggaggccatatttcagactatcacawggggagaaaccttggacaatacctggctttcctaggcagaggtccctgtggccttccacagtgttttgtgtccctgggtacttgagattagggagtggtgatgactcttaacaagcatgctgccttcaagcatttgtttaacaaagcacatcctgcacagcccttaatccatttaaccctaaattgacacagcacatgtttcagggagcacagggtggggggtagggttacagattaacagcatctcaaggcagaaaaatttttcttagtacagaacaaaatggagtctcttatgtctacttctttctacacagacatggtaacaatctgatctctcttttccccacggcataaggacttaatttctctatacattggtaatctctccttttttttgccatttttctctgtctggatcatctctaaacatcatttcttctcctccttatgccacttggggtatcatcaaaaactggcatagctagatattataatatctggataaattcaatatttttaacatagaggtgattatgatttcgtcttttatgtttttagttttaacaggttttgaaactaataacaaatatgaaattaagaacagctttggacagagggtttactttgcagcggaagatactgattgctgtacccgaaattgctgtgggccatctagaccttttaccttgaggattattgataatatgggtcaagaagtcataactctggagagaccactaagatgtagcagctgttgttgtccctgctgccttcaggaggtctgtgatcaattaccagggcactttgtaaaatagttcagcaagaatttctgccctgtcattgaacctttcatcgaacctaggcattatgattattacatttacatatattattttgcctttgtagatagaaatccaagctcctcctggtgtaccaataggttatgttattcagacttggcacccatgtctaccaaagtttacaattcaaaatgagaaaagagaggatgtactaaaaataagtggtccatgtgttgtgtgcagctgttgtggagatgttgattttgaggtaagagatgtcataatgtttataagatttgctttcctaatataagaagaatgtaattttgcaggacattataaatgcattaaataagtgttgtgtgccaatgtctcaatagcaagatgattttctcatttatttaactttgggcagagtggtagttatcactctgattaaaggtcactgttggtcatgagaaatggaaaaaaaagaagcagacctatgtagtcaaataaaaataagcaaatcatccctcacttaaacgtggtggtttctatgtgatgacactgtatattatccattttaaacagaacgttaaccttgccatctaagtctgattgccaaagcatatggatccttcttaaatctgaaatatcatctgccaatgctcaaggccaygttcagaatgtctgacatctttgaattcctacaagaagcccaattatgcaaagatagttttgagaaaattagtataatatgtactacccagttatgcttctctgtggtctctccttttccctatattaaattaggtcactagaagctgcaacatattaatatttgtatatttactgtaatacattgtagaatttcattagagtagctcttcaacaacagatggtctacttttacaatccaaattttttcattgcaaatgtttaaaaatcagaaggttttataacttaatcttgatttcttgtttctcttggaaaatcagaaaattgggttaactgggcccacctttccaacaaaagggtaaaaatctactaaagatgtgtggggctgccccttgtaataatgacatgggaactctaccactgtctccaccccttactgaggtttttcaatatccagtgtcattcatttatgtgatctgcctgccttctttaatcacatggtattttattcctccgtcagactttagctatataaagatgaatcctttcccccattgacttcataatctaatgacagagatttgcagttctaaggaggatgtgatatagaaactttaaaaaggctcttataaggggattatataatgtgtgtatgtatatgtgtgcataatatgcatgtataaaaattttatgtaagggtatgcataatagcagttcttcatgtaagggatggaatctctgtcctacatccagagaagtgaaaagtaatttctcattcaaggaacaatattaacagaagtttggctggcatatattttatttttagtaaataaatgaaaacactggaaaaacattgtgtaatccttgtatttgatactaaaaaatttatgtttcawctggcagtctttctygatggataccttaaagcatccattccatgtaataaattaacttttcttctatttatctagaatgatgatatcaaggtactctcatggaaagaattgagaaatagtcacttgaagaattttccatagagttgacaatggaaactttgacacctcaaagcagaaattatcagtatgagggaccactaaggaacatgaaatccaccagggtgtcactgggcatggaaacttgaagtaataaaagagataaaagcctgttccacagcaggggcaggagtcattctaaaacagagaataactcaagaggcatttcataggtgtactatgtggaactaattcatggatttgatatcaattgaggatgaaaaaaattttggagataaacttgatgtgttattattctgatattacattggccaagttaagaatcttggaggaaaaacacttgatttgtgtcctcttgaccattatgatagtctgctttttaaaaagtaaggtatcaaatactaatacacatctaggtcagggatcagcaaaatataatcaatgagctgtagttgattatataaaatatatatgggaagttaatgacttgaattaaggtcatgttggattttagttatgtataggaaaagaatggagagttttcagcaaacagayrgtaattgaatctctaagaaggttatcttaatggtgagtaagagagagcctagtagaccttttatccaatataggtgataagagagtctgtctccttcaaggactcttggtagggggaaaaaatatggccacatgaaactgacataccaagtcagctctgtctatgagcttgaaatctgaattcctgccactgttgtgtttcaggaatctcaaaatatagaaactgatcctgagtagtgataaattttatatggtcaactatagcccacagattttttttcctgccctctcaactagattttcattagtattcaataaatatgtttttaaaaagcagacaatcctaatggtcaagagtatagacactggagccagatgcccaggtttgaaacccatcttcacaacacttatctatgtgactttaacaaattctttcacttctctttgctttagtttttttacatgaaaattgggtgtaataacagtaaataaataaatcattagtaagtaaataaaatagcttaccagcaactattaatatactcatgatacactttttatatttctttgctacatacctagatcctatatgctgtcattatatttcagtattttgcatttatatttgcattgtgagatgaatctatggttttctttttagaatgcttttaccaattagtattgcactcatggatttgaaagtttaacattatacaataccaatttattatttccaaatgttgacattttattatagtgattttctattccaaaatgtctacaatttagctaaaaattatctagtcctgctaatttattggttgaagatcattatttgcatttcttatccttgccataaaaaatgtattctctactttgttaaatttcttgctgtagtaatcaaaaagggcaaatgttaatatctttatctgtatagtgttgagtttacggtggctagtaagttgtcagctgcatttttcatttttttaaatttcagaattaaaaaataaaacataagagttttcattactagcttcaaatgcttcaatgacagctattagcagaaaaatactaacatgtacaagaaaggatttgtattagtttatttcaccacagtagtatttcattacacataatccctaaaactcagcagcttgcaataagtgtttatactcatgcttatgggtgtgtaggtcaactgtgtttcagyggatgtatttaagcactgacttaggcgcatgttaacctcaatctgctccaggtagatttgttctatggctgtagcagcagcagctacctgagtcatgcttttctagtggcttgtcactgaagatcataagccaggccaaagcacttagccaagtttaaggacactactcrtgtcatatctgctaacacccgttgttcaaacaagtaacatggccaagcctaattatgaaggaacagkaagtatactggccctacagaaggagagggaatgaaatgaatatttgatgaacagtattatgctatcagcttcatattagatgtttatttctagtattttacaaactatccacttgtactcaaataaaatgagtcaagtatttttagattccccacatttatttagctgaaaaggacactcctctgttaatacaactatatgtgtacatagttttgtgaatttcagctacattcagtccccacctgccctcctagaggagttgccttagtctgagcaaagtccattcaaccctatatgatggccctgggctttcctcaggcagaattgtaaaattaggaaacttctacttcggagctcatttgttcatacactcttcatcttttattcacaccccactagttatccactctcaacctcaacccttggcgtggggcatttcatcaagttacttattggtatttgcctttactccaaactgctaatcttttctaggtgcttagcatttcatgtttggcaactcacagtgggtrgtaataagccttttcatcatatttaatctttcagtctgtgtaaactgtgcttctcctaaagcagaagtctaataggagttttgttcattaacttcctgatggcttctagaaatgtcatcaaagaaacatttcatatttatatccttttttgcttaaattttcttttgggtcaattcaaataatttattaatgtctatattaatataaaatagaaattgttaaatatttcaggaaaactttctgaaatataatttctccgtacaatgaaacagtttttttcatatatctataaatagatacaggagcctccagttatctaatgagggttacatatggtgcataattttaataccatatttgtttcatcttacttcaaatttgaaagtacttttgctataagtttcctaaaagtatttaatacttttttttttcaatttagattaaatctcttgatgaacagtgtgtggttggcaaaatttccaagyactggactggaattttgagagaggcatttacagacgctgataactttggaatccarttccctttagaccttgatgttaaaatgaaagctgtaatgattggtgcctgtttcctcattgtaagtctgttcttattaatcttgattatagatgctttctctaggttcattctgaaatgattcagtaaagtgtatatttcaaaatgacattttaaaatttatagattttaaatcaggattcccatttaatcctagctctgaaattctatttgatcctgacactctggggtcacaggtgactagtttctacctgaagagtctatgaatattcacatggcaagagggggactaaggagatgtactaaggagagattttagtctccccttaaatcaggcatctcctagatgctttgaggaagaagttgaaagtaggcatatgtggaaaaaatttagtgaaacaaggaaactttaccatgactcatagtaattaaattaaaccatctaatataggagtatgaagtacaataagagtgtacattcactcaagtgtgtagacctaactaccaaattacaggaaataattggatataccagtgattctgaaattgccttcacattagaaccacctagggactttaaaaacyccaaggactagtccatacctcagttcaactaaatcagaaacttcgaagttcatatagtgttccaggtgattccagtatgcagccaaagatgagaattatggggatagagaaaaagtaacatttagagaaaatgactggaagattaattaaattcatacaggtatcaataaatgaatagaattatagaatttattattaaaatggaaagccaaaggcagaacttatataattatagagcttttgtatatttacttattacatttaatttttttaacagatttgttactgtgtttcactagatcccttagtatttctgcatctgataattgatctctgttttgttgttgaaaattcatttgtatacttttgtttttatctaggacttcatgttttttgaaagcactggcagccaggaacaaaaatcaggagtgtggtagtggattagtgaaagtctcctcaggaaatctgaagtctgtatattgattgagactatctaaactcatacctgtatgaattaagctgtaaggcctgtagctctggttgtatacttttgcttttcaaattatagtttatcttctgtataactgatttataaaggtttttgtacattttttaatactcattgtcaatttgagaaaaaggacatatgagtttttgcatttattaatgaaacttcctttgaaaaactgctttgaattatgatctctgattcattgtccattttactaccaaatattaactaaggccttattaatttttatataaattatatcttgtcctattaaatctagttacaatttatttcatgcataagagctaatgttattttgcaaatgccatatattcaaaaaagctcaaagataattttctttactattatgttcaaataatattcaatatgcatattatctttaaaaagttaaatgtttttttaatcttcaagaaatcatgctacacttaacttctcctagaagctaatctataccataatattttcatattcacaagatattaaattaccaattttcaaattattgttagtaaagaacaaaatgattctctcccaaagaaagacacattttaaatactccttcactctaaaactctggtattataacttttgaaagttaatatttctacatgaaatgtttagctcttacactctatccttcctagaaaatggtaattgagattactcagatattaattaaatacaatatcatatatatattcacagagtataaacctaaataatgatctattagattcaaatatttgaaataaaaacttgatttttttgtatatttgatttttgtttttaaacgaaatgtgttcagatggtattttgagcactcattcagttaaatgatggtacatttgaagcaggatatttccctgaccccttcacaggactcgagacaggggtgccttgtttactcagcctgccattctcaactcctcctgggagggagtgcacaggcaaacaaggcaggaactggagtgtacaagcactggaactggctggccgctttggcatgggcaggaacaaactgtgcaggccctgtggtagcatccaggtggggttgcctgcgattcctgaagccccagaagatgtgttaacagtgctcttttagctctgctgtctgtggacggcttaagtgttaacagctcagtgggccctttgccttgtcatgtgggacagctgccctccaccagcaagggcaaatggcgaatgtgagagccttttatatcggcactcatggctcccaggctcttgtccggtgtccaggaaaaatgtggtcacaaaaacaaactgaaggatggtaaatgagggggattttattgctgatgaaagtggctctcagtgagaaagggagctgaaaaggggacagtggggtaggtgatcttcccctgaagtctggccctgtccagctggattcttctctgaagttacactgtcaagctgtccctctgaagtcaagctgcttctctccaatgtccagccatagtctccactcctctctgactgagtcttgggtctttataggcacaggattgcaggcagggcgggccatgggcagtttaggaaaaggcaacattcaagtaggaaaacagggatataaattctcactttgggccggggtttcaggcatttcagcttgagggtagggttttcactggggactcacccttttctacctagaatttctctgcctcctgtctccatcatatttaactgacttttcctttcaaatctcctttaaaaatgagcaaaggtacatgacactttgtagtaaaatctgtaccagtgttggaaactaggatttccacctgtcagaagcttataagaatttagttaatctcttttgtaatgaagattgagttgaaagatgacatgaacaacccacaatattcttcatgcaatggaaaagtatgcttaagcaataagggcatgtggaagagtccctctttcatattcagcacaattcttgtaacagcagctctcctcatggtgttagtgccctagacctcaatagctccaaatggcaagcggtgagaacattagtatgcaggagatcttcaggaaaagtcaagtctagatgatctcccacaagtctaaacaattcaccagatgccaagttccagtgatgaggtgtacccatggaactcagagcatgtgcttggtacagatggcatgccaagaaaagtggaggtacttgcatagctgaatcccaatggcattgttatgccagttacagaagagggtgggcataggatttccaaactggccataatgtgccaaaactaacccaaaataaggcttagagtactgacattatctctgtgacagctaaattttactttcattatttctctctctctcaacaggattctggatctttggttaagcaaaatgaaactaaactgatctaaacatttctttcttcaactctgcaaagaagatctgagcaaaaccccacatatcttctgcagaacctatttaaatactagacaaatatcttctcattacataattacatacagaaaataatcacacatgaaaaattcgatatttaattaagaaaataccaggaattgtttttcaaagtttaatttgtaatctcaatgagatttgaggaaatgttgcatatttttttatttctaccatgtgagttataacagtgaatggaaagtcactgcgtgtccctgactagggaaaatattcaggaggaaaagctgcaatggatggcgcatggaggtatatttttgatcttgggaaggaagttctaggtaggtggtcagtgaggaagggggagaaggagggaggaagaaggaggggagggaggggaggaagacaagattaagggatgtcagtacctctcctatgtacctcttgggggagggttgaggagtgaggggagtgtaagtgaaagtagagacaaggctgggagaggaaaaaacaaaaagcaccagccacaggcaattaaattgccagaaagtcagtgtctgggctcccggcatcaagttagctagctactctatggataagtactaaagctttaattgcatttgggctcaaaaacaacaactgtaactttagggtaactagaaaagcctctgtagagaatcgctgccatcagttaagaatggaatgatttaaaatgtctctgggcacaatgaagtgctcctagagcttaaagtgccagaaaagtgtacagggtttccctccatgtcctgcctctctcctttactgtctctagcccagcatacaccgcctgagtttctagggccatgttcctgcacctggtactgtctccttcaagctgtgtgttcctccttgtgccttaatttcccttagttgtcaatagtatcgttgtcaattgattatgttatctacctcataaggtcagtatgaagattcagtgttctaatgcaggttcagagacctgagcaggttcctgcaatagaaccagtgtaaaaaatgaaaagggctatgtgttggtaaagatcaatggttttcagaacacagagaagtgtctcaaagccagtgaagaatatttggcctaaagtaaatttctgtattgtgatttgaatagcaagcaaaatccatttaaaccctagcaagaatactatctcctcaaaaaaaaaaaaaaaaaaagtccatgcaagatgccaagctagggaatgatgctcatctcacagaagtgtagattaagggaaattaaggcacagggaggaacagagtctctggcttctgtgttagagccttttttaatcttagctttatagtgtcaaaatgtggcaagctattttaagagaggaacaatagctgggcgcagtaactcatgcctgtaatcccagcactttgggaggccaagacaggtggatcacctgaggtcaggagttcaagaccagcctggccaaaatggtgaaaccctgtttctattaaaaatacaaaaattagctgggcatggtggcaggcatctgtaatcccagctactgggaaggatgaggcaggagaattgattgaacctgggaggcggaggttgcaatgagccgagattgcaccattgcactccagcctgggtgacaagagtgaaactgcttctcaagaaaaagaaaagagagagagagaggaacaataatctgggcccctgaaaccagatgaaacaactgacaatacagagtctgaactcatgatttacaaactgagagggccatggaatgataaggaacaagtacaactggtcacagagctctgcacttaacaaccctccacacacatacacacaccaagcattcaagttaaacgttaacctactgttaatgtttatatggtagaaaacatcagatttatgccaaaatgcagattataaatctacccacattgaattctgaatagatttggaaaattgatctgcttgcctactaagtacaatttgtttctgcctgtggattctgggggttttccatcattaacacattgaggttattctgtctggcagtgatagggaacaaacattggcctatttatttcagcaaaggagttagttgctaggaaacatttcaactttagtcaggtattgccaatagactgcaaccacctgaaaatatcttagagaaattctcggttatattgactttacagagttaattagatcttagtctaccacccggtccactcgggcttctataccaaaacaccttagacagggacagtgtaattataaaggactaaaatttgttaattatagttcacgaagctgagaagtccaagatcaagtcaccaacagattctggtgtctagtgagggctgctctctgtttctaagatggcaccctgttgctgcattctcacatggcggaaggcagaaggtcaacagggacccaaccgagcccttttaaaaggtcaccaatccaattcatgagaatggtgccttcatgacttaatcacatcctaaaggccccatatctgaatactgtcaaaatgggtcttagtttccaacaaatgaatttgggggcacacatacctttaaaccatggctcctactaagcacatttctgttaaatcatactgcctgaattctttccccgttattgcaagtcacaagcagaagataatttactcgcaaaattattttttttgcaaatctatttcagtttttatgaataaagacagattcactcaaataattcacataaatgtatttgtaaacgttatacctgaggaggaaatgaatataaaaaaaaaaagttgattgatttaagggcactgaaactgctcatcaattatttaacaagtacatacggagcttctacactgggccagtagttacgctaggtacgatggtctcaataagcaacaaaaattattttctacaagatgcttaaggtcaattatacatatggaatgtttgattataggatccagagtactatggagaggggtagtagggacactgaactcagttttaatggtcaggaaattaggggaagtaacttttaaactaagaaagtttgctggacaaaaggcaagtgagattatttcaggcaaaggaaagaacataaacagaagtcacctcaggggtctgaaatgtggctaggccactggttttgtgttccttcgtgagtgaaagacatgcagggggtaggacatctaaagagtggttagatcatacagtgccttagccacattaagaagttcaggttggggccagacatggtggttgacaccagtaatcccaccactttgagaggctgaggtgggaggaggtaggaaagatcaagtgtcctttcctacacatagttctctctcagtctctaggaatcaggtggtggacttctctaaagctgcacttttttttttttttttcccaagcagcatggcttgcctgattgttctctaggaactagtctagccttttcagatgagaaagttactttgtctacacagaagttttctcatggtgatttggtatctccctcatcaccaaaacctggatacatggtagatggcctaaaattgttgaattatctatctttcaaatttacagtgtgaatcgatttacgtttcaggtcctgaaagctatcaaaataaccaaagtccatttatctgaggagatggtattaataattagttgtgtaagtaaaaaagtcaataaaagatgaagcatatctgtaaaaaagatgaatatatttaaaataaattaagggtgaattttattattttgttattattatcatatcatttatttatttatcaatcttttaagtaggggcaagggccaagtgtgggtctactattctgcactgtctttcttctataaaaatacacagtttatttttgtttcaatagagccagaattctaagacactttcaaaggtatcttagtgtagaccagtcaatttttaccatgatttttcagtcattcatatttggctcaccctttactaactcagtagcaatcaactttactgagtagacttaataagcattttaaaggaattcagattaacttacatagaaacaatcttttatattaatatttaatcaaagcaagtaaaaatatttactttctgtaactacaataatcttttgtataaactgatttacaaataaatacaaatcacttttagttggtgtagaacttttgagagagtagacgtaccctagaactagagagtcaatagggaccctcttaatgtaatagtcaagtgtattcagcataatttgagctaataattaggttttacagagagaataggaaatgtcaacccaaggagttgggtaaattaagatcag

SEQ ID NO: 5623 - DNA, 161700 bp, Homo sapiens
  misc_feature (1)...(161700): n = A,T,C or G, or insertion/deletion polymorphism (see Tables 1-2)
atgcttctaatcccagcattttgggaggccgaagtgggtggatcacctgagatcaggagttggagaccagcctggccaacatggtgaagcacagtctgtacgaaaaatacaaaaattagccgggcatcatggcaggtgcctgtaatcctagctactcagaggctgaggtaggagaatcgcttgaacatgggaggcggaggttgcagtgagacgagatcacaccattgcactcccgcttgggcaacaagagtgagactccatctcaaaaataaatgaataaataaataaataaagatttatgatcaagtaactaattacctggacatcctctcctggcataagaaacagaacctatgaagccaccctagactgttgcccaatcctatccaccaaaaggaacctctatcttgagtcttgtatttactagtcctttgcactgtctctaaagatttttacaataaatatatatacccaaatcacagtctgacctgtttttttaacttcgctgtacagagaactcacactatatgtattcttctgtgatgcatgttatgtgtaggagagttatctctgatgtgggagggtgctgttcaatcatttttactgctaaaattttacttttcgtaattatatcagaattttgttaattcccattgatgcatatgtgattgtttccagtttttttgccataaacattggtgtacacgtctctgggacacatagccaaagatatccccagagtgtatgatcaggagcagatggtgggattatacagtgtatggacattaatcatacaagataaggctaatttgatttcccaagtgcttgtaccaagaatgggaaagaacttatgttgctcatgtgttctgaaaacattcagttgaaggtggagattacatgttaaaaaaccattgtcttggctacagaatcaccctaggcattttttcatattccattaataccttccttttctttacttttatcctgtaaattatggcattatactttaagcataagattcaaataatgcttctttttagcctaaccacatagagtttgtgaaaaagtggagggagggagaaagctctgagggaggaaaggaggaaagaaagatggaaggacagagaaagacaaaatgaacattttcaaaaaagaataggaggaaaggattagaaacagcaagtgtggctaatattattaaaatgcaggaaattaaaagatgtagataacatccatggaataacagaaacttaagaaagccttaatagttattaactgctgtgtcacaaactacctcaaaatttagtggcttaatacaacaaatatctgttaattcaaagagatactacgaacgcgcgcaaaatagattttatgggggtggcagaagttggataaagagatggattttacaggttggaataagtaagagttattggtgtgcacatggcaatgctttttagtccaagtcctccaaggagcagatgccaagatgagcttaaagtctacggcatcttatgaggggacacacctgtaagggaatatgagacgcgagccagaaatccctggaaaaggcggcagacaatgatgcaagtgtgaccccaagtgctggacagaaggagacaaggtctgttcgacgcatcctagagcagaggcagtctaaggagagttgaggaagggcatggaggagtcctggagccacatttggccatcagaggagtcccatgtctcccagtaatggcctgccttagtgtgcttgctgtgaccggtcactggctgggaacaactcatggaagcagggcttctgcactaatcctgctgaggatgtcagagcacagaagcagagacgtgggacattacctaggagtatcactcaatccttccttcctgagggttctgggctcttgaatatcaaaccctctcaggctgggttgctggatgattctgctcacacaacggacaagggaaaccaggacgtccccaagtggattcctggtttccacacacacttctcctgccctcattgtgtgatagcagccctgcctcctcctcttctcacctgcttgtctctgggcacatactattcaaatatccctgggtgcaaccacaatgtgtagttccatggactctcatttgtctccttgccagggtgccctctttgggaaaccaggacctcctaccctgcagagtccagattttggaagtaagaagagcaaaatcaccctgggggtgaatataatgaataaaatacatacatacatacatacatgcataaataaatttatttaagtattcatgttatgtatttatttatttacttataagtaaatcaccctgggggtgaatataaggaatgagacacacctgctttgacttcttggtttttggacccgcgtattcttccttctgaaaacagtgccttagagacgtctttgattcaatacatgcatcacatcctgaaagatggcacccattcctcagagggtttcatccaagctggtactgagttgtgcctgtagagtcctgtccatgactctgtgtgcctggcagcacttgagaggcgcaggtggtgatacgaccaggggatcccatggtcagggcccacacttcatccccttccccaacaggtgtgtcccccaggcagataatgtactgaaattctgagccagtggatcaggaatgccaatagtgttgttgactgagggtctgagagcagagaggaaaaccacaccacatcgcatccctgtgagcctatccctgtgaggataaacttctgccccttccaggatggatggtgttcaagctattcaacttgtcacttaggggctagtcagttactttaagaaatggtgccctattggtgcctatcattggtctgcaatgctcacgagcagagtattcagaggaagcagtagctgggtgggccttggtagtggagagacagtgctgctggactcatttgtagcttcatccctgccactgtggttgctccactcacgggtccttcctatcaggcctgggctgatccatgatgcagactggctaacttcaatttgtcttcaatttgtttggttattcagggccacatcaggactgggtgttttctgtgggtgttaacatggaattgaggctcaaccgacatggaccgttttcgtctcatgatagatgccgctgggcctgtccagtgaatgactctatgggtcacatagaagccaatacacacgggcacttggaatcacatggttgcttggtgtcctatgctcaagcattctatcttatcagggccagtaacatgctaaaagttgcttctaacatggagcatgtttctctgctgtggactccatggccttactcctgatcccaggccctgcattctgactttcccactgatgcttggttcagctccatcctgcttctttccccagaccgccacctccagcaccaggggtctgagggatggtgactgactgcaccacagcctgggtctgctgcagtgtcctttccagtccaggccccactcaaagctggcctcctcctatatcacccagagtgtcagccaaagcaataaacttagatgtggaatgtggtgttgccagaacccagagaggctcatcaagtagtgtgcttccttccttctggtgaggatgcaagatgcaagtttgtcttttactttgtgtgtgtgtgtggcgggggggagctctgcatgcccctaaccactggacccataacacttcactgcagtggccactcttgaagctctgtaagttttatcttcaccttctgtagtgcacatgttttgccagggaattcagcgtactttcctgctgttgttcatccttcccaatttatgtgatattgccaatgaaatgaagagatttagtattctgtgggatgtctgatttgtccaggtctcttaaggtgatatttatagaaggttgaggagttaaggtagccctgatgcaagctatcaataaatgtattataaatcccatgtgaatgtgaatcattccatatccatcttctaaatgaaatgggagggaatgcactcaccaaatccacagctgcttgccatgtgcctgaggccttattaatctccccaggcagtgatatccagccagcatggcagctgcaatcaggactcctacttggtcaagtctggagtaattccattcattctttagccatatcaggcttctgcaggtacagattgctgagttatatggagataacaggcaatcccaacaccaccccgcatcgttcaggtctgtaatggcagtgccacccctataatacctgcagtaccctccacaagacccaccctggggcacaatattgcttctggtttggcttggatgagggatgtttccctttgggcttcagcacaatgagatcccttactctccagactagggacacagtgtggggtgactccagttgccagtgcatcaaggccaattatgcactcagagaatggggagataaccaggacaggatttatggaactggtgattccaccatggggcataatgtgtctaggtttattccctggcctctgtaagccccagtgtgatgggggacataatggtgctgtgggaatctgggcagcaatgtcagctcacacccaatgttaatacttatcccatctcctgattaaatggctataggctcctttgcagaagggctgatggaattgtcccagcatgtaaccatcatcgtgtcccaaggttctttctcttagggatatagatatgtccttagtcactggattctgaatctgaagcttgctcctcaattccacatgcttatcatagatatcaagcagtgcccttgctgtctgcccatcttttctgaccctgggacaccaccctttattaaccttccccacaactccttgaaggtcaagcccccttggctgatactctgggttatcacagtaaatgtgccctttatcttttgcaggtcactgaaaaggagggttcctaaagcattcactcctgaccctgagggaggtgggtgcactcactccaggactcaggttcaccacagataagcaaaaaagtcctcacattcaaaattgtcctgggccacatgcagcccacgagccgcgggttggacaagcctgcatctagaacgtatgcaccataaccccagaaatttttctgtttttactttaaggatgctttctaaatgcaaaagcagtcatatccctagcagacaacaaatgtcagttgaatgaatgatcactgtagagcacctccctattctaaagcccatacctttattaatgtagccacagggcaaatgctgttttgtggcagctaaagaacataagttcacatggacatccatgccgccagtgcttttctcaccagggctgcttgtgtgtcctccctcctcccacaccaaccctcctgcacacttcagcacaaaaccatatatttctcttcaggaacaataaccctagccttatgggtacaattttccaaccacatatgaatctaaattagactctgctttataaatctatgagtttggattggagccagcactaggattactacaactcagagcaggaagaagagtaggagggcagaagaggagttccaacagaaagttaatcatgatgagaaactatgggacccctcctctctgcaaatgtcacaatctggttcctttaaaaagattggagaaaaatcgaaaatacaattgaggaaaaagccctgggaggaaggcaagacctggacaggtctgaaaatttgtctcttgataccacaaggagatttgtatgcagggaccaccctaggtgacatccaactccctgtgatcacaggtcttggtgggacaaggttctactgaagggccaaggacaatggagcagcaaagatgacccagccaagcagtgaccacataaagcccatggtggccggaacagaaactgggcacagccccatctactctcctcccctgcaacaaatcagcataagcaacacgtggactctggaaggttctcatgysttccattwattttgtctctcaaattttaggaatcttctcctttaattaactcatcaacctctcatggcaagaatttgagaaagkaaatttatactmaggttctaattttaatagggaaggaaraagttacagctcagtgcaccatgaagttgagrcagagatggagacacctcagccccacctctctgsaacaggaaagatgattggrgagggagcacaggtcagcgtgggaagagggtcatggtggacatsggggtkgggtgstctccccacctcctcacattatgcctacangaacacagacacatgcaggtgcctttgcagaaacaaagtcagggtwcttcaagycacaaagggaagggcaggaacaamtcttgcctctcagtcccacacaaggcagctgtctcacactatagaaaaaaatattcatgaacaaattcrtatctrtcacagtgaggrgtcacacyttaaacagcccatcgcatgctcaatacatccaatgcaaagaaaccccatagcacagctgtgtccactgttccgcccaacacccaacacacatcaggccctccaagctctcacctttacaagctgtgagrgacayatcagagccctgggcactgtcactgcctggggtagracaaaaacagaacctggtcagatcccacagaagatgtggctagaggaggaattgtgrggtgggtgrgctcccccaygggctcccaaacacaatatcccaaggacctcaggcatcagcctccttcatacttacttgcagcctgagagtagctccctccttttctatctgtgrgaagaaaatgtcctgtgagataccagaaaggagycagggccttaaggtcctagaggaacctccaagtcttggacctcagagaagtttccagaaatgtgtgactgcagacccagggcgggatcaggaaacatgaagaaagcaggtgtgggtcctggaccaaccgccctcctgaaggtcctcagggaccttcccctgtgacttgtgactgctgggatcaggtcccatcaccgcygtaatcaaggtgataaatctgtccttcattttaacaggtgctttacaaaagagtaagtgctggcacacagggcccaggctgggtaggcccataattgtggrtggtgcttcccagtaacgaggcagggcacacttctacctgggtcttggaaccctcagtgagacaagaaatctcagacccacccttcatcccttccccacctgagctcttcctcctccacctcacagcagcgaccacagctccagygawcayagctccaaagagaacyaggccagcaatgatgcccacgatggggayggtgggctgggaagacrgctctgggaaaagaggggaaggtgaggggccctgaccctgctaaaggtcagagaggctcctgctttccctaaaagacatgacacccccgtctccctccttaccccatctcagggtgaggggcttgggcaraccctcatgctgcacatggcaggtgtatctctkctcctbtccagaaggyaccaccacagmcrcccacttctggaaggtyccatcccctgcaggcctggtctccacragctccgtgtcctgggtctggtcctccccatcccgctgccaggtcagtgtgatctccgcagggtagaagcycagggcccagcayctcagrgtggcytcatggtcagagayrgsgtggtgrgtcatatgygtyttgggggcgtctgtcaggaagagtcagawcattcaggcattttgcatctgtcatgggacactcctccagcacacatgtggctatcttgagaatggacaggacaccygggatggggaagrgagcacagaacccagacaccagcctggacacaggcacctgggataatctyctattccgtggaaaattctagtccctgaagagggaacagcgacttctggtcctgacctgagtggaggctgarrgactcagaagtgctggactcagacccccacacacattgagtgtgaagcagagaacaaggcctgagaggaaaagtcacgggcccaaggctgctgcckgtgtgtgtcaaagggaaccactcatcagtattcgagggatcgtcttcccgtcaytccttcagagattttatcccttaattgtgtcagagagcagggcggaacctcagagtcactctctggtacaggatctggaaacccaggaggattcctctccctcaggaccagagggagggygatattctagtgttggtcccaattgtctcccctccttgtgggaggccagcccgggagatctacaggcgatcagggaggcgccccgtggccccyggtacccgtgcgctgcagcgtctccttcccgttctccaggtatctgcggagccactccacgcacgtgccmtccaggtagrctctcaactgctccgccdsayggrccgyctcccacttgygctkggtgrtctgagcygccatgtccgccgcggtccaagagcgcaggtcctckttcarggcgatgtaatccttgccgtcgtargcgtmctgsyggtacccgcggaggargcgccmgtccgrccccacgtcgcagccawacatymtctggayggtgtgagaacctggccccgaccccacggtcagcccagtcccccgagccccgtccggccccgaccaacccggggggatttttggcctaaactgaaaatgaaaccgggtaaaggcgcctgggcctctcccggggcaagggtctcggggtcccgcggcttcggggtggatctcggacccggagactgtgggcgaccyggcccgtccgtgggggatgagaggtcgtgacctgcgccccgggccggggtcactcaccgkcctcgctctggttgtagtagccgcgcagggtccscaggtycdctcggtsartctgtgmstgggccttsaywttccstgtstbcysgtcccaatactcmggmyyctcctgctctatccacggtgcccgcggctccatcytctggctcgcggcgtcgctgtcraacygcacgaactgcgwgtcgtccacgtagcccackgcgatgaagcggggctcyccrckgccgggccgggacayggakgtgdwgaaatacctcatggagtgrgagcctggggrcgagsagtggctgagaccyacccgaccctcstccmggcgcggcthcccsggtcctgcgtccccgccrggmgggcccsttgcttctccccrcagaggcsgtttccccmcgaccccgcactcaccygcccwggtctgggtcagggccagrrcccccragagtagcaggasgagggttcggggmgscatgayggccatcctcggcgtctggggagaatctgagtcccggtgggtgcgtgcggrctttagaaccgcgaccgcgacgacactgattggcttctctggaaacccgacacccaatgggagtgagaactgggtccgcgtcgtgagtatccaggaagaaggaccctacataggttggsagagggagaaaagaaactgcggagttggggaatccccaaggctgggactccccaatccatacaccgccttcggggcctgagacyctgagagccacgcctggggccctgggacttcgccctgacccctctgctyctgtgccaagckctctgtctcaatgtctccctgagtcttggcccaagagctgtctgagaaacaagggagaaaccctcggcatgggccccgtccctctcctttcacttttyatcccgtaatctctgtccctgaactggactccctgactcccactccttacctgtccacctggactcttctagaagaaaaatcaycccatggagtttggtgccagagagtaagmttgctctgggaatggaggtgtagatttttgttgttgttgtttttgtttttaatcgggaaragttgcgcctgagtgcatgagacagaatagagaccaatttgctctttgtttattaactacagtgggtagcagaatcttggtaacccctgaatgatcaggaatctaataggtaaaaaatgtgactttggccccttgatgtataaatgtgtccaaaagccttacaacaggactcacaaagctactaagttkcaytttcccagacaatgtayctgtgactcctgcttgtagtattttaaatttaccatcattccatagctctgagtttctgtgtgagtccaggacatctcctcaatacaaagtagcgactgtgttcctatatgttgcaaccagaagccattacaagctttattcacctcaaatttgcaactgttcaatgcagtcacaatgcccttcactactgctcatgcactgcctgtttttaggaagtatccacttctaagtgttgtgtatattttataggaacacttagtaatttttaaacctgattaacataaaaaattaggttttaggcagacccacatgaggtattaaargacaactgccaagracaccctgctaggctctgtagatkgatgtattaaaatccataaaacaatgtatttaaacctaagaattctgctgctttcaaattctttcctctgctccttttcctcacctcctgcttctccagcccttccctccatccttctcatccttcaggccctcctctccccttagtccccaccacactstcactcgtgaattgtgacactagcactgtcccatgacctgctacgtaactgttcttttcacagtggtcctgctcctgtgagtcagagtgtcatttctccacttaaaacactccagtgtctccacctcggtcttgtgaagcttctggagtttcaggcacttgagcatatgaggggatacctggttcattgtagggactaagttaatttttgttgacttaatgaatgaaatatgagtgtattaaattgcatcacagataattataaactgtaaaacacggaaaaagttcagaaagattttattttatgcaactagtgtgtatatcaattcatcagttcatttgcwcactaccacgcctggcaaaacaacacccatttatctgcttataattccttggtcagaaatctgggcaagatgtggatagaatctctgttctgggcttccaaaagctgtgttttcattttgaatcctccttcaggtttatacagaggtggcagaacgcagtttcttgcagttgtaagactgaggttcctgtttctggctagctgtcaatgtagagaactgggaggggctcaattcctggtgctcaccagcgttctttcctacacagccccttaattttttttttttttttttttttttttgagaccgagtctggctctgtagcccaggctggggtacagtggcccaatgatctctgctcactagaagctctgcctcctgggttcacaccattctcctgtctcagtcccaagtagctgggactacaggcgcccaccactacgctctgccaatttttttttttttttcttagtagacacagggtttcaccttgttagccaggattgtctcgacctcctgacctcatgatccgcccgcctcggcctcccaaagtgtcgggattacaggcgtgagccaccacgcccggcccatagccccttccttttcaaagcccctggtggaggaaacccctcatgctgagtccctctcacactgtaagtctctgtgctcatgaagaacccagtcctttcaagggctcacctgattaggacagtccaagcaggataaacccagcataaagtcaactaattgagacccttaattatatctgctaaatcccttcacagcagcacctacattagagttggttgaataactggaggaaggtgactgaccaggagctgcttgttgaggccatcatagaatcagcctagcaagggttggatcttccttttgtgtttaattgggacacagttggaaagtgaagttcaagtaamgtgatcattgtgaatggtcataaaatacatcctcttcagccatggaaattgtccttacyttttaaaactaagttacatgtttaatatcttataattaatttaggccaggtgtggtggctcacrtctgtcatcctagcactgtggaaggcagaggaatggagatttgttgactccagaagttcaagatcagcctgggcaaaacctccatctatacaaaaaattagaaaattagccaggcatggtagttcatgatggtagtcgcagctactcaggaggctgaggtcagagagtcccttgaccccaggmgttcgacactgcagtgcatggtgatcatgccactgcattccagcctgggtgacagagcaagaccctgtctcaaaaataataatgatgatgatgacacatttagagcaaatgcaatttratgtgtaataatacatcctctcttgtgaaaatatattatttactgttgcataacaaattacgtaaaacttagctcgaaacaacaaatgtttctcatctcccacagtttccaatcgtcaggaatccaggagaggtttccctgagtgcttcctgctcagggccgctcacaaggttgcactccagttgtcagccaggggctgcagcatctgagggcttctctggggctgggaattcacaagaaacatggatcagtcacatggctgttggaaaaggcctggttccttgttgtctgttcccagaaggcctcagttctcagtcatgtggaccttcctgcagggctgcttatggcacagyggctggcttcccccagagctcatgatcccagattcagagagagagagaaggtggaagccgcagttagttttatgttctacacccagagtcacaaactgttatgttggcactattctataagttagaagtattagtccattctcacactgcyataaagaaatacctgagactgggtaatttataaaggaaagaggtttaattgacycacagttctgcatgactgaggmggctgccccaggaaacttacagtcayggcagaagtggaagcaaacccgtccttcttcaygtggtgacaggagagagaaatgcacaatgaagcagggaaaagccccttataaaaccatcagatctcatgagaattccctcagcatcaggagaacagcatgggggcaccgcccccattatccaatcamctcccatgaggtccctcccccaataggtagggattacaatttgcataacaaytcaagatgagatttgggtgggagcacagaaccaggccatttcagaagtgcctcattaagtccaagccacactcaagagagggaattaagctgcacctctagaaaggaacagtatcaaaggatttgaatataygttaaaagcaaaattataactattgtttcaggtttctgaaaatcaaagtcttcttgtatctaattakttttcattaactctttaagcttgtcttttaatttaatttttttttaagttccagggtacatgtgtgtaggatgtgcaggtttgttacataaatgtgtgccatgttggtttgctgcacctgtcaactcatcacctaggtattaaccctggcatgcattagctatttttgctaatgatcctcccatcaccaccctcccccaacaggccccagtgtgtgttgttcctctccctgtgtccatgtgttctcattgctcagttcccagttatatatgagaacatgtggtgtttggttttctgttcctgtgtgagtttgctgaggataatggcttccagcttcatccatatccctgcaaaggacttgatctccttcctttttatggctgcataatattccatggtgtatatgtaccatattttctttatccagaccatcattgatgggcatttgggttgattccatgtctttgctattgtgaatagtgctgccatgaatgtaaacatgcatatgtctttataatagaatgatttatattcctttgggtatataccctgcaatgggattgctgggtcaaatggtatttctggttctaaatctttgaggaatcgccacactgtcactgtcttccacaatggattaaccatttacttttccaccaacagtgtaaaagcattcctatttctcygcaacctygccagcatctgttgtttcttgactatttaataattgccattctgactggcataaratggtatctcatttgtcgttttgatttgcatttctctaatgatcagtgatgggagctttctttttcatatttttgttggccacatgtatgtcttctttagaagtgtctgttcatgttctttgtccactatttaatgaagttttttttcatgtaaatttgcttaagttctttgtggattctgaatactagacttttgtcagatgaacagatggcaaaatttttctcccattctgtagcatgtctgttcactctgattgatgatagtttcttttgctgtgcagaaaaaaattgcctaatctgattgcttttcatttacaaaaatgwgaatctcatacttcagtyaacacatctagyttagcatgatgccaataaytttggcttgatgctgtagcccgaaatggttagctygaattgagagacaagttattttcaaaaactggctatccratgggcattctataacacacttaacatcttttgttgtggtattgaatgagatgtgatagaagtgatttggacaccactatgattctaaatagcactgctattaygtgcttctgaattttttttctttttagcagtcytattctgtttccattcatatttgctattccatcactgggtattccttcctackcttttcatgtttcatttattttgatcartgatgtgcatttccaattctgtaaaagtttaattcmgttgtatgtgtggtaaaatgtaacrtmgaatctttgcaagatgaaattaccttgcayagcatattgaacattgtattattgaaaatctagagagaygccagtgagccaaggatcgaatgacctatatgtagccaaggccgttttcatggcatcctggtcctctctgtcacatagctccttacaattctctgtggttttcttccaatgtaagtagttcttgttaagaatctttgcaatgaactttgaaattcttttctttttcatttctataaaaaacaggtatattttaatttggaaaactctgtttaaggaattataatcaagtaactaccagggkgcccagcactggtgtaaaacacraaactgtaaaacwaccctgggctgctacccagtcatcctccagaaggagacygttgggagcaagtcccccaaaatctggtcataaactggccccgagactggccataaacaaaatttctgcagcaccataacatgttcataatggccctagcacccaagctggaaggttgtgggtttacgggaatgagggcaaggracacctggcccgcccagggtggaaaaccacttaaaggcattcttaagccacaaacaatagcatgagtgatctgtgtcttaagggcatgttcctgctgcagttaactagcccaacctattcctttaattcggcccatcccttcgtttcccataagggatattttaactaatttaatatttatagaaacaatgctaatgactgtaataaatatgtgggtaaatctctgtttggggctcagctctgaaggctgtgagacccctgatttcccacttcacacctctatatttctgtgtgtgtgtctttaattcctctagcaccgctgggttaggatctccctgaccgagctggtctcagcagaagactccatgctgagtcttgtgatacttattcctttgtatttcttcaaagatttgtgcaataagtatatatatacacatatatgtgtatatatgtgtatatatatacatatatgtgtatatatgtgtatatatacacatatatgtatccatatatgtatatatgtgtatatatacacatatatrtatccatatatgtatatatgtgtatatatacacatatatgtatatatgtgtatatgtatgtgtatatatacacacacacatatatatatgtatgtrtgtatatatatrtatccccaaaacaaatatcagttkgttttgctggtttttaagcttcctgtacagcaagttcctactgcmtttattttcccatgatgcacattatgtgtaggagttatctgtggtgtgggagrctgtcattcattcatttttactgctgaaggcttacatatggttataccacaatttcactagtttcctattgatgtatatgtggctgattccagtttttgccataaatattagtgtgcrtgtctcctgtgcacataggcaagaaagccccccagagtggatgattaggaatgggttggttggatgatasgttgtatggactttaaccatastagataatgataatamraattscaaagtgattgtggctacttaaacttttacaataaatgygtaatacttgatgttgatgatgtgttctgaaaacactgbgttgaaggaattgagttaaaagccactgtcktggctgtagaattatagcrggcatttttattcagactctgttaataacttcctgttgtttacttgtttctcatatacatgacattatatttttgacatatagattcagaaaatgcttacttacarcccaatcacatagagttattktatatattaggaaaatttcataataaaaaggaaaaaatggaggaagagagagaaagaaggaggaatggaggaaaaagcaaaagaagaaaagaaggaaggggaggggaaggaaagggagaaagaaggagggaaggcgatagkttgaatggaaatagagaagaaagagatggagggagggctagaaggaaggagaaagggaaggaagaggycaggcacagtggctcatgcctgtaatcccagtctttgggaggcygaggcaggcagatcacgaggtcaggagatagagaccatcctggctaacatggtgaaaccctgtctctactaaaaayacaaaaaattagccgggcatggtggcaggtgcctgtagtcccagctacttggaaagctgaggcaggagaatggcatgaacctgggaggcrgagcttgcagtgagccgagatcgagccactscactccagcctgggcgacagaacgagactttgtctcaaaaaaaaaaaaaaaaaaaaagaaaagaaaagaaaaaagaaaaaaaaaggatggaacaaaggagaaaagaaactaaaataaagaaaagaataggtgttgagaaactagaaacctatgtgtggctaatattatcaaaataggagaaaataaaacagatgtagttaacctctagagaataatggaaatgtaagagggcttcattagttatccattgctgtgtaacaaactackcccaaatttagtgacttgggatcactaaatgagggatcdtgttccmgtcattccctcagagattttatcccttaattgcgtcttcccgtcattgcctcagagattttatcccttaattgtgtcagagagcagtgtggaacctcagagtcactctctggtacaggatctggaaactgaggaggattcttctccctcaggaccagagggagggtgatattctagtgttggtcccatctgtctccyatccttgtgggaggccagccygggagattacaggcgatcagggaggcgcccgtggtccctggtacaggtgtgctgcagtrtctccttccygttctccaggtatctgcggagccactccacgcacstgccctccaggtaggctstctgctgctccgcctcatgggccgcctcccacttgcgctgggtaatctgagccgccatggccgccgcrgtccaagagctcaggtcctsstttagggcgatgtaatctttttacagagaatcstttttacagagaatggggagataaccaggacaggatttatggacccagtgattccaccrtggggcataatttgtccaggttwattccctggcctctgtaagccccactgtgatagggacataatggtgctgtgggaatctgggcagcaatgttagctcacacccaatgttaacacttatcccatctcctgattaaatggctataggctcctttgcagaagggctgatggaattgtcccagcatgtaacagtcatggtgtcccaaggttctttctcttagggatatggatacttcctcagccactggattctgaatrtgaagcttgctcctcaattcttttttttttttttattgatcattcttgggtgtttctcacagagggggatttggcagggtcatgggacaatagtggagggaaggtcagcagataaacaagtgaacaaaggtctctggttttcctaggcagaggaccctgcggccttccgcagtgtttgtgtccctgggtacttgagattagggagtggtgatgactcttaacgagcatgctgccttcaagcatctgtttaacaaagcacatcttgcaccgcccttaatccatttaaccctgagtggacacagcacatgtttcagagagcacagggttgggggtaaggtcacagatcaacaggatcccaaggcagaagaattttccttagtacagaacaaaatgaaaagtctcccatgtctacttctttctacacagacagggcaaccatccgatttctcaatcttttccccacctttcccccctttctattccactaaaccgccattgtcatcatggcccgttctcaatgagctgttgggtacacctcccagacggggtggtggccgggcagaggggctcctcacttcccagtaggggcagccgggcagaggtgcccctcacctcccggacggggtggctggctgggcggggggctgacccccccacctccctcccggatggagcggctggccaggcggggggctgaccccccccacctccctcccggacggggcggctggccgggcagaggggctcctcacttcccagtaggggcggccgggcagaggcgcccctcacctcccggacggggaggctggccgggcggggggctgaccccccaacctccctcccggatggggcggctggccgggcagaggggctcctcacttcccagtaggggcggccgggcagaggcgcccctcacctcccggacggggaggctggctgggcggggggctgaccccccaactccctcccggagtgggtggctgccgggcggagacgctcctcacttcccagacggggtggctgccgggcggaggggctcctcacttctcagacagggcggccgggcagagacgctcctcacctcccagacggggtcacggccgggcagaggcgctcctcacatcccagatggggcggcggggcagaggcactccccacatctcagatgatgggcggccgggcagaaacgctcctcacttcctagatgggatggcggccaggcagagatgctcctcactttccagactgggcagtcaggcagaggggctcctcacatcccagacagggtggcggccgggcagaggctgcaatcttggcactttgggaggccaaggcaggcggctgggaggtggaggttgtagtgagccgagatcacgccactgcactccagcctgggcaccattgagcactgagtgaacgagactccgtctgcaatcctggcacctcgggaggccgaggctggcggatcgctcgcggttaggagctggagaccagcccggccaacacagcgaaaccccttctccaccaaaaaaatatgaaaaccagtcaggcgtggcggcgcgcgcctgcaatcgcaggcactcggcaggctgaggcaggagaatcgggcagggaggttgcagtgagccgagatggcagcagtacagtccagcttcggctcggcatcagagggagaccgtggaaagagagggagagggagaccgtggcagagggagagggagaggcagagggagagggagagggagagggagagggagagggagagggctcctcaattcttacatgcttatcatagatatcaagcagtgctcttgctgtctgcccatcttttctgaccctgggacaccaccctttattaagctttcccataactccttgaaggtcaagcccccttgactgatactctgggttatcacagtaagtgtgccctctatctttttcaggtcactgaaaaggagggttcctaaagcattcactcctgaccctgagggaggtgggtgcactcactccgggactcaggtgcaccacagataagcaaaaaagtcctcacattcaraattgtcytgggccacatgcagcccacgagcygcgggttggayaagcttgcatctagaacatatrcaccayaaggcccgaaatttttctgtttttactttaatgatgctttctaaatgcaaaaacagtyatatacctagcagaaacaaatgtcagttgaaggaatgatcatagagaaccactctattctagaggcaatatctttattaatgtagcctcaggacaaatgctttatttttgtggcagctacagaacaacatcatctcacactgacatcagtgccacyrgakcttttctcaccagggctgcttgtgtgtcctccctccctccctccctccccccacacyaactctmctgcacactgcagcacacaaccatatttttctcttcaggaaagataaccctaggcttatgggtccaattttccaaccacatatgaatctaaactagactctgctttataaattgatgagtttctmttggagccagcactaggattactacaactcagggcaggaagaagagtaggagwgcagaagaggagttccaacagaaagttacctatgatgagaaactaygggaccctgcctcttggcraatttcagaatctggttcctttaaaaagattgcagaaaagatggaaaatacaatgaggaaagagccctgggaagasggcaagagcttgaamgatctgaaaatttgtctcttgataccacaaggaccctggwrtgcagggactgccrtaggtgacatccaagtccctgtgatcacaggtcatggtgggacaaggttctactgaagggccaagtgtgggtggaggattactcaggtgccgaggcaagagactgaaggcacaaactgttttagtataataaagaaaatagttagaataagaatagtcataatacaaattagatatagagatgatcatgaaaaattatcaatcattattataaacattattaatcattagcttttaatattactctttgttgcattactaagataacctaggaataactggcrggcatagggtcaggtgctgaagggacattgtgagaagtgacctagaaggcaagagatgagccttctgtcacgcccgcataagggccgcttgagggatccttggtcaagtggcaatgccaatgtctgggaaggcacctgttacttagcagaccaygaaagggagtctccctttcttggaggagtcrgggaacactctgctccaccagcttcttgtagaaggctggatattatccagagctacycgcagtcatccagaggcctaaacccctccctgtggtgctgtgcttcagtggtcatgctccttgyccactttcatgctcctcctgtactcctggttcctctttgaatttcrtagtagawaatggtagaagaaatagtgaaagtcttaaagtctttgatcttaagtgcagaaaagaaaatggtgacatatgctacctaaaagggaagggccccctatcctgtaatcacgtgacttgcttcaccttgtcaatcagttagaagattcaccttccttaccctgccccttgtcttgtatgcaataaatatcagcgagcccagctgttcggggccactaccggtctccgcatcttgatggtagtggtcccccsggcccagctgttttctctttatctctttgtcttgtgcttttatttattacaatctctcatctccgcacacggggagaaaacccgctaagycccgtagggmyggatcatacagccaaggacaacrgagcagcaaagatgacccagctgagcagtgaccacataaagygcacggtggcctgagcacccactgggcacagccccatctactctcctctcatgcaacaaatcagcataagaaacwtgtggactctggaaggttctcatgtcttccatttattttgtctctcaaattttaggaatcttctcctttaattarcccatcaacctctcatggcaagaatttgaaaaagtaaatttatactcagattctaattttaatarggaagtaagaagttacagctcagtgcacataaagttgagayagagatggagacatctcagcctcacstctatggagcaggaatgattaattattggagasggaacacaggtcagcatgagggaagaggrtcatggtggacatgggggtgggttggtctccccacctcctcatattatgcctacaggaacacaggcacattcaggtgcctttgcagaaagwgagtcagggtttttgaagtcacaaagggaaggcgtgaacaaatcttgcctctcagtcccacasaaggcagctgtctcacactataaaataaaatattcatgaacaaattcatatccgtcacagtgagggrtgacactttaaacagcccatcacatgytcaatacatccaattcaaagaaaccccatagcacagctgcrtccactattgcccccaacaccccccacacatcaggtcccccagyktctcacctttacaagccrtgagagacacatcagaaccctgcgcatggtygctgcctggggtagaacaaaaacaggacttggtcagagcccasagragatgcggctagaggaggaatctggggttgggtgagctcccccatgggctcccgaccacaatatcccaaggatctcagggatcagcccacttcatacttacttgcagcttcagagtagctcactctatctgtgggaagaaaatgtcctatragaggccagaaaggagtcagggccatacggccctaaacaaaccccctagcctttgatccyagagaagtttcctgaaagtgtaactgctgatcyaggacaggatcaggaaacatraggaaagcaggtgtgggtcctgraccaactgccctcctgaggtctgtcctcagcagggaccttcccctgtgacttgtgactgctgggatcaggtccccatcatcataatcatcaaggtgataaatctgtccttcaktgtcacaggtgctttacaaaagagtaagtgctggcacasagggcscaggctgggtaggcccatgagtgtggatggtgcttcccagtaaccaggcaggacacacttctaactggggcttgaaaccctcagtgggacaagaaatctcagaccccactcctcatccattccttacctgagttcttcttcctgcacatcacagcagaaaccacagctccagtgactacagctccaaggagaaccaggccagyaacgatrcccacgatggggatggtgggctgagaagactgctctgggaaaaaaggggaaggtgagcgtccctgaccctcagcccccagcaccgaccctgctgaagttctccagagaggctcctgctttccctaagagacatgaccccccctccactmatctcytrcctwacyccatctcagggtgaggggcttgggcaacccctcatgctgcacatggcacatgtatctctgttcctctccagaaggcaccaccacagctgcccacttctggaagtttccatcccctgcaggcctggtctctacaagctccatgtccygagtctggtcctctccatcctgctgccaggtcagtgtgatctccacagggtagaagcccagggcccagcacctcagggtggccttatagtcagagayggaatggtggatcatatgtgtcttgstgggggggtctaacaggaagwgtcagaaaattcaggcactttgcatctctcatgagacactccagcagcacgcatgtggccatcctgagaatggacaggacacctggggtggggaagggagcacagaacccagacrccarcctggacacaggtayctgggataatctcctatccgtggaaaattcyagtccctgaggagggaacagtgwcttctggtcctgacctgagtgsaggctgagggactcagaagagctggactcagacccccacacacattgagtgtaaagcagagarcaaggcctgagrggaaaagtaacggggcccaaggctgctgcyrgtgtcaaagggaacccctcatcagtattycagggattgtcttcccttcatttcctcagagatttcatcccttaattgtatcagagagcagggcagaccctcagagtcactctcttgtacaggatctggaaacccaggaggattcctctccctcaggaccagagagaggacgacattctagtgttggtcccattttccttctctctttgtgggaagccagcccaggagatctacaggcgatcagggagrcgtcttgtgttccctggtacccgtgagctgcagcrtctccttcccgttctccaggtgtctgcgagcctctccacgcacgtgccctccaggtaggccctgatctgctctgcaaattcttctgcctcccacttgcgcttggtgatctgagcckccatgtccgccgcggtccaggagcgcaggtcctagttccgggctatgtaatccttgccatcgttggsgtgctgttcatacccgcggaggaggcgccsttccagccccragtcgcagccatacattatctggagggtgttagaccctggccccgcccccgckgtcagccccgcccaccgagccccgcccccgccccgaccaacccgcggggattttggcctaaackgaaaatgaaacctggtaaaggckcctgggcctctcccgggtcgaggatctggcgggtcccgcagcctcggggtggrtctyggagccggagactcgcgggggggacccgggrcgtccgtgggggatgaggaggggtcgtgaccttcgccccaggccggggtcattcaccggcctagctctggtggtagtagcggcgcggcatgggcaggttcactcttgtcagtctgtgcgcgggcctgatgttcsgtgtgctccggtcccaatactccggtccmtcctgctccaaccackgcgmctgcggctacatcctcggagtcgccgcgtcgctgtcgaaccgcacgaactgcgtgtcgtccacgtagcccactgcgatgtaccggggctccccgcgacccggccgggacacggcggtgctgaamtaccttatggagtgggwacctgggggcgaggaggggctgagacccrtccgaccctcctccttgmgckgctccccgggtcctgcgccccagtgcgcgggcccctasctcctccccgcagaggycatttccctccggatcccgcactcacccgcccaggtctcggtcagggccagggcccccaagagcrgcaggaggagggttygggwcgccatraccccatcctcggcgtmtggggagaatctgartcccartgggttcgcggggacttctggaacagggaccccagcgacgccgattggcttcgctagaaacccgacaccaaatgggrgtgagaactgagtccacatcctgagtgtccaggaagaaggaccctacataagttgggagagggagaagagaaactgcggagatggggaatccccaaccctgggcctccccaatcaatacawcgccttcggggcctgaaaccctgaragccacgcctggggccataggrcttcgccctgaccccgctcctcctgtgccaagcgctcwgtctcaatgtctccctgagtcttggcccaagagctgtctgagaaaccagggagaaaccctcgtcatgggccccgtccctcttcatttttcatcccggaatccccgtcccagaactggactccctgcctcccactccttacctatttccctgaactcttctagaaaaaaactcaccccagggagcttggtgacagagagggagctcgmcgccagagaggcagagctcgccctgggaatggaggcgtagagacaggtttttgttttttttttctttaaatccggaaaagttgtgcctgagtacatgagacagcatagagacaagttttctctttgtttattaactacagtgggtagcagaatcttggcaacccctaaatgatcaggwatctaatcggtaaaaaatgtaactttggccccttgatvmataaatgtgtctgaaagcattacaacaggactcacaaagctactaagtttgactttcscagacaatrtatctgtgactcccgcttgttttttacatttaccttcattccacagccctgagttactgggtgagtccaagacatctcctcaatataaagtagcacactgygttactatatgttgcaaccgggagccagtacagactttattcacctcacagttgcaartgttcaatgcagtcacaatgcccctcagcagtgctcatgygctgcctgtttttaggaagtattcacgtctaagtggtgtgwatatcttataggaamacttagtatttttaaaacctgattaattaaaaaaaattagtttctaggcagtcccaaatatagtattaaaggccaactgcaaagaaggaacactaagtrttttttaaaccttattaacataaaaaacattagtttttaggcagtcctacattaggtattaaaggccaactgcaaagaacactgagcgaggctctgtagatggatgtaataaaaatctataaaacaatgtgtttaaacctaagaattctactgctttccaattccttccctctgctccttttcctaacctcctgcttctccagcccttccctctgtccctttcayscctcaggccctcctctccccttagtccccaccaccctgtcacttctaaattgtggctctagcattgtcccattacctgctamgtgactgttctctccacagtggycctgctcctgtgagtcagagtgtgtcatttcctcacctaaaacactccagtggctccacctcggtcttgtgaagcttctagaatgtcaggcacrtgagcatatgagggcatacctggttcatcttaggcactaaattaatttttgttgactgaatgaatgaaatatgaakgtattaaattgcatcacagaaagttataaaatgtaaaacactgaaaaattaagaaatattttatyttatgtaactagtgtgcatatcaattcatccgagtctgttgagcctgtgtatgaattttataagattgcataacaaattatcacaaacattgactttaaacaacacccaattattgttgatttatttgtttttagagacagagtctccctctgtcatccagggtgaagtgcagtcacatgatcatggctcactgcagcctcaaactcctgggctcaagggatcttcctgcctcagtcttcagartagvtaggactgcagrcaagtgccaccacdcccagcwaattaaaragaaattgtagagatgagtgtctcactgtttgatcttggctggtctcaaaktcctggatgcaagtgatcctcctgtgtcarctyctcagatgttaggattgcaggtgtgcattaccacgcctggccaaacaacacccatttatctgtttatagtaccttagtcagaaatctgggcatgatgtggatggaatctctgttccgggmttcccaaagctgtgttttcattttgaatcctccttcaggcttatacagaggtggcagaatgcagtttcttgcagttstaagactgaggtccsbgttccttgctggctgtcaatgtagagaacagggagggctgygctcaattcctgatgcccaccagbrttcttccctgtacagccccttcattttcaaagcccacagtggaggaaacccctcatgctgaatccctctcacactgtgaatctctatgctcaggaagaacccartcctttcaaggactcacctgattaggacagtccaagcagcataaacccagcctaaagtcaactaattgaggcccttaattatatctgctaaatccvttcacagyagcacctabattagagttggttgaataabdgggggaaggtgaatgaccaggagcttgttgttgaggccatcatagaatcagcctagcaagggctggrtcttctttttgtgttcacttgggacayagttgcaaaytgaagttcaagtaaagtaatcattgtgracggtaataaaatacatccttttcagccabgraaattctccttaccttttaaaactaagttacatatttatatcttttaattaatttaggccagatttggtggctcrcacctgcaatcctagcattgtggaaggcagaggaaggcagatttgttgactccagaagttcaagatcagcctgggcaacatggrgaaacccccatctctacaaaaaabtagaaaattagccaggcahrgtggttcatgattgtactcccagctactcaagaggctgaggtcagagggtcccttgagcccaggaggtctacactgcagtgcatggtgatcatgccactgcactccagcctgggtgacagagtgagaccctgtctcaaaaataataataatgatgatgataaatttagagcaaatgcaaattaayatgtaataatacatcctstcttgtgaaaatgtattagttatttactattgcataacaaattatgtaaaatgtaccatttcaaaabaacaaatattgatcatctcccacagtttccarttgtcaggaatccaggagaagtttccctgagtgcttcttgctaagggcmtctcacaaggttgcagtccagttgtcagtctaggcctgcatcatctgagggcttcactgsggctgaggattcacatgaaacatggatcagtcacatggctgttggaaaaggcctagttcrttgtaattgrgtcccagaaggcctcagttcttagccagatggaccttcctgcagggctgctcatggcacagcagctgactttccccagagctcatgatcccagagacagagagagagaaggtggaagckrcagkgagttttaggttctacacccagagtcacaagctgttabgtcggcattgytcmatcagttagaagttgtattagtctgttctcacactgctataaagaaatacctgagactgggtaatttataaaggaaagaggtttaactgactcccagttctgcatggctgaggaggccrccccaggaaacttacaatcatggcagaagtggaagaaaaccygtccttcttcacatggtggcaggagagagaaatgcagagsgaagcggggaaaagccccttrtaaaaccatcagatctcatgagaattcactcactatcattagaacagcatgatccaatcacctcccatgaggtycctccttcaatactggggattacaattcgcatgacaattgragatgwgatttgggtgggaacacagaaccaggccatatcagaagtgcatcattaagtccaagccacactcaagagagggaattmrgctgcacctctggaagggagcagtattaaaggatttgcatatatgttaaaagcaaaattcaaactattrtttcaggatttttaagttaaaggcttttaatctaaytatttttccttaacattttaatcttgtcctttaatttaatttagtttaatkttaagttccagggtacatatgcaggatgtgcaggtttgttacacaggtaaacgggttccacggcagtttgctgcaccaatcaacccataacctaggtattaacccctgcatgcattagccatttttcctaatgctccccccaccaccgccctcccccaacaggccccagtgtgtgttgttcctctccctgtgtccatgtgttctcattgttcagctcacaattataagtgagaacatgcggtgtttggttttctgttcctgtgttagtttgctgaggataatggcttccagcttcatccatatccctgcaaaggatttgatctcattcctttttatggctgcataatattccatggcayatatgtaycatattttctttatctagtccctcattggtgggcatttgggttgattccatgtctttgctgttgtgaattgtgctgcaatgaacaaacayatgcacatatctttatartagaatgatttatattcctttgggtatataccctgcaatgggattgctgggtcaaatggtatttctggttctaaatctttgaggaatcaccacactgccttcctcattggttgaaccaatttacatttccaccaacagtgtaaaagcattcctatttctttacaacctcgccagaatctgttgtttcttaactttttaataattgccattctgactggcatgagatggtatcttattgtggttttgatttgcatttctctaacgatcrgtgatattgagctttttaaaatatgttttttggccacctgtatgtcttcttttgagaagtgtctgttcatgtgctttgtccacttcttaatgaagttgtttttttcatgtaaatttgcttaagttctttttagrttatgaatattagacctttgtcagatcratagattgcataaattttctcccattctgtaggttgtctccttttcgctctgatgatagtttcttttcctgtgcagaagctcttttgtttaattagatcccatttgtcaatttttgcttctgtggcagttgcttttggcaatttcatcataaaatctttgcccatgcctatgtcctgaatggtattgcctagattttctttcagggtttttctagttttgggttttacatttaagtctttaatccatcttgagttaatttttgtgtaaggtgtaaagaaggggtccagtttcaattttctgcatatggctagccagttttcccagcaccatttattaaatagcgtttcctttccccattgcttgtttttgtcaggtttgttgaagatcacatggttgtagatgtgaggtcttatttctgagttttctattctgttctgttggtctatatgcttgtttttctaycagtaccatgctgttttggttactttagccttatagtatagttttaagtaggatagcctgatgcytccagctttattctttttgcttagcattctcctggctacacaacctcttttttggatccatatgaattttcaaatttttttttctaattctgtgataagcttctctttttaaattaatgattaaatgtttgagacatgacagagccttgggtgctgcagrgaaaacagtttgagacagagaaaggagaaacaacagtatctctgmgtttytcttgtaaatacctttaataacaatgttyttcaataagttaacacagttgagaacatagagtaactagatcaaatagttccaagacttcagtgccataaraatsatgccttgaaaataagtctttgttttgtctaagatgtctcaaatttagtggaagtatgccccaagygccaattttcttattgacatatcatcttcagaaaacatttgcctacacttaaaaaaaaaatacacacacactgctctgtctatggagtagccattcttttstttctttacttctctaataaacttgctttcacttagaaaaaattgcataatcagattgcttctcatttayaaaaatgggaatctcatacttcagtcaacacatctagcttagcataatgccagtaactttggtttgatgcagtagcccaaaatgcttaactcgaattgagaatcaaattttttccaaaaayggctcaggggcattctattgtaaacttaacatttttkggtgtggtattgcatgagatgtgrtagaagtgatttggacactactacagttctaaatagcactgctrttatgtgcttctgaagytttctttttyttttttttttagctgtctkattttgctttccattcatatttgctattccatcactggttgttcctttctactcttttcttgtttcatttattttgatcagtgatgtgtatttccawttctgtgaaagtttaattcagttgtatgtgtggtaaaatgtaacaccaaatcctttgcaagaaggaattaccttgcacatcagattgaacattgtatacttgaaaatccagaragaygccagtgagctaaggatcaaatgamctattattaaccaagrccattttcatcacatcctggtcctctctgtcacatggctgcttacatttctctgtggttttctttcaatgtaagtagttcttgttaaggatccttgcaatgaactttggtattcttttctctttcatttttataaataccaggtatattttaatttgaaaactctgtttaacaaattayaatcatgtaactaaaaagatgcccagcactggtgtaaaacacaaacctgtaaagctcccctgggctgctgcccagtcacatcccccagagagagactccatcctgagtcttgtgatccttattcctttgtatttctttaaagatttgcacaatgagtatatatatatatatatatatatatatatatatatatatgtgtgtgtgtgtgtgtgtgtgtgtgtgtgtgtgtgtgtgtgtatatatatatatatatacacacatatatatccaaaaaaaattatttacttctgctggtttttaagcttcctgtacagcaaattcctactgcrtttattttcccatgatgcacattacgtacaggagttatctgtggtgtgggaggctgtcattcattcattttcactgctgaaggtttacattttatgccacaatttcctattgatrtatatttcctattgatgtatatgtggctgattccagtttttgccataaacatmagtgtgcctgtctcctgggcacataggcaagaaagcccgctagagtgtrtggttaggagtgggagggttggamgatatgttgtatggactttaaccatactagataatgataatatgatttccaaggtgattgtgtcaacttaaactcatgtgttctgaaaacacctagtygaaggaattgagttaaaagccactgtcttggctgcagaattatagcaggcatttttattcagactctrttaataacttcctgttgtttacttgtttctbatataccatggtattatacttttgacatatagattcagaaaatrcttactgatarcacaatcamgtaggggttatttaatatgttaggaaaatttcataataaaaaggaaaaaatggaggaagggagagaaagaaggaggaattgaggaaggagtgaaagaagaaaagaaggaaggggaaggggaagaaaaaggacggaaaggaggaagggagaaggagggbgagagatwgaatggaaktaaagagggaaggagggacagaaggaaagagaaaaagaaggaacaaaggagaaaagaaactaaaataaagaaaagaataggcgttgggaactggaaaccctctgtatggctaatattatcaaaataggaggaaataaaatagamgtagttaacctctatmgaataamggaaatgtaagaaggctdcattagttatctgttgctgtgtaaaamactacccccaaatttagtgacttacagcaacaaacattggtgaactcaaaaacataatacaaataccagcaaaatggagccaatgcargtagaagaagttgaataaacaaaaagattttacacgttggaataagtaagaggtcactggtgtgcagacgaaaatgattttgtagtccaaatgcthcaaaaagcaagtrccatcatrrgattaaagttacagcattttattaggggacacacctgtcagacgatatggkgagggaggtaggttaccctgggaaaggcaatagaataagatgcaagtgtgacccccagtgatggaaagaaggaaggaaggattacttaacatgtcctagaccacaggcaatctaaggagagttgagcaaggchatggaggagtcctccagccacagctggccatcagaggagtcccctgtcttccaggaatgtcctgccttagtgtcactggtgtgacccatcactggttgggaatagtccatgggaagcagggcctcagcaccaatgccactgaggatgtcagagcacaggrgcacrgchttggaggattacccaggagtgtgactcaaaccttctgccctgatgggtctgggcccttgraaatcaaatcctctcaggctgaattgctggataattctactcwcacttgcaatggggtgagggaaaacagaaggcccccaggtggatctctggtttccacacttctgcctttattgtgtgaaagtagccatgcctchtcctggggatgaggatctattacctgggcctggagaggaggagackcctcttctcaccaggtggtctctgggcatatactgtccacacttctctggtgacamacttaatgtgtagttcagtgggctgtcttttgtctscttttaagggtaccctcctttgcaaaccaggacctcrbaccctgcacagcccagtgttctgagataaaacatgtcaaataccccattasgtgaatctaarasattagacatggagccatacytgcttccaccgtttgatttctggacccacatgttcttcctcttgcraacacagaactgtagagacdactctgatttaaacaacgcaccatgtcctgaaagatggcaygcaaccctcagagtgyttcctccaggctggcacttagttgtgcctgtggaagatcacgggactccaagcaactatgtggttccaagtgcctgtgtgacccagaaagtcatagattgcacaggccaaacagcattcatcatraggtgaaaatgrtccacctgggttgagcttgaatcccatgttgacacccacagaaaacagccaagtctgaagtgtcattaaacaaygaaacagacmaatggaagytagccagccttcactatgggtcagcccatgcatgataggatgggcacatgaatggaacaaccacagtggcaggtgtgaggctacatatggggcattccttgtggctggcagcccctggggagagtagctggtgatagggttagtggaagsaacagccatggaaacactgaatctttcccttgccaagtggrtccttcaggcagataatgggctaggagcactgcctagcctgcagaccaggaatgtcaacagcabcyagagartggtactggctrtgtctgagagcaggacagaaaamcccccctagaataggtacctaaccctgtgaagatgaacctctggtccttccaggatggaagtaggtaaatgtagtcaacttcttagttaatgrctagtcacctaaagaaatagtgccccactagggcabatcatgggcctaaaatgctgatgagttggacattcagaggtggcagcagctggatctgccttggtagggggaagtcagtgctgctggcmctcatgcctgccactgtggttgctccattcatgcacycatcctaccaggcctgggctgacccatggtgaaggctggctaactkccatttgtctgtttggttgttcagtgccacwtcagacttgggtgttttctgtgggtgtaaacgtgggattcaagctcaayccaggtggaccattttcacttcatgatgaatgctgttgggcbtgtgcaatktatgatgttgtgggtcacaaaggcacttggaaccacatagttgcctggtgtcctgtggtcaagcwttctatcaaatcagkacaaggaacactaaaagttgcttctaacagggggcatatgtctctgctgtggatgayahgatcttactccagaatcccaggcccttcactgtgactctbccactggtgcttggttcwgctccatcctgcatctttccccacmactggcaccaccagccccagggggtctgagggacgctggctgctygcaccatggcctggatctgctgcagsgtcctttcctgtgtaggccctacttgaagctggcctcctcctatrtcacctagagtgtttgccaaagcacgtacctagatgtggaatgtggtgttgtcagaactcavagaggctcatcaggcagtgtgcttccttccttctggtgaggatgcaagatgaaacagtttgtcttttaccttggrgggaacacacctgcattcccctaaacacttggcacttgttaacccataaaacttcacttcagtggccactcttgaagctctgtaaggtttatcttcacatactggagtgcrtgtgttttgccaatgactccagtgcactttctacctgctgctcattcaccgcagtcaacatgaagttgtcagtgaaatgagctgatttaatatcctatagaatatccagtatgtctagtattgtctttagaccatactatataggghaggggagttacaatagccctgagaaaaaactataaataaatgtgttgtggatcccacatggatgtgaatcrctccatatcccctttctaattggagtggaragaaatgcactcaccaaatccatagctgcacgctgtgtgcccraggctttattattctgctctgcagtkatatccagacaacataaaagctgcaattataattcctgcttggccagrcctggagtaatctcattcattctttagtcctcatcaggsttcctcagggacaggttgctggattatgtagagacaatrgacaaccccaacaccatcccacatccttcagctctctaatggtggtgtgacbcccacattactttcagtgtcttcctcaagacacaccctgggacacactatgattttttttttttttttttttgccagratgtgggcagcgtcagaggtttccctttggctttcagcacaatgagadtcctgactccacagactagggacccagtgtgggggtgactccacttaacagtgcatcagtgtyaattatgbactcagggaattggaagataaccagggctgggtctatggawccagtagttccattgtgggcbgtaatgtgtccaggtttactccctgacctccgtaagccccactgtgatgggagacatgatagtgctgtgggcatctgggcatcaatgtcagctctcactcagtgtcaataatctgahcagttctgcatctttcctttcgccagtgtacaatctcctgagtaaatggctataggtwcctttgctgaaggactgagggamttgtgccagcatttacttccacggrgttgcagggtattcctcctagggatatggactcctcctctgtcactgggatctgaatctgaactttggctgaggtctaggcattgaggatgggatcatgactttgtattgggtcaaacaccttcaccctcctgcttctcaattcttgctttcttatcatagatatcaagcagcgcccttgttggcttcctgtcctaatcctgggacavcaccctctactatccttccccacattccctgcagcttgagtcctattggctactccttttagtttgccatagtaactctgccctctggctttttcaggtcactgccaccatttggtctttgtstcttcagggccacactctccccagggwtattaataaatgbaactctgggtcatctttactaccatcacvbccagcctgcagaggacaacaccccgacayttcttartgatgcaggtccctctcaccatcacgtttctgaggctctggtggaaggtgtttcctttggacbstcttgtggagcatggtactggtgggccttcaccatgcccacttccctcagccttgttattccatcctgtgcaagttccagggcaactaagthahgtctaccttgttgagagttrggcatcattttttctagtctatatggattcaccccagcrgtgggtttggccccccscttatcaaagtcctggggtgtttgataaacccatgccttgagaaagtgcctccaagccaaaggatttttattcttccagvttgaaattctggttccttgatcaaacaccctcaaattccaatcccagaagtgctcctcrgcctcctatggggacgtgccagctagttcctgcaaagctcttcagtgggattcctgctgtatcatgggggtgagacttctgtagcatcttccagcataggaagtgggaaccattactagagaagggtgagcctcctatgcatgcccagaggatcctggagggcacccatcggataaccctgttcctgtttgcagaatctcaggtttccccaccagggtcctgactttcctstaacaggcctgccttggctgagtggcaaacctctctggagcactgtggccctcatartgatgtcttcagctaccattccacggtatctgccctttcgctacaagagataaagacctstgcatgagacactgcagaggctgtcacatgtagccagtgacagctgttaacaatctgcagattctcatgatactttcabagggcatcattgcagctgagcagyaaccagccaactccactgtctttgtaggtttccccctaaccccgtcattattgtgcagggcattctatcaccccacctgccatagcttcccctaaccagggcatcctctcagctcagcackggtgagacccatagcagctcrgctgcatchtgtgctatggaatttctgtgtctcccacaaccctggtggcatcctcttggcctgccaggcagtgggcaagcttttttcaaattctcatttttgcctgttttcatggatcacccttcatactacttgtgttagttagggtcccctgaggagcrgaccccaatacagtattcaatgtgcaaggatttattrgaggaaatagttatgagagaaattcaggacacagacggaaaatgctgggartgtcatcagaccacaaagcaactctgarccccagtgaggtaaacagtgcaggaaggtcagctggaagcatcctagaccctgtgcaggctaacagaagttcagtaagcgtggcaggaagccctagagcttcagtcagccttcagagaagaaatgttcctgccttagtttctgccctgctttcctcagtcattggcaggaaaagacagggggcakgtgtggtctcagagcaaatgtggcaataggtttcaggattcaaaagttgaggccactatcaattctgcttactctagctgaggggctgggatgtgcattctcatgactgccacaatgatccagtggggagagaggaaaaaggttgatgataragagaaaaaaaggtattaattgatgaactgacacctttaagtagatgataagggatgayrtttkgggcaccagaagagggaytggctctratgggagcagaatggtttacccacaacagtccccracatggtaaaacacctgacatgtgttgcagctgcaaatgcatgagcagatggtgatggaatctgtcttctaatgtgttcagttttctcagtgaggtaggaaccaaggttgtcagctgagataagaatggggaaggagggttggatgtgtgagcacagagagaaggtgtgtaagggtcaccyaggccaggaggaggctgagggtragccatgcagggagagggtgattgctggccctggtgggggctccccatgtggtttgggtcatgaagttagagaagacaycaacgatgagggacagtgagtagatggyrgaatcactggattggtattcccagggtgggggtcgaaggattgttggaattgatgtgctaaagggtggacttcaagcctggaatgcaggcacataygcaatgagtagtcactgatattacctcacagcatatgataaartgatagagtctgtgtcctcagagcctgtggccaccttgcatgggatgagtggaaagatggccagagagtgggaagtgtgaaattgagagtatggaagggctggggtycttgggcatgatgaggcctaggggatgacaggggcaygagattcaggcagagagaggagaaggtcatggaggagaggagttccaggatctgagagtccagggagcaagggcatcttctctgctgtataggtgtctattgctgccataaraattaccacaaaccaagtggctttaaacagcacctaattatcatgttacagtcctgtaggttgcaagtccacacagtcttatggggctaagatcaaggtatgggcaggtctgtgttccctcctggrgactctggggaagaatccatttccaagctcattcaggttcttgtctgaattcacttccttgcacatagaacagaggtttccacttccttgttaagagccaygcttagctmctagaatcttctttcagctactcacacatggtgcctaagkcacatccaatcctcctgcttggaacgtctgacctcccctcttctatgtctcctctgccttcctcctctgcagaayctgactccagccagggcaggttctctgcttttagtggctcatttgatttgawtggggccacacagattgtccaggagaatctccctattttaaggtccttaatcrtcrttacatgagtaaagtcccttttrccatgtaatgcaacctgttcacaggttccaaggactaagactggacctctttcgggaccattactcarcccaccacatgttgaagtcaycaacagtcaaggagactgctggagagggtgacagtgaaccaagagctacaagagtcaggattgagaggaaaggccaggggcccacagggaatggctacaatgaggggaatgggggtctaatctgatgacagcytaggggttttagggaggagggaggcagaaagttctgagaaccacagtgaggagmaaggwccccacctcacctctgaacccaggggtacaagtccatgggggaaactcccctatgtgggaggacttyrgagggggtcatgtcctcagggagaccaggttgctgctggagctgkgaggtgcaggaacatcctgagrgagggtgtggaggttttgytgatcattgactgagattccagggggtgcactgggaagatttctgtggttyrggaggttggggagmcagaatagtggtgtkcagagccttgtggggatgtgagtgcagagtatgtgggggacccagtgtcactgacacaaacagggaaaggayatgatgagctgagtcctggtggactyrgcgcagacaatggtgctgaggctgtgggagatgagggaggaggagcaggggtggctctcacctgggctctgtccrtggaggtgaggacaatgaggtrgttgkgtctcagtgctgtgtggaacttkyttttgacctccttatgagtggatggtctgtctgagatagaacgggycttagaggatttactcattaccctgagagagggggcgtgttcattccaggtttcaggtctgccctgacacctttcttkgtggcttagacctccctactgtaaattattgggtgttagtccattytggagttcataacttaaagcagaaactcagakggttgaaatgtcattttcatgaaggatttttattagagtrtcatttagattgcctttgcaacctcccatgtgttttgttttttttctaaarggctgctaatcttgttttaaatttgcaatgtagttaatttatcttcactgttaattagttgtgggttgtttaaccttataccrtatagttttacatatctataacaacagtagtttgggcctcttgtattctaatagttaagtccttaagctgtgtacacaytgcaattcaagtatgagtcatgcataaccgtagcactaagagacaagagggaaatccctctctcctaaaattttgcaaaagttctgggttttttttyccactgagtgggaacwagtcagctaatcatgaacatgaggtctttggcctcatttaaaggtgcttcagaagcactgagccataggaaggcctctttgtctaggtccrggaccctacaccatggcagaagccatcttccmtcccagtgtgcagtgatgtcccagatagcgaattggttagccacttttcagtctcrggcagttttgttttycaaaacatgggtttttatctcaggaccttcttgtccccagatgatcaaaaccrgggccatccactcccttctgagccacytctgcctggggggccygyggctgtgtcctccagtcacaacagaacaytccttcagaacacyygcaggaagacaacatcttgtcattggctcacacatgcacggtgyrtgcacagagctttggttctagttcaggaggtgtgtggggaggaggctcactagtccaacagagcttggtaccagtgtcrtatgccaggagccaaggttacaaggatgcaaagttcccagacctaccagagaaggcaaacccytgcagcatgcagggctagacaggggcaagaaacaaggtcattccgggccagcaggaagagrgaaagggaaactacagacgtacmtcagagacactgcagatttggtttcagaccatggcaacaaacaagtcacacaaatttttgtttttccagtgcatagaaaagttatattcacactctactgtagcctattaagtgtatgatagcattatgtataaaagaactatgtatataccttaatttaaaattactctattgctcaaaaatgctaaggatcatctgaggcttcagctaatcttaatctttttgctggggcasggtcttgcctcaatgttgatgaytgctggctgatcaggagggtggttgctaaaggctcttatgrcaacttcttaaaataagacaatgaagtttgcggcatggattataaagggggaatcagtacttaagtaaggtcaatataagttttcaagtyaggtggacctgaatatgaaccctccaggcctttccaccagctagctatagagccttggacacatcttggccatagctggccctgacagacactykcccagtggktgagtgctcartgaacccctctgagccagttgcctcacccaaccagtgatataattccttccttgcagaagaataagtgaaaaaaggcacagtgccaagagaatcagacacacgacctgcggaagsctgygccagtgctctaaagcaagttctgcctaaagcggcagaaacatttttcacattaggaacaggagttgtttgggatcctgtctggggccagsttgagagcagagcrggagtgggggcctgggtagggccaggcactggagtgaagacaggcctggagagagcctcctgaaggctgctgagcggctcagacagctccttgcctcacctgcsacagtcctcccactcccctggctctctcggtgctgttttcttcacctcctcctgccctcctggtccctggcaccccagggctcataaacatgctgctcccaaaactccaaggcaagtatggaagggcagaacagcttctgggacagtgggaagatgaggccacccsctatgtggctccaagtgctcgggtggaggagatgaagggatcagtacagtagtcgggggaaattctctcaatcccaccctgcaytaccctcacctctgcagctttttgcctatttccaactctcagctccttccacccccaccccarcccagccctcagggctccctctctccagccctccctctgcccagagcagcacagtccagagtccttgaacaggaattccccctcatctaacagttaatcatttattagtggggacagacayctggtygtctctttccrgtgaccccatatcctcattcaaggcatccagatatagcccctgagccagggatctgtatctgccctccagaggcctatgcccaagacaggttgctccctgggattctcastacaggtggacttaagctaatgggctggaaaaagagaaaacrasgtcgaattcctcacttaccatgagatcttgcaacacaggttccaagggcctcaacccctctaccctggctgatgytccctcctcyactccctctgaccagggccctgagccccccacacagctgagctggcccaagctgaggagttgcttgcacagcagctggagctggaccaggccctcctggaagggaaggagtcggtgggggcccaggccctggtgctcaagatccaaaagctaaagaaacagatgaggaggcactgagagagcctgggaggagagagcctgggaggggacasccaagcttcccagcagtgcccacagcaccctccatgcctggaactaatgtgcaccacccccaggagccccaggatcagaaacaccccagcatctcccaggccagagaaagcagaaragaccccacaaagggctggcaattggcaggtagtgggggagccagggctctgcagtcttagtcccatccctctttgacctcacagcagggcaccaaggccttrcaggaatttaccctgggccatgccctaaaataacctcaccccaaataaaataaagggagagagcacccacacataatgcagakgcacttgtgtttcatttttagttatgttaaaaattctgacaatcaggaatggggrttcaggagtggtgctgargcagaggacrgaagccagggggtgggggaagaggatgtcaggggtggggtcagtagagtctccttcacccccaacctgcagtctcctcctgaagcgtggtcacatgccagaatgggctagtcccctactgtgtctgttcaactaaggggaaaatgtggcmtggtgagaataaggmatgaaaaggaaaaagtgaggcaggagcacacggcacacatgcagatgctggtgtactgtgtgggttcasaggacagacttgggagtgggggaagagatgtaatatgatgaaagaaaacagataccccacataacggtcagaaaaacatcccaacacggcatcaaagaccagggtgcatgaagcagccaagtgtccattatgcatcaggtgcccatgacaggattgaagacaaacatattaaggaactaggaagaactaaagggcttcatgacatcagcactcactgtggaggagatgtctgtctcatcaggcagctcactatcactgacctcaaagcgatgctgcccatactraggatcctggcattattgtcacctgacacaaatgtgatggtcaagycctgtgccacctggaaggggatagagggtaggataggactagaagacccaaagagggaagactcycagagggaaggatgaggatrtaaagtgtgaaaagatacagaaagtaaggaggtgggagagtgggtgtccctctgggtgtggggcttaactgctgcaggtaggtctcagaatcctcatgcatgtcrtaggtaaaggcaatgctcatctgctccatgtccatggctcagccaaataagttggtagtcaacaaattgatcttatcttttggggtcattctccagcaagtgcagaacagtaaaaaaatktagtcacctgaggtgcatatcttggcttcctggccagttttcccaaggcctccactgccaccmtgcaccctgggtgccctccacactctccaagtgtccwgatgtgtgtgaggagttaagggcaggaagaactatwggatcgwggatttaggtgcctttttccacctctgcaggtggcaaggtgtggattcataagctggcattgaagcgagttctgtcctttgtgaatagttgtttggtcacccacagtcatagctgagccctgagaataagagaaacttgtctagaaaaagaaattgtgttgactcttaaatagacatttctggtctgcgttttatttcaagtgtctgggaagagatagagtgtgaggttcaggagagaaggagaggtctgtcttgatgctttgacacagcaccaagaaatttcccctcctcccccacatcgccccgccagttstcagtgagggacagattcacagcagtactgaaagggctgggaagagatggggagacatctggggccaatgttcaggggttgaccctgtgggaggacacctgccttcagagttagagcccacatgtgatgaygtagagctgaagggtgatatcaggraggtgatgragagtgctttggggtttcctgattatgaagagcagaggtcagtctgcttcctgggtgaagtgactgctggggagattggattgaattaatgaagaataaataaacggggaatgaggataagcaagcatcagcatctcccaccatcagttcagactgaggggagwttggattgaattaatgaagaataaataaacrgggaatgagkataagcaagcatcagcatctcccrccatcagttcagactgaggggagtttggamtgaattaamgaagaataaataaacrgggaatgaggataagcaagcatcagcatctcccgccatcagttcagactgactggggaggtgggatagttattgactctgttrcgtggttcckcctaacttcctggtcttggggcacacagatgggtggtgctgttcktggtcarggcagcctcagctccacccaggtaaggcagtggtggcagagagagttagrggagcacctgtgaaaccgaccaaggcagrgatgggagccctctgtgcagcaggagtggatgcaggacctgcctggaagcaagaggabgagggaacctagttgggtcctgttccctgcctgcctgtgttcrcagggtaaccagtaagggagctggggtagggaattctttcataggttatctagccagagatatgtttatagacatrttctttcatgtttatattcaggtttgttgtcacatagacatttatccatgcgtgttttatgtttgttactttagaatggctcagtcacaaaakcttaatctcttcattcctgctgcctctctacacacacatacacacacattcacacacatgctatgcaaacatgtctacctgtatctacaaagagagatgttattttatttttaaatttttaaattcgtatatatthatggggcacaggtgcagttttgctacattgctatattgagttgtrgyaaagtcagggccttcagtgcatccascactggagacagatacattgaccccaacaagaaactcctctacgatacacccactgccaaccactcttacccttctgggtctctattgtctatcattccacacgctgctttcatgcatataaagagatattaatcagatatatcagagtgataacttgaattttactgcactattctttcagcttctttgcacatttgaaaatatrtacaattataagttggaagaatgagggaamaaaaagagygagagagagtgctgaatctgaataggctaggggttgggtctcactaggaacbataattgatctctgccattttgaaagtrtggccccctgagctgccttcagagagtcctggagggaaacctgttttcacagtaataccaagatgccatttgcctgtttcattatgbtgacttttccattaatgctgcaaatgccaaggtcggtarcacacccagcaccttagcagaaccaaggcagtggctccaaactgcagtcccatttaagaatgcctttgatggagcagtaaaatatttatgttcattaaattttgatccttgagtacatgtctttaatattctttgtgagaaaatgggagatatgcaaagagaagcaggatagtagtcttgagaaagggcacttgtgtagactcagttatgagttcaaccagcagatctccttcacccactgaaagacaattgcattatttccagtttatggaagtaattatgaataattacttccaggagtattatgaataaagctgcaagagtatttgtatacaggtttttcatgaacataaagttttcccttgtttgaaataartgcctaggagggcaattkctagtcatatggtaaattgcatgttcagtttgaagaaaactgcaatatccatttccagagtggctgtaccattttaaaatccattcctaccagcaatatgaatgatccagtttctctgtaaccttgccagcatctgttgctacctttattttgtatttcagccattctcatcactgcagttttratttgtattttcctactggatagtgatgttgagtgtcttttcatctgyttgttagcctggtgtttatcctcttcagtgaaacgtctgttcatgtcttgctcattgcctattgtttatttggatttcatttttactgttgagtttttacatttcttcatatattgtgaatgcaagtctttattgaatatgtgrtttgcaaatatcttctctcattctgtagcttgtctttttatgctcttcataggtctctcacagagcaacagttttaattttgawaagatccagtttagtaactttttcttttacrgatcatacttttggtgttatgtgtaagaactctttgtctagtcttagttctgatggctttttgttaaaagatttgtaattttaattttttaatgtatttgttatttatttwaaaaaaaatcttgcctaggctggccttgaactcctgggctcaagggatcctcccacctcagtctcctgagtaggtgagagtacaggcctgtgacaccacacctggctcaatgtttgtaattttaactgtgtgttttacattaaagcctgtgattcattttgagtttttttttttttgtataaagcrtgaggtttgggctcagcytattttttttccactgtggttgtccagttgctccagcaccrtttgttgggaaagctctccttccttcattgaattgtktttgtgcttttgtaaatgtcagttgagcatatttgtgtgttttgctcattttcagttgagttgctcatcttcttacacattgagtttaagaacttgccacattattctggaaacatgttyttcaacacaaatgtaatttgtgataaattgtgaaatattttctccctgtctatrgcttgtcttctcattctctcaatgtcttttggagcactcaagttttaaattttaactaagcccaatttctctctctcttttttttttatttgtagatcatgcttttggtattttatctaagaatchtttgcctaactacccaaagtaataaaavttttctcctgtgttttcttttagaaattttatagttttaactcataaattttagctgtttaggtbtctaatttgtytgagctgatattttatatggtgttaaatgtaacattgtgttacctatgcaacttcattgaaaatcaattgacaaagaaagtaagaatatctttctagattctcacttctgttcattgatctctatgtctctcagtttcacactgtctggattattgtagtttcatatgacattccattttttttttcaaatttgtgttggcccttctgcatcctctgcattttaatatacatttttaggattattttgycaattttcttttctttttttctttttttttttttttttgagacggagtctcrctctgtcacccaggctggagtgcagtggcatgatctccgctcactgcaacctccgcctaccgggttcatgccatttttctgcctcagcctcccgaggagcccgccaccacgcccggctagttttttgtatttttagtagagatggggtttcaccgtgttagccaggatggtctggatctcctgacctcatgatccgcctgcctcagcctcccaaagtgctgggattaccrgcatragccaccgcgcccggcctattttgtcaattttctataaaatccctgctgggattttgatagggattgtgttgaacctatagatctrctgggggagaattgccatcttaacagtattatcgagctttccaactcgcatctctccatttatttagacctttaatttctctgaggaatgtttttttattttcagtgaacaaacactgctgtcttcctaaatttattcctatttcgctcttctggtaactactgtgataggaaagttgagattttcattgcttctatagagaaatatgttaataattaatttttatattgatttgatatcctatgggcccttctggattcatttattagtgctagccagtttttatctgcttgtgaattctacagacagggtcatgttatctgtgaatagaattgtatrttttcctttttatctggatgcctttaatttttaattttctgccttattgcactggctacaatctccagtataatattaaataaaagtggtgggattggacatccttgcattgatccccatcttaggagaaaagcattcagtcttcagtctttcttcattaagtttgattttagctgtgggttttttatagaygcsctttatcagagtgaagaaggtctcctccattcctattttgttgaaacttatgaacatgagtgatgttaacatttttgtcaactgtttctyctgcatcttttgagataattatgtctttttttccatyaatacagtgcattccatgaaytgattttcaaatgttaatccaaccatatgttcctgggatgaatcccattggtcatggagtgtaatccktttttatgtggctttgtattatctgccaatgtttgttaaggatgttttcatttatgtttattggtgacactggtgtatggcactcttttcctgtgagtcttgctgtgactttgatatgagggtratgccagttctgtaaatgggctggaaagtcttccctcctctcttcttgtctgaaagagctttcaaaatatttgatagaattcaccagtgawgatatctgggctttggcatttctttttgagaaggyttttcaatttctgacttagttcacagttctcttcakgttttccagttaatttgggtcagttttggcaatttctatctctgcacgaattggtcctttttatcyaagtggtctaacttattggcttcaggtttttcagagtattcacttatartgttttttaacttcctaagggtcattagtgataatctcttttgttcacaattttggtaatttatcttatttctcataatctcttttttcactgttggtcaagaaaacagacagaggcagcagatggagatgtgacagattctctagtgggaaggctttgatcataatacctggcaagccagaatgatgccagcaaccccaaaggagctgccaatggatcttgacaggaaaatcactgactctggattgggctatgctcaaccaggggtagatgtcaawgcttcaagggctatacaagraccagaaaagaagagrttgcaccaatttggactgccgagtcacactwctttacacaagaaaacacacttdacagcctcaaayggccaacaatgcagagggacatgtcctcctcaggggaaaatttgatagaaaattgaaatggtcaattgaaacattgtttgtctaaaaactgccaatctaattgttgggcaatataaacatgaaggactggcttttatatcttcatgaatgtgctcgctgtcaacatgagtggggctgcaagaataactccactaggtagcatcctctcttttacctgatggatcaggacgatgctgttaygacgatacatacrattcttctgaagrggagaggatgytggaataaagactacacttcacctcaaatttattttttcatatgttatgccatagtaccaggaatagggatgtaaataaaagtgccagaaacaggaattatccctaagcsaaaaaccataactatatttttayacctttatgtaagaattctcaagtattcatttcatctgaaaagttaggattaacagtaagtagagttatatagcctggtggtctgatagcccccactagttccttacctatataacctaccctctatgatcaagactagactgagggaagacatgctagaatactattgctgcctgcagtctaggccagcccagcagacaaacctaatgtcactcccaaacctggaaacractgatataaarggacagagggaggaatagtggctgagggyaagtgaataaatcaaagggttatataatgagaaaaattcaatattagcttaactcctcaaaggtggtgtgagcaagagaagatattgtcacttaggtcaattatacdgratgcctaaaagagtgaagctgtatgtccctgagaccatycttgtttttggaacctgwtaagattgartgttgtcagcaaagctgagtgatttcattctgggagacatattcatacaagaggatgataaactggcctaattttgaatgaatggatgagactctgataatatgccaatacctctttactgttacaatcctttttchtgtaaaagatatgtggtcaaagaaaagtggrcaatctgagttatcacaaaaacatttagwctttgtccctggtttctcctaaaaaccttagactctcttgagtgataagagbgtctttagagtactgatgagaagactcttggctgagwggatcctggatatcttaagaacggtggctagctgccagagacacatacctgtgatgcgagkgttatctttttccattttgtgttgctataaagaaatgtctgagactgactaatttatataaacraggttcatgtggctcaagattctgatgtctggaaatgtttgcgcatttagtgagggcctcaggctgcttccactcatggcagaagacaaaggggagctggtatatgcagagatcacatggtaacagaggaacacagagagtaggaagttgccagggtctttttwacaactagctctcttggaaaataatagagcaacaattcattcattccygagagagggcagtatctctcgattcataaaagattggtcaccatgacccaaatggtggccattaggccccaagtcccacagtgggcgttagattttaacatgaggtatcaggggataaatgtttatatcattgcatcccctccctagccagccaaaggtcatgttcttctcacattgcaaaatataataatctactcccarttgtcccaaatgtgttaggttgttccagcatcaactcaaaattctagagtctcatctgagacdcaaggtaaattcttatagctttgagcctgtaaaattttttwaaaaaatgttatttgcatctaaaatattaataaaacagtggaagagacatttcttgtacatttccattccaaaaggtatataaatgggccaaaagaaatgaatgcagtttcctcataagattgaaactcatcatggcagacattaaaacttaaaggtctaaaagaatctcctttgactctatattttgaatccagagcacagtggctggtgcaactgctgggctcctaatgccatttgcagctccacatttatggctttgctgaacataacccatatagctgctgtcatgggagaaaattgaatgcctatggcttttccaggctgaggttgcacatagccagtggctctaccatttagtagtcctggcaggggtcctgttgctgcagctccgctaagaattttcctgggtattaaatttccccatttaaatatcagttycagtttyrggtcatttctttgctcamacatatgcacataggctattacaggcagccagaccaaatcctgaattctatgctactgagaaatttcttccatcagatacccttaatcatcactctcaagtttaaagttccacagatccctagggaggtggcacaatgcctccaagaactatcacaagaacagcatgaaagagatgattctaaaccattcatgaatsatccatcctcatgagccaatcacgtcccaccaagcaccacctccaacattagggattacaagtgagcatgagatttgggtggggacacagatccaaacartatcaggggtcatggtggacatgagggtgggctggtctctccacttctcacatgttaccagggacatagacacattcagatgccttggcagaaagagaaracagaggcccttgaagtctcaaagtggagccatgaacaaatcttgcatctcagtccctcacaaggcagtcttrgaaagaaaataktcrtgaacaaattcaagtcagtcatggtaagtggtgacactgaacagcccaccacacattgaaaaattccaaatcaaagactctctagagcctagttgtgtcccatctgccccaactcctccttcacttcaggccctctaaggtgycacttttacaagacdtgagagacacatcagagccctgggtactgttcctgtttggggtggaacaaaaacaaagtctggtcagagcccacaggtgatgtgactaaaggaggaattktggggtggtgacctcccccatgggctcctgtctacactrttccaaggatctcaggaatcactctcccacccctaccacacttacttgaagcctgagcatagctgactccttttccatatgaggaaagaaaacaaactgtgagasgccagggaagaggcagggccatgaratcctagaggagtttccagaactgtgactgcagacccaggtcaggatcagraaacccgagggaagaggatgtgttgaagctgaaccaaatgtccttttgacatctgtcctcagcaggaacattctcctgacttgtgactgctgggagtcaggttcccatgatcacaatcaaggtgataaatttgtccttcaatttcacaggtgctttacaaaagagtgagagttgacakggcatctgaacagggtaaatgtgtgtggagatrgtgtctcacaactaggcaggaaatgagccaacttccatctggagcttgaaatccacgaatggaagaagaaatcttggaactcacccctttcctacctggggtcttattcttccacatcacagcagtgaccacagcacctagaacaaccaggacrgtaacratgcccaygatgrggaatgtgggctgggaagatggccctaagaaaggaggggaacgtgaggggtcctgacccccaggcctcagccctgaccctgctgaaggcctccagaarggctcctghtttccctgagaagagacatggcccctcattcatctccttagcccatctcagtgtgaggggctctggcagtgcctcctgctgcacatggcatgtgtatctctacttgtctctagaagacagcaycacagctgcccacttctggaaggttctataccctgcaggtctggtccccacaagctctgcgtcctaaatttggtcctccccatcccacagttgggtcactgtgatttccacatggtagaagcccrggacccagcacctcagggcggcctcatggtchgagatggggtagtggatcacacatgbattctgggattctgaagggaagagtaagaaaattgaggcactttgcattcctcatgggacactccagcagcacccatgtgaccatcctgagaatggahaggacatctggggtggggaagggagcacagaacccagacacctcctggccacaggcacctgggataatctcctattccttggaaagttagtgtctgaggcgttgaataatttagagtctgcagagtgcctgggattgcaggmgcgcaccaccatgcctgactggttttcgtatttttttggtggagacggggtttcactgtgttggccaggctggtctccagctcctaactgggagtgatctgccagccttggcctcctgaggtgccgggattgcagacggagtctctctcactcagtgctcaatgttgcccaggctggagtgcagtggcgtgatctcggctcgctacaacctctgcctcccagctgcctgccttggcctcccaaagtgccaagatcgcagcctctgcccggccgccatccggtctaggaagtgaggagcgtctctgcccggcygcccatcatctgagatgtggggagcgcctctgccccgccgccctgtctgggatgtgaggagcccctccgcccagcagccaccccgtctgggaggtaaggagcgtctctccccggccgcccygtctgagaggtgaggagcccctccgcccagcagccaccccgtctgggaagtgaggagygtctctgcccggcagccrccccgtccaggagggaggtggggggcagcccccgcccggccagccacctcgtccaggaggtggggggcgcctctgcccggccaccccgtctgggaagtgaggagcccctctgcccggccgccaccccgtctgggaggtgtacccaacagctcattgagaaggggccatgatgacgatggcggttttgtcgaatagaaaggggggaaatgtggggaaaagacagagaaatcagattgttgctgtgtctgtgtagaaagaagcagacataggagactccattttgttctgtactaagaaaaattcttctgccttgggatgctgttaatctataaccttacccgcaaccccstgctctctgaaacatgtgctgtgtccactcagggttaaatggattaagggcggtgcaagatgtgctttgttaaacagatgcttgaaggcaaaaaaaaaaaaaaaaaaaaaaagaatgcccaaaatgacaattttctgactcaagcatctacaaaaatatttgcctaatcagggtgctttgcaattagaaaaatgtgagtctcacatctttgtctgtacaactggcttagcatcatgacaatgatttggtttgatgtggtaggtggaaatggttaamttcaatctaggaacaagatttttcagtaactggctattcagtgggcatcctgtgatcagtttaacatctttcactgtggbttttaattagatgtggtagaagtgatttggactccagtatgattctgaaaaacactgttattttgtgcttctaatgttgctttaaaagcagctctttcgtgtttthcattcttattgctatttcatcactagttattcatttatgtcttttcatttaatttattttgctcaacaatgctttttttctattctgtaaaagtttaattcacttgtatgtgtggtaaaatgtgagcaacatatcaaattctcaaattctttgcaagatactattgccttacctahcagattgaacactgtgtatcagaaaatgtagagagttgccaactagccaaggatcaaatgacctatttgtagccaaggctgtttttcatggcatcctggtcctctcacatggctccttaaaattggctgtggcttgttttttgtrgttgtytgtttgttygttttgagatggagtatggctctgtcacccaggctggagtgcgatggcaggatctcagctcactgcaacttctgccttccaggttcaarcgattctcctgcatcagccttctgagtagcttggattacagacacgcaccaacacgcccagctaatttttgtatttttagtaaagacraggtttcaccatgttggtcaggctsgtctcgaactcctgatctcgtgatccacaggyctcgacttcccaaagtgctaggatcacagaagtgagccaccgtgcccggccagctghggctttgttttactaygagtagttatcgcaaaggatgcttgtgatgaactttggcrttttcttttctctttcatttccaaahaatcaatcaggaatggcacacaaggtgcattttgaaaaataccactttaaagatttgtgggccaggagtggtggctcatgcctgtaatctcagcaatttggtaggctgaagtgggtggatcacctgaggtcaggagttccagaccaacctggtcaacatggtgaagcccgtctctactaaaaatacaaaaattagctgggagtggtggcatttgcctgcaatcccagctgctcaggaggctgaggcaggagaatcccttgaacctgggaggcggaggttgcagtgaactgagatcatgccactgtactccagcctgggcaacaagagcgagactcaaaatatataaataaataaataaataaagttttatgatcaagtaactaactacctggatatcccctcctggcataagaaacagaacctatgaagccaccctaggctgttgtccaatcctatcccctaaaaggaacctatgtcttgagtcttgtatttgctattccttggcattgtcactgaagatttttacaataatacccaaatcacagtttgacctgtatttttttaacttccccatacagagaactcacachghatgtatattatgtgttggggagttatctctgatgtgggagggtgcttatccttttaatttttttttctttttgagatggagtttcactcttgttgctcaggctggagtgtaggggcgggatctcagctcacttgatctcagctgcttggttcagctccatctagcatctttccccacrctgtcacccccagcaccaggggactgagagttgatgacctggtacaccaccgcctggatctgctgcagtgtcctttcctgtctagtccgcactcaaagctgacctcttcctatattatacccagacagtgggccaaacaatatacttagatgtggaatgtggtgttgccaggacccagagaagctcaccaaatagtgtgcttccttccttctgttgaggatgcaagatgcaagtttgtcttttactttggagrggacagccctgcatgcccctaaccactggacccataacacttcactgcagtggccactcttgaagctctgtaaggttaatcttcaccttctgtagtgcacaygttttgccraagaaytcagcrtactttcctcctcttrctcatccatcccaatctatgtgatattgccaatgaaahgaagagatttagtattctgtgagatgtctgatttgtccagatctcttaaggtgatatttatagaaggttgaggagttaaagtagccctgaggcaagctatcaataaatgtattataaatcccatgtgaatgtgaatcattccatatccattttctaaatggaatgggaaagaatgcactcaccaaatgcatggctgtttgccatgtgcctgaggccttattaatctccccaagcagtgatatccagccagcatggcagctgcaatcaggactcctacttggtcaagtctggagtaattccattcattctttatcaggcttcttcagggayagactgctgaattatatggagataataggcaatcccaacaccaccccccatccttcagctctctaatggcagtgccacccctacaatayctgcagtaccctcctgaagtcccacctggggcrcaatattgcttctggcttggytgggatgagggaagttttagatgattccctttgggcttcagcacaatgawagcccttactctccagactagggatgtagtrtgggggtgactccctttgccagtgcatcaaggccaattatgcatgtggagaatggggagataaccaggactgggtttatgaacccagtggtcccacagtgggccataatgtgtccaggtttayttcctggcctccttaagccccactgtrgattctgaatctgaagcttggctgaagtctaggaattgagactgggatcatgactttgtatttrrtcaaacrccctcagtctcctgctcctcaattcttgcattcccatcatagatatgaagcagtgccctcgctggctgcccatctgttctgacgctgggacaccaccttttactaacctttcccaaaactccatgaaggttgagcccctttggctgctactctgggttctcacagtaacygtgccctctatcttttgcaggtcrctgcaaaggagggttcctaaagcattcactcctgatcctgagggaggtgggtgcactcactccaggtctcaggtccgccacagaaaagcaaaaactcctcacattcaaaactgtcctgggccacattcagcctgcgagctacgggttagacaagctagcatctagaacatatgtaccacaacaccagaaatttttctgttttcaccttaatgatgctttctaaacgcaaaagcagtcatatccctagcagacaacaaatgtcagttgaatgaatgatcactgtagagcacttctctattctaaagccaatatctttgttaaggtagcctcagggcaaatgctgttttgtggcagctaaagaacaacatcatctcatgtggacatcgatrccgccagtgcttttctcaccaggastgcttgtgtgtcctccctccctccctmcctccycccacaccaaccctcctgcacactgcagcacacaaccatatttttctcttcaggaaagataaccctaggcttatgggtacaattttccaaccacgtatgaatctaaattagactctgctttgtaaatccatgagtttggattggagccagcactaggattactacaactcagggcaggaagaagagtaggagagcagaagaggagctccaacagaaagttcactatgatgagaaactatgggacccctcctctctgcaaatttcagaatctgcttcctttaaaaagattggagacaagatgaaaactacaatccaggaaagagycctgggaggagggcaagagctggacaggtctgaaaattagtctcttgataccacaatgagatttgtatgcagggaccaccstaggtgacatccaastccctgtgatcacaggtggtggtrggacaaggttctactgaagggccaaggagaatgaaggagcaaagatgacccagctgagcagtgaccacataaagtccatactggcctgagcacccactaggcacagccccatctattctcctcccctgcaacaaatcagcacaagaaacacatggactctggaaggttctcatgkgttccatttattttgtctctcaaattttaggaatcttctcctttaattaagtcatcaacctctcatggcaagaatttgaaaaagtaaatgtttactcagattctaattttaagagggaagtaagaagttacagctcagtgcacataaagttgagaaaaagatggagacatctcagcccckcctctctggaacaggaaagatgattggggagggaacacagatcagcgtggggaagagggtcatggtggacatgagggtgggttggtctcccctcctccacacattatgcctacaggaacacagacacattcaggtgcctttgcagaaagtcagggttcttcaagtcacaaagggaaggtgtgaacaamtcttgcctctcagtcccacacaaggcagctgtctcacactatagaaaaaatattcatgaacaaattcatatctgtcccagtaatggatgacactttggcagcccatcgcatgctcaaaacatcaaattcaaagaaccccatagcacagctgtgtccactgttcccccccaacaccccccacacatcaggccccccaaggtctcacctttcacgcygtgagagacacatcagagccctgggcactgttgccgcctggagtagaataaaaacaggacctggtcagatcccacagtagatgtggctagaggaagaattgtggggtgggtgagctcccccatgggctcccaaacacaatatccaaaggatttcagggatcagcctccttcatacttacttgcagcctgagagtagctccctccttttctatctgtgggaagaaaatgtcctgtgagatgccagaaagaagccagggccataaggtcctagaggaacctccaagtcttggaccccagagaagtttccagaaatgtgcaactgcagacccagggcgggatcaggaaacatgaggaaagcagatgtgggtcctggaccaaccgcccttctgaggtctgtcctcggggaccttcccctgtgacttgtgactgctgggatcaggtcccatcaccacagtcatcaaggtgataaatctgtccctcrttgtaacaggtgctttacaaaagagtaagtgctggcacacasggcccaggctgggtaggcccatgagtgtggatggtgcttcccagtaaccaggcagggcmcttctacctggggcttggaactctcagtgagacaagaaatctcagaccacactcctcaccccttccttacctgagctcttcttcctccacattacagcagygaccacagctccagtgaccacagctacaagtagaaccaggccagcaaygatgcccacgatggggaygktgggctgggaagatggctctgggaaaaggggggaaggtgagggaccctgaccctgctaaagctctccagagaggctcyggctttycctaagrgacatgacacccccatctccctccttaccccatctcagggtgaggggctckggcagaccctcatgctgcacatggcaggtgtatctctgctcctctccagaaggcaccaccacagccrcccacttctggaaggttccatcccctgcaggcctggtctccaygagctccgtgtgtgggtctggtcctccccatcccgctgccaggtcagtgtgatctccgcagggtagaarcccagggcccagcacctcagggtggcctcatggtcagagatggggtrgtgggtcatatgtgtcttgggggggtctgacrggaagagtcagaaaattcaggcattttgcatctgtcatgggacactccaccagcacgcatgtggccatcttgagaatggacaggacgcctggggtggggaagggagcacagaacccagacaacagcctggacacaggcacctgggataatctcctattccgtggaaaaytctagtccctgaggagggaacagcgacttctggtcctgacctgagtggaggctgagggactcagaagagctggactcagacccccasrcacattgagtgtgaagcagagaacaaggcctgagaggaaaagtcacggggcccaaggctgctgccagygtcaaagrgaaccactcatcagtattccagggattgtcttcccttcatttcctcagagatttcatcccttaattgtgtcaragagcacggcggaccctcagagtcactctctggaaacccaggaggattcttctccctcaggaccagagggagggcgatattatagtgttggtcccatttgtctccctttcttgtgggaggccagccccggagatctacaggcsatccgggaggcgccctgtggcccctggtacccgcgcgctgcagcgtctccttcccgttctccaggtatctgcggagccactccacgaactcgccctccaggtagrctctcmgctgctccgcchsacgggccgcctcccacttgcgcttggtgatctgagctgccatgtccgccgcggtccaggagcgcaggtcctcgttcagagcgatgtaatccttgcygtcgtaggcgtgctgttcatacccgcrgaggaagcgcccgtcgggccccacgtcgcagccatacatcacctgcatggtgtgrgaacctggccccgcccccgcggtcagcccggtcccccgagccccgccctgcccsgaccaacccgcggggattttggcctaaactgaaaatgaaaccgggtaaaggcgcctgggcctctcccaggtcaagggtctcggggtcccgcggtttcggggaggatctcggacccagagactcgaggcgacccggccctccgtgggggatggggaggggtcgtgacctgcgycccgggccggggtcactcaccgccctcgctctggttgtagtagcggagcgcgatccgcaggttctctcgttcagtcygtgcytgggccttgcagatctgtgtstyccggtcccaatactcyggcccctcccgctccatccacggcgcccgcggctccatcctctgrctcgcgkcgtcgctgtcgaaccgcacgaactgcgtatmgtccacgtagccgacggagatgaagcggggctccccgcggccgggccgggacatggtggtgtagaaatacctcatggagtgggagcctgggagcgaggaggagctgagacccgcccgaccctcctccctgcgcggctcccygggtcctgcgcccccgccgggcgggcccctcgctcctcccgaccatttccctgcagaccctgcactcacgcgcccaggtcwgggycagggccagggcccctgagagcagcaggaggagggttcggggcgccatgagcaccatcctcggcgtctggggagaatctgagtcccggtgggtgcgtggggactttagaaccgggaccgcggcggcaccgattggcttctctagaaacccgacacctagtgggaatgagaactgtgcccgcttcstgagtatcmaggaaraaggacccgtcgcaggttgtgagaagaagagaaactgcggaggtggcgaatccccaaggcggggcmtccccaatccatacaccgccttcggggcctgagaccctgagagccacgcctggggccctgggacttcgccctgaccccgctcctcctgtgccaagcgctctgtctcagtgtttccctgagtcttggcccaggagctgtctgagaaaccaggaagaaaccctcggcatgggccctgtccctctcccttcacttttcatccmggaatctccgtccctgaactggactccctgtccacctggactcttctagaagaaaashcacccacggagtttggtgacagagagtgagcttgcthtgggaatggaggtgtagaaactgttttttgttttcctttttttttttttttttattgggaaaagttgtghctgagtgcatgagacagaatagagaccagtttatttatttatttgtttattaaatacattggatagcagaaccttggtaacccctgaatgatcaggaatctaatmggtaaaaaatgtgactttggccccatgatgtataaatgtgcccaaaagcgttasaacaggactcacaaagcttctaagtttcacttttgcagtgtacctgtgactcccgcttgtcatattttaaatttgccatcattccatagctytgagtttctgtgtgagtccaggatatctcctcaatacaaagtagcacactgtgtactttgcaaccaggtacgttgcaaccaggagtcagtacaggctttattcacctcaaagttgcaactgttcartgtagtcrcaatgcccctcactagtgctcatgcactgcctgtttttaggaagtatccrctkctaagtgttrtgtatattttataggaacacttagtaatttttaaacctgattaacattaaaaaattagtttttaggcagacccacatrargtattaaagrccaactgccaaggacaccctgctaggctctgtagatggatgtattaaaatccataaaacaatgtatttaaacctaagaattctgctgctttcgaattctttcctctgctccttttcttcacctcctgcttctccagcccttcyctccgtccttytcatccttcaggccstcctgtccccttagtccccaccacactgtcacttgtgarttgtgacactagcactgtcccatgacctgttacgtractgttcttttcacagtggtcctgctcctgggagtcrgagtgtgtcatctctccacttaaaacactccagtgtctccacctcggtcttgagaaacttctggagtgtcaggcacgtgagcatatgaggggatatctggtttatcgtagggactaaattaatttttgtcgactgaatgaatgaaatatgagtgtattaaattgcattacagataattabaaagtgcaaaacacggaaraagttcagaaarwttttattttatgtaactagtgtgcatatcaattcatcaattcattcgtgcactaccaygcctggcgaaacaacacccatttatctgcttatagttccttgatcagaaatctgggcaaaattgtggatggaatctctcttctgggcttccaaaagctgtgttttcattttgaatvctccttcaggcttatacagaggtggcagaatgcagtttctggcagttgtaagactgaggtccctgttycttgctggctgtcaatgtagagaacagggagggctgtgctygattcctggtcctcaccagyattctttcctacacagccccttcatttttwattttatttatttattttttkgagatggagtctygctctgtagcccaggcttgggtgcagtggccggatctcggctcactgccagctatggctcccrggttcacgccattctcctgtctcagcctcccaagcagctgggactacaggcacccrccactacrcttggctaatttttttttttttttttgtattcttagtagagacagggtttcaccatgttagccaggatggtctcratctcctgacctcatgatccgcccgcctcagcctcccaaagtgctgggattacaggcgtgaggcaccgcaccyggcccacagccctttcattttcaaagcccatgctggaggaaacccctcatgctgagtccctctcacactgtgagtctctatgctcaggaagaacccagtcctttcaaggtctcacctgattaggacagtccaagcaggataaacccagcctaaagtcaactaattgagacccttaattatatccactaactcccttcacagcagcacctacattagagttgattgaataactggaggatggtgaatgaccaggagctggttgttgagggcataatagaatcagcctagcaagggttggatcttccttttgtgtttacttcggacacagttggaaattgaagttcaagtaaagtgatcattgtgaatggtcataaaatacatcctcttcagccatggaaattctccttaccttttaaaactaagttacrtgtttaatatcttataattaatttacgccaggtatggtggctcayrcctgccatcctagcactgtggaaggcagaggaaggcagatttgttgactccagaagdtcaagatcagcctgggcaaaacccccatctatacaaaaaattagaaaattagccaggcatagtagttcatgayggtagtcccagctactcaggaggctgagatcagtgggtcccttgamcccaggaggtcgacactgcagtrcatggtgatcatgccactgcactccagcctgggtgacagagcgagachrtgtctcaaaaataataatgatgabgatgatacatttaaagcaaatgcaatttaatgtgtaataatacatcctctcttgtgaaaatgtgttatttatttactattrcataacaaattatgtaaaacttagcttaaaacaacaaatattcctcatctgccacagtttccaatggtcaggagtccaggagaggtttccctgagtgcttcttgctcsgggcctctcacaaggttgcagtccaattgtcagccaagggctgcatcatctgagggcttcactggggctgaggattcacatgaaacatggatcagtcacatggctgttggaaaaggcctagttctttgttgtctggtcccggaaggcctcagttctcagccacatggaccttcctgcagggctgcttgtggcacagcagctggcttcccccagagctcatgatcccagagacagagagagagaaggtggaagccgcagtgagttttaggttctacacccagagttacaaaccattatgtcagcattattctataagttagaagttatattagtccattctcacactgcyatraagaartrcctgagactggstaatttataaaggaaagaggtttaatwgacycacagttctgcatggctgaggagcctgccccaggaaacttacagtcatgrcagaagtggaagcaaacacatccttcttcayatgatgacaggagagagaagtgcagaatgaagcagggaaaagccccttataaaaccatcagatctcatgagaattccctcagtatcacgagaacagcatgggggcaccrccyccattatccaatcacctcccatgtggtccctcccccwataggtagsgattacaattcgcataacaattcaagatgagatttgggtgggaacacagaaccaggccatatcagaagtgcctcattaagtccaagccacactcaggagagggaattaagatgcacctctggaagggaacagtatcaaatgttttgaatatatgttaaaagcaaaattataactattgtttcaggtttttgaaaatcaaagacttcttttatctaattatttttcattaactctttcagcttgtctttttctttaagcttgtcttttaatttaattttttttaagttccagggtacacgtgcaggatgtgcaggtttgttacataggtaaacatgtgccatgttggtttgctgcacctgtcaactcatcacctaggtattaaccctggcatgcattagctatttttgctaatgatcctcccaccaccaccctgccccaataggccccagtgtgtgttgttcctctccctgtgtccatgtgttctcattactcagttcccaattataaatgagaacatgtggtgtttggttttccrttcctgtgtgagtttgctgaggataatggcttccagcttcatccatatccctgcaaaggacttgatctcmttcctttttatggctgcataatattccatggtgtatatgtaccacattttctttatccagttcatcattgatgggcatttgggttgattccatgtgtttgctattgtgaatagtgctgccatgaatgtaaacatgcatrtatctttataatagaatgatttgtattcctttgggtatataccctgtaatgcgattgctggatcaaatggtatttctgattctaaatctctgaggaatcaccacactgtcactgtcttccacaatggattaaccatttacttttccaccaacagtgtaaaagcattcctatttctctgcaacctcgccagcatctgttgtttcttgactttttaataattgccattctgactgacatgagrtggtatctcatttgtggttttgatttgcatttctcyaatgatcagcgatgttgagctttttttcatatttttgttggccacatgtatgtcttctttagaagtgtctgttcaagttctttgtctactttttaatgaagtttttttttcatgtaaatttgcttaagttctttgtggattctgaatactagacttttgtcagatggatagactgcaaaatttttctcccattctgtaggatgtctgttcactgtgattgatgatagtttcttttgctgtgcagaaaaaaatgcctaatcaaattgcttttcatttacaaaaatgtgaatctcatacttcagtmaactttattttactttagtaaaaattattagcatgatgccaataattttggcttgatgctrtagcccgaaatggttagttctaattgagaaacaagtttttttcaaaaactggctatttgaygggcattctataataaacttaacatcttttgttgtggtattgaatgagatgtgatagaagtgatttggacaccactatgattctaaatagygctgctattacatgcttctgaatttttttttctttttagcagtcctattctgttttccattcatatttgctattccatcactgggtattcctycctactcttttcatgtttcatttattttgatcaatgatgtgcatttccaatctgtaaaagtttatttcagtttaatgtgtggtaaaatgtaacatcaaatctttgsaagatgaaattatcttgcacagcagattgaacattgtatcattgaaaatctagagagatgccagggagccaaggatcaaatgacctatttgtagccaakgccattttcatggcatcctggtcctctctgtcacatggctccttacaattctctgtggttttcttccaatgtaagtagttcttgttaagaatctttgcaatgaactttgaaattcttttctttttcatttctataaaaaacaggtatattttaatttggaaaactctgtttaaggaattataatcaagtatctacsagggtgcccagcrctggtgtaaaacacaarcctgtaaagctaccctgggctgctacccagtcaccccmtagaaggagaccgttgggagcaagtcccccaaaatctggccataaactggccccaagactggccataaacaaaatctctgcagcaccrtaacatgttcataatggccctaaygtccaagctggaaggttgcrggtttacragaatgagggmaaggaacacctggcctgcccagggcggaaaaccgcttaaaggcattcttaagccacaaacaatagcatgagcgatctgtgtcttaagrgtgtgttcctgctgcagttaactagcccaacctattcctttaattcrgcccatccctttgcttcctataagggatacttttagttaatttaatacctatagaaacaacactaatgaccggtttgctgttaataaatatgtgggtaaatatctgtttggggctctcagctctgaagactgtgagacccccgatttcccacttcacacctctatatttctgtgtgtgtgtctttaagtcctctagcaccactgggttagggtcttcctgaccgagctggtctcggcaggagactccatcctgagtcttctgatacgtattcctttgtattccttcaaagatttgtgcaataagtatatctatatctccccaaaacaaacctcagttagttttgctggtttttaagcttcctgtacagcaaattcctactgcatgtattttcccatgatacacattatgtgtaggagttatctgtggtgtgggaggctgtcattcattcatttttacgctgaaggcttacatatcgttttaccacaatttcaccrgtttcctattgatgtacatgtggcygattccagtttttgccataaatattagtgtgcatgtctcctgtgcacataggcaagaaagccccaaagcycccagagtggatgattaggaatgggttggttgcatgatacattgtatggactttaaccatactagataatgataatatgatttccaaagtrattgtggctacttaaacttttacaataaatgtgtaatacttgatgttgatgatgtgttctgaaaacactgagttgaaggaattgtgttaaaagtcacygtcttggtggtagaattatagcaagcatttttattctgttaataacttcctgttgtttacttgtttctcatataaaagacattatgcttttgacatatagattcagaaaatgcttacttacagcccaatcacatagggttattttatattttaggaaaattttataataaaaaggaaaaaatggaggaagggagggaaagaaggaggaatggaggaaaaagtgaaagaagaaaagaaggaaggggaaggggaaggaaagggagcaagaaggagggaaggtgataggttgaatggaaatagagaagaaagagagggagggagggttagaaggaargagaaasggaaggaagaggccaggtgtggtggctcatgcctgcaatcccagcactttgggaggctgaggcaggcagatcatgaggtcaggagayagagacyttcctggctaacatggtgaaaccccgtctctactraaaatacaaaaaaattagctgggcgtggtggcaggtgcctgtagtcccagctacttgggaagctgaatcaggagaatggcatgaacccaggaggcagagcttgcagtgagctgagattgagccactgcactttagcctgggcaagagagtgagactccatctcaaaaaaaaaaaaaaaaaaaagggaaggaataaaggagaaaagaaactaaaataaagaaaagaataggtgttgagaaactagaaaccctatgtgtggctaatattatcaaaataggagaaaataaaagagatgtagttaacttctatagaataatggaaatgtaagagggcttcattagttatccattgctgtgtaacaaactacccccaaatttagtgattaaacaataaacattgaggaactcaaaagcatamtacaaataccagcaaaatggagccaatgcaggtagaagttgaataaacaaaaagattttacacvttggaataagtaagagatcactagtgggcagatgaaaatgattttatagtccaaatgctccaaaaagcaagttccatcatgggabtaaagttatagcattttattaggggacacacctgtcaggtgatatggcaagggaggtaggttaccctgggaaaggcaacaagatgcaaaggtgatccccagtgatggacagaaggagacaaggtttactggatgtgccrtagaccacaggcaatctaaggagagttaagcaaggccatggaggagtccttgagctacagttggcyatcagaggagtccctggtctcccaggaatgtcctgctttcgtgtcactggtgtgatctgtcactggttgggaacagcccattggaagcaggrcctcagcaccaatgctactgaggatgtcagagcacaggwgcagggccttgggagattaccsagcattactcaaaccttctgccctgaygggtctgggtccttggaaatcaagctgtctcaggctgaattgctggatgattctgytcacacttacaatgaggtaagggaaaccagaaggcccccaggtggatctctggtttccacacacacttccgccctcattgtgtgaaagtagccatgccttctcctgaagatgaggatctrttacctgggcctggagaggaggagaatcctcttttcaccaggtggtctctgggcacaaactatcaaaacttctctcgtgacarccataatgtgtagttcagtgggctgtcttttgtmtccttttaagggtaccctccttggaaaccaggacctcgtaccctgcacagcccagtgttggaagataaaacgtgcaaaataccccattgrgtgaatctaagggattggacgtggagccaaacctgcttccatcttttgatycctggacacacatgttcttcctattgagaacacagcactctagagacatctctgattcaaacaatgcacsgtgtcctraaagayggcacccacctctcagagtgcttcctccaggctggcactgagttttgcctgtagaagacctgtccagcattccttgtggctggcagcctctggatggtgcagatggtgataggattagtggaacccacagccatggaaacactgaaactttcccagccaagtgggtccttcaggcagataatgggctaggagcacckcctagcctgcagatcaggaatgtcaacagcacccggagaggtgctggctgagtttctgagagcaggacatgaaaacacccatggaatagragcctatccctgtgaagatgaacctctggcccttccaggatggaagtagctaaatgtagtcaacttgttacttagtggctagttagtcacctaaagaaatagtgccccactggggcacatcatgggcctcaattgctratgagttggacattcagaggtgtcgrcagctggatctgccttggtaggggggagtcagtgctgttggccccataygtagcctcakgcctgccactgtggttgctccattcatgaactcatcctaccaaaccagggctgacccatggtgaaggctggctaacttccatttgtctgtttggttgttcagtgccacttcagacttgggtattttctstgggtgtaaacatgggattcaagctcaacccaggtggaccattttcacctcaygatggatrctgttgggcctgtctaatctatgactctgtgggtcacacaggcactcgaaccacatagttgcttggtgtcchgtggtbaarcattctrtctaatcaggacaagggacactaaaagttgcttctaataggtggcatatgtctctgctgtgaatgacatgaccttactccagaatcccaggcctttcactgtgactttcccactggtgcttggttcagctccatcctgcatctttcccyaccaatggcatcaccagcaccagggggtctgagagatggtggctgctygcaccatggcctggatctgctgcagggtccttttctgtgtgggcccyacttgaagctggcctcctcctatgtcacctagagtgtgggccaaagcaacatacctagatgtggaaagtggtgttgtcagaactgraagaggctcatcaggcagtgtgcttccttctttctggtgaggatgcaagatgaaacagtttgtctgttaccttggaggggacacacctgcattcccctaaacacttggccattgttcacccataaaactttacttcaatgcccrctatytttttctttttgagatggaattttgctcttgttgcccactctggagtgcaatggcacgatcttggctcactgcaatctctgcctcctgggttcaagtgattctcctgcctcagcctcccaagtagctgggattaccagcatgggccaccatgcctggataattttgtatttttagtagagacggggtttctcygtgttggtcaggctagtctccaactcccaacctcaggtgatccabccacctcagccttccaaagtgctgggattacaggcgtgagccactgcacctggccgagtggccactctkgaagctttgtaaggtttatcttyaccttctggagtgcccktgttttgccaagsactacagtgcactttctacctgctgctcatccasccagrtcaacaggaagttgtcaatgatatgagctgatttaatatcctattggatatccagtatgtytagtatagtcttaagactatactatagaggtcaggggagttacaatagccctgagacaaatgataaatcaatgttttgaggatcccacatgaatgtgaatcactccatatccactttctaattggagtggaaagaaatgcagtcaccaaatccacagctgcatgctctgtgtccaagggtttattaatctgctctaccagtgatatccagacagcacaaaagctgcaattataactcctacttggccagacctggagtaatctagttcattctttaggcttcatcaggcttcttcagggacagrttgctggattacgtagagacaayagacagccccaacaccatcccacatccttcagctctgtaatggtgatgtgayccccacaatacttgaagtrtcttmcacaagacccaccctgggacacactatgatttttgatttggccaggatgggggcagtgtcagaggtttccctttggctttcagcacaatgaaagtccttactccacagactagggacccagggtgggggtaactccacttagcagtgcatcagtgtcaattrtgcactcagggtataggaagataaccagggctgggtctatggatccagtagttccattgtgggccataatgtgtccaggtttactccctgagctccataagccccactgtgatgagagacatgatagtgctgtgggcatctgagcatcaatgtcagttcacacccagtgtcaataatchccccagttctgcctgtttcctttccccagtgtacaatctcctgagtaaatggctatatggtcctttgccgaaggactgagggaattgtcccagcatabacttccacggggttgcagagtattccgcctagagatatggactcttcctctgtcactgagatctgaatctgcatcttggctgaggtctaggcattgaggatgggatcatgattttgtattgagtcaaacaccttcaccctcctgcttctcaattcttgctttcttatcatagatatcaaccagctgcctgtcctaaccctgggacaccaccctctattatmcttccccacattccctgcagcttgagtcctcttggcttctcctchgaggttgccatagtaaccgtgccctctggcttttgcaagtcactgccaccacttggtctttgtctcttcagggccacactctccccagtratattagaaatgaaactctgggactatctttactaccatcacccccagcctacaaaggacaatacccygwcacttcttagtgatgcaggtccctctcaccatcaagttcctgaggctctggtggaakgtgtgtcctctgggccctcttgtrgagcatggttttggtaggccttcaccaagcccactcccctcagcttgttattccatyctctacatgttccagggcaactaagacatgtctaccttgttgagagttgggcatgtttttttctagactatgtggatacaycccagcagtgggtttaytccacttatcaaagtcctggagtgtttgataaatccatgccctgagaaagtgtcttcaagccaaaggattatattcatccagcctgaaattctggttccttgatcaaacaccctcaaattccaatcccagaagtagtccctgggctcctatggggacgtgctggctagttcctgcaaacctcctgagtgggattcbcgcggcatcataggggtgaggattgtgtagcatcttccagcagtgaaagtgggaaccattactagagaagggtgagcctcctctgcatgcccagaagatcctggagggcahgcatcgcataatcctgttccagtttgcagaatctcaggtttccccaccaaagccctgactttcctgtaacaggcctgccttggctgagtgtcaaacatctctggagcactgtggccctcatagtgatgtagagctaacattccttgctatctgcccttttgctacaggagatraagacctgtccatgagacactgccgagggtgtcaaatgtagccagtcatagctgtcaacaatccrcagattctcattatctttttacacagcatcgatgcagcygagmagtaacyagccaaagccactgtctttgtaggtttcttccaaccctgtccttattatgcagggcattctatcactgcatstgccatagcactccctaaccaaggcaacttctcagctcagcactggtgagacccccagctgctcagctgcaccttgtgccatggactttctgtgtctgccaccaacccgggtggcatcctctwggcctgccaggcagtgggaagcttatttcaaattcccatttttgcctgttttcatggatsacccttcatgccacttgtgttagttagggtcccctgagaagcggaccccaatacagtagtaaacatgtaaggatttattaggggaaatacttgtgagagaaattcatgagahagaaaatgctgggaaagccactggaccacaaagcaackctgagcctcagtgatgtagagagtgcaggaaggtcagctggaagcatcctagaccstgtgcaggctaagggaagttcagtaagggtggcagggagccctggagcttcagtcagccttcagaagagraatgtcctgccttagtttctgccctactttcctcaatcattggctggaaaaagccaggggtgggcatagtctcagagcaaatgtggcaatagatttcagacttcaagagctggrgccatcatcaattctgcttcttctagatgaggggctgggatgtgcattctcatgactgccacaatgatccagtggggagagaggaaaaaggttgacrataaagataaaaatggtattaattgatgaactgacacctttaagtagatgataagggrtggcaattggggcaccagaagagggtctggctctggctgggagcagaakggttaacccacaacagtccstcacatggtaaaacgcctgacatgtggtgcagytgcaaatgcatgagcagacagtggtggaatctgtgaagttgtcttctaatgtgttcagttttctcagtgaagtgggaagcaaggthatcagctgaagtaagaatggggaaggcaggttggatgtgtgagcacaaagaaaargtgtgtaagrgtcacccaggccaggaggaggctgagggtgagccatgcagggagagggtgattgctggccatggtagggacttcctatgtggtttggaatcctaaattttaagagaccagtcagcgtactgtgtgctkctctccagcctcctgcagctcatgggggcaggctcagcataggcmgaggtggaacccaccagctgtgtagttttgccaggtgagtgtgacaaytcaagggagagggaagggagggatggaaattatttaccatagaattcaaaatgggtgaggagggaggacaggacacccagggtgagggacagtgagtagatggcaggatcactggattgggaatcccaggagggtggaacgattgttggaattgatgtactacagggtagactccaagcrtggaaagcaagcacatatgcratgagtggtccactgatattacatcacagcatatgataaaatgatagtatctgtgtcctcagagcctgtggccaccttgcaaggggatgagtggaaagatggtcagagagtgggwagtgtgagatwgagagtatggaagggctggggttcttagccatgatgaggcctaggggataacaagggcatgagattcaggcagacaggagaagatcatggaggagaggagttccaggatctgagaggccaggaagcgagggcatcttctctgctgtgtgggtgtctattgctgccataaaaattaccacaaaccaaatggctttaaamagcacctatgtatcatggcacagtcgtgtggattgcaagtccacccagtctcatggggctaagatcaacatacgggaaggtctgcattcctttccatagactctggggaagaatccacttccaagctcattcaggttcttgcctgaattcacttccttgcagatagaaaagaggtttccacttccttgttaagagccayccttagctcctagagccttctctcagatactcacacayggtgcctaaggcacattcaatcctcctgcttggaacttctgacctcycctctccagcttctcctctgccttcctcctctgcagaatctgactccaaccagggcaggctctctgcttttaatrgctcttgtgatttgattgggcccacacagagaktccagcagaatctccctattttaaggtccttaatcttcattacatgagtaatrtcccttttgccaygcaatgcaacctgttcacaggttccaacgattaagactggacatcthtggggaccattactcagcccacsacatctgcgtatgttgaagtcaccaagagtcaaggagacagcaatgctggagagggtgacagtgaaccaggagctacaagactcaggattgagaagaacagcctggggcccacagggaatggttacagtgaggcaaatggggctctaatctgatgacagcctaggggttttagggaggagggaggcagaaagttctgagaaccacaatgaggagcaaggaccccacctcacctctgaacccaggggtacaagtccctggggaaactcccccatgtgggaggacttcggagggggtcatgtcctcagggaracccaggttgctgctggagctgygagatgcaggaacatcctgagagaggmtgaggaggttttgctgatgtggactgagaaatccagggggtgcactgggaagatttctgtggctggggaggtcggggagacagaatagaggtgtgcagagccttgtggggatgcaagtgcagagtatgtgggggacccagtgtgactgacacaaacagggacagagcatgatgagctcagtccaggtgcactccaggccgacgatggtgctgagcctgtgrgrgatgcgggaggaggagcaggggtggctttcacctgggctctgtccatggaggtgaggacagtgaggtggttgggtcttagtgctgtggggaacttttcttgacctcctgatgactggatggagtgtctgagggaggargggtcttacaggattgactyatgaccctgagggatgtgctcactccaggtctcaggtctgtcctgacacctttatttgtggcttagagctccctactgtaaattattrggagttagttcattttggagtttataacttaaagcagaaattcagatggttgaaatgtcattttcatgaasgtttgttattagtgtatcatttagattgtyttgcaamagtctcattttttttctaaagggttgccaatcttgttttaaatttacaaaggttgttaatytatcttcactgttaattggttgtgggttgtttaaacttatactgtgtagttttacatatctgtaacagcagtagtttgggcctcttatattctaataattaagactttcagctgwgtacacactgtaattcaagcacgagtcatgcataaccctagcactaagagacaagaggggaatccctctctctgaaaattttgcaaaattctgggttctttttccactgagtgggcacaagtyggctaatcatgaacatgaggtatttgtcctcatttaaaggtgcttcagaagcactgacccctaggaaggcctccttgtctgggtcaggcaccctacaccatggcagaggccatcttccctcccagtgtacagtgatatcccagatagcttactggttagctgctgtccactcttgggcagttttgtcttctaaaacatgggtttttatctgagaatcttcctgttcccagatgatcaaaactggggccatccattccattctgagccacttctgcccaggggcccatkgctatttcctccagtcacaacagaacaccccttcagaacagcctgcaggaaggcmccgtctcctcacaggctcacacatgcacggtgtgtgcacagagcttttgctctagttcaggaggtgtgtrgggagcctcactagtccaacagagcytggtaccagtgtcatatgccaggaaccaaggttataagggatacmatgtccccagacctaccagagaargcaaactcatacagcttgcaggaccagacaaggacaagaaacaagttcaaaagagggaaagggaaaytacagacrtacctcagagatactgcagatttggtttcagaccatggyaacaaacaagyyacacaaatttttgtttttccagtacatataaaagttatattcacactctactgtagcctaktaagtrtacaatagcattatgtatgaaagaactatgtacataccttaatttaaaattactctattgctaaaaaatgctaacggtcgtctgaggcttcagctaattttaatctttttgctggrsagggtcttgcctcaatgttgatgactrccrgctgttcaagagggtggttgctaaaggctgctgtggcaatttcttaaaataagacaatgaagtttatggcatggattataaagggggaatcagtacttaagtaaggtcaatatgagttttcaagtcaggtggacttgaatatgaaccctccaggcctttccaccaactagctatarakccttgggcacatctggcccagagctggccccgacrgacacttkcccagtgggtgagtgctcaatgaacccatctgagccaattgtctcatccaaccagtgatataattccttccttgcagaagaataagtgagaaaagacacagtgccaagaaattcagacacaagacctgcggaagtctgygccagtgctctaaagcaagttctgcctaaagcggcagaaacatttttcacattaggaacaggagttgtttgggatcctgtctggggccaggttgagagcagagtgggagtgggggcctgggcaggaccaggcactggagtgaagacaggcctggagagagctgactcctggaggctgctgagcggctcagacagctccttgcctcacctgccacagtcctccctctcccctggcctccaagtacccgggagtgcgagcctgggccccgggaaccggcaccttgagrgcdggagagggaccccgcccgctccctgtctccctgacgcgctctctccgcctccccgcgggdacccagcctcccgggctccctcctgcctaccgcccggccctggagccgcttacctgggagcttcttacggtgtagggggagctggggaggggacagagggacagggaccacgggagggtggcgtggggcggcgtacttggagatatgacctgaggagtctgcagacccbagaccggggcagaagmgccgtgggaggagctgctgagctctccaggccgccctttacctcctgcctccccagcccagttcatcttgatcctctcctcactagcccagktctccccaaggtcagggctcatagagcagcaggagttgggttccgggacgcgggatccggcttctctgggaatcttggattccaggaaggatcctggagatctcccactttatgaagcccaatctccastcactstgatggcgtctttagaccccactggaaaccagatacgacgccctcatcggccctggggaaaaaacaagagcaaagtatgagaggtggccatgaggtcagggaaactcctgcagaattctcaggaaaggaaactcttccgagctgggcccttgscttagtttgtcttccctgcccagccacctgtcccagagctggagaygcccaggtttaagccagagahtttggatactttccttgatggtgacataatttttgtcttcttctctcctggaagagaagccccagaaccatcagagtgatccagtctgcccactcttcttattattctgtctctccaatcactctccctgagctggactctccacccaccctcacattytggatagtgcagagatgtgagcatggccctggggcaggattgtctgcgtgcaagcccagctccaccacgacttgtaggcgaccttctttcctattgtatcacctgaaaacggaaaattagcaggcacaccccatagwtgtatmgtgacaattaaatgaattcatattttgaaagtgctaaggacacrgattaacacatagcaccatgacagtgtatgatattatcgctgttggttttttttttttttttttttagatggagttttgctctcgttrcccatgctggagtgcagtggcaccatctcggctcactgcaacctccacctcctgagttcaagcgattctcctgcctcagcctccagagtagctgagattacaggcgcccgctactacgcccagctaattttttgtatttttagtagaaacggagtttccccatgttrggcagtctggtcttgaactcctgacctcaggtgatccaccctctycggcctcccaaagtgctgggattacaggtgtgagccaccatgccccgccgttgttgctatttctttcatcctttttgcttgagcctcttctcttctttctaggttcccagggaaattctctgttggaagattatgbctgcaagaggcctccacctgggaaatgctggcccatggggsgatctcccttttattaaatggaahgattgttggtgaagtgacagctagtgagccagtgacagtacggttcatgtaaaaaagaccacatacctaggattacctccattttaataaagacacatcccacacattataagtccaatgtgatttgtgaggagattgctttgatttgctcacgaaaaatattactctactttctttgagagagttttgcaacacatttcaaatctctgcttctcatttcacactatctggctcatgagtgaaggtgataagtgtcgtactatgctctcaggtttgtctgtcagagtcatagtcahgtattacacataaagattattttcttgttatcatttatttatatatattatactcatgggatatagatagatattattacagtgcttaaatggctactactgatatctatacattttctctcttggtatatgatattaacacatagaattgtatactgttactttggtttccagcaattgctgattaggtcatttggaccacttctcccattgastacaactrgaaaaatgggaggaaaatacatatttgaaaagtctggttgaatttatagatgggctagcaaagcagtgaagatttgcttggccaggaaccaggaagaggcagaaatccagaagagcatcttgagctatggggctgcttttttggatcagatgcagtgacacctgcctcccaggcaagaagccaacttctgggattcagaactaaagtgtcccaatatttagaaggtctcttggtctctctagagttcagtgctcattggccagggctatgatactcacactcattccttggaggagccaagcttcgggtttggctgcctctgggacatttcatgctagaaaaaccccaabatgtgtagataaatggtatagaggacaccagccacccttygatkgagctctgcccagtrgtgtcccctcmcttccactcagagacaacatgcccatttcactaaattcatgaggacatggcbaacataagtaagagaacaccgggaggtacctkggacagagttccatgcagtcacagcttttgcgtctctgtgtcttttcccttcatctcaaccagagagcatttgcbgaggccgaagaacaaaaaacttcaaatattggagcggaatctaagaccactgatccattgtgatcaggaggctggagccatgtggtccaggaataatgaagtctgtgaggccttggtcaccccaaggctctctcccattaggagctgcctctcacdgctatcagggaggacccaggagctggacatggctttttttttttttttttttcatttctgatgagaacctggagaggtcccagagcatatagaccttgattgaaatggggccagagtggagtcaggcaaaaaactctaatgabtcagaggcacctaagtataaaataaaatctcaactcagagcttccatcagagcatcaggctcagtatctcctgtgtttgcactgtgagtactggagcttgatgagaagaaaaatagctacatgtgcagaaaaacatatgtagttagaaagctgggtcatggttcaaggtaagagggacccttgtcttttccrtggtagatagtggggctttctgccatcttrgttctgatggaccaagtgcagaagataaactttcctgctttcagcttagtgactggtaatagaagctggagttaagagaatcagtggcagcctctstctccatgccccagcccagtaaatctaagccaggacttggggctchggcactttcttctcactgtgcgtcctccttctctggctcaaaagagaaccacatgtaacagaaaccaagggctabaattctcayagaacccagaaaactggactaggggcctagagagtcahgtgcctgccattgttccaccgcttacgtgctgtgtgacctcaggagaagctctctgctctttgaatcatctgtgaatcatggacaaacacctccatgctagcaacattactgaaatgcagggaggaacmagtgattcaattgggaggaaaaaaarcaaagtgatgacatttactcctagacaaaachttttaggaaaatgtatcttaaaagtaggagaaaaacatataatacctgcaatcccctgcaaaagaagcctctttagcttactacttgttcatcgtctttctgtgaaatttgggcaaaactagctccctcattatctcaaataaattaatgcagttggcgattctatgtcagtttaggtctacaacttttgctttgtgtgaaactgaaagggaatgggaacatcttcatttttctgtggtggccaggggacactcagaggcttggaaatgaccctatatcatctattttcaattgcctcactctatcttttgaaatctcaggtaattcatactcctaaaaaaatctcatgttcatacataggacaaggtagaaaaggtaatattbctgttttaatttgctagggctgccataacaaagtaccaaaggctgggtgacttaaataataaatatgtgttgtctcacagttccagaggccacargtgcaaggtcaaggtgctgcagggttgatctcttctgaggcctctttcctttgcttgtagatggccacttcttctgccttctcaacatagggcttcaacatgtggattttggtggcgtaggaacacaattcctcttgtaacagtctggatcgtctttgacaatggatrttctaaaaaataaaagagagtaatagacagtacawccctttggctgaaatctttctcttggttttctaaaattttggtcttgcaatagaaaaaacaagaaagagaaccaaagtttagttcttcccggaaggtgaggcctcctccctaagtctgtgtaatcccagacactaagacatggtgctgtgcagttvtccaaagtcctactcactccagtgattctgtttctgtctttttaactgagcagaagagtctctttcaggagagcaacttcttctgatgctttatgggctttattctccttaaacttatggaatgaaaaagatcttaataaaaaggaaaatatttgccaaatttttatcatgctcataatttttgtacctttttaaatgccccatattgtgtkgtttattttttaaattttttaaaattgrtacataatatttgtacatatttatrggatacatgtgacattttgatacatgcatagaatgtgtgtatcagtcaagatatttagggtatccatgacctcaagcatttatcatttctttctgttgagaacattttaaattcactcttttttgttttgttttgttttttgagatggagtctcacaccatcacccagactggagtgcagtggcacgatctcggctcactgcaagcttcgcctcccgggttcacaccattctcctgcctcagcctcccgagtagctgggactacaggcacccaccaccacgcccggctaatttttttttttttttttgtatttttagtagagacggggtttcaccatgttagccaggatggtctcgatctcctgacctcrtgatccaccctcctcggcctcccaaagtgctgggatcacaggcatgagccaccaygcccagccaaatccactcttatagctattttgaaatatacatttttgttaactttagtcagtctgctgtgctatcaaacattagaacttattttctbtatataattggacatttgcatccattaacctgcatctctatattttcccacccctacattcttcccagtttctgggaactgtcwttctactctctctacctccctaagattaacctttttggctcgcacatattagtgacaacatgtggtatttgtctttccttgcttggcttatttcacctaacgtaatgacctttggttacatccatgtttctgcaactgacaggatttcattcttttttatggctgaattgcattccattgtgtatatatataccaccatttattcattcacccattgatgaattcacccattgatttvataacttcgctactgtgaatagtgcttcaataaacctgggggtgcaggtagtcttttgatatattgatttcttttcctttatataaatacccatgagtggagttgttggatccaatagtagttctattttttgttttttgagaaatcattatactgatttccataattgctgtacttactttcccaagagtgtacaacagttcccatttctccacatgctcaccactatccattattttttatttcctattagtagccattctaaataggataagatgatatttcattatagttttgatttgcattttcctgatatttaataaggttgagtgtttttcgtatacctgttgaccatttgtatgtctccttttgagaaacatctattcagacactttrtccattttttaattggattatttgtrtttttactgctgagttttttaagttccttgtatattctagatgttagttccttgbtggatgaatacatagcaaatattttctctattcaacaggttgcctcttcattctgttgattgtttcatttgctgtgctgaagctatttagtttaatatagtcccacttgtctattttatttttgttgcctgtgcttttgaggtcttagccataaagtctttgccbagacccatgtctggagtgtttcctgtaagcattcttctagtagttttatagttttgggacttacatttaaatctttaatccattttgagttgatttctgtatatggtgrgagacggttctagtggtattcttctgcatctggtagcattttcccagctccatttattctccattgttgcttttgttctttctccattgtatattctcagttcctttaccaaaaatgagttggctatcaatgcatggatttattgtgagttctcttttgtattccattagtctatgbgtctgtttttatgckagcaccatgctgatttggttactataactttatattgtatmctgaattcagkaagtgtgatrcctctagctttgttcttcttgctcakgattgctttggctatttgggatattttacgattccatatgaatttcacgattttttctatttctgtgaataatgatattggtattttgatagggattgaattgaatctgtaaattgctttgggtagtatgaacattttaacaatattctcccaatttatgtgcatgaaatttatgtgthtcatttttwaaattaatatttaacaatattaattctcccaatttrtgtgttttattttttttcttagagacaaggtctcactatgtttcccaggctagtcttgaactcccaggctcaaacaattctcctgtctcatcatcccaaagtgccaggattacaggtatgtgccactgbgcctggctcttccagttttgtgtactcttcaatttccttcatcagtgccttatagtttttgttttacttcctggggtaaattgattcttagttattttatcctctttatgatttgtaaatagttttgctttcttgatttcttcttcagattatatggtgcttgtatatataaatgctctgaaagtttgcacattgattttgtatcctgtaattttactgaatttgcttattagttctcaccatttatttggtggaatatttagatttttctttctttctttttttttctttttttgagatggagtctcgctctgtcatccaggctggagtgcagtggcgcgatctcggctcactgcaagctccacctcctgggttcacgccattctcctgtctcagcctcctgagtagctgggactacaggcgcccgccaccacgaccagctaattttttttttttttttttttttttgtatttttagtagagacggggtttcacaattttagccaggatggtctcgatctcctgacctcgtgatccgcctgccttggcctcccaaagtgctgggattacaggcgtgagccaccgcacccggccaatatttagttttttctgagtaaaagattatgccatttgcgaataaggctaagttggctttctcctttccaatttggatgccctttatttcctcctcttggctgattgctcttgctaggacttctagtgctgtgtagaataaaagtgatgaaagtgggagtcttagccttcttccagatcttggaggagaggctataagcttgtccctattcagtataatgttagctctgtgtttgccatatatggacatatcatggtgtattattcttttggtatactgttggattttgttgctaatatttttaattattatttttatcagcaacattatgatttttattataagatttttaaacttataaaatgtacatataccaaaataatcagatcttcatcaaatttatcaatgaattttgacaaatgcagcatattactcttgccactatcaatgtacacaaagatccctttttctcccttcaactcagcttccatgcctccagcagccattgatctgacggctatcaggatagcacagttcttcctgttttaaaacttcatacaaatctactcatcccatatggcctcccttgtatctggctttttgcgcttgttgtaatacctatgtgatcaayccatgttggtgcacgtatcagtagttctttcattttcattgctgataatattccattgtatgaytgaatcatgatttttgtamattggcagttatttcttrttttttactattataaataaagaaactatgaacatttttatgcagggattatygacaaaatcttcatttctcttgagtatatacctaggagtggaaatggtagctgtagaggactagcttgtttaactttattagatgatatgaaattgattttcaaaatggatgttttatattcytataggcaatggaggagagtacagattgttccacwtccttgctagcatttatagttattaatcattttaattttagccattctaatggttgcttagtggtttctcactgtggttttactttgcatttttccctgaactggccattcatatatcttcttttgcaatgtttcagatttctctacagattgtggaaggtgctaaataaagatgagtcctctttctctagtgctggacctaaagcagaatgttcagagtccctccacatatcccaatccagccaaccacayaccatgtttgcctccagaagctsctactccttcatccgtctttcacggtctatcacttcattctggcttaagctcacactcctccaggaagtcagttactgtgaaggtcactaacatgctcagtattgtcatgtctccacctgtctttacttctytgyagctttcctcacactcaacgactcctttttattttgctcaatttctgtggattcacttcacaaattttattataaggtagttctagctagaagaaaaaatagagaattataagaaatctttgtgaagctgccayccaggtttgtcaatttgtgacattttaatattattggctgtatgtagtatacatagaaaataacagaaacacgtgtagatagccctgattttccacagttctgttatgcatgtgtttcagtcaatactgtactgagcaaagcaagaactgttggtgaatgtgtgtcttgaatttgctgtatgcccctatattcttactaagttttaaaaagtctcttgtttttgtttgtttgtttgtttgtttttaacatggtttcactttgtcacctggactgaaatgcagtggcacaaacacaactcacttcagcctctacctgccaggcttaagcaattcctcccttctaggcctcttgagtagctgggaytagaggttcrcgccaccatgcctggctaatttctgtawtttttgtagagaaagggatttatcatgtttcccagacttgtctggaacgyctggggtcaagcaatctgcccaccttggcctcccaagatgctaggattaygggtataggcccccttgcctggctttacttttagactttttataaattgtttcttgctgattttgttatgcatttgcttgctttttccgttaacatggtctatgagakggatcaatgttcacacaaatagttcatttgttttcattgctagatagtattccatgggaggaatatgctacaatttatctcttccccacttcattgacctctacatagtctttattaaagacactgctgcaatgaacatgctgggacattgytttctggttccaagaatatgtgagctcccctaggatatgcatgtaggagtggggtcactgcacccttcccatatgatgctacatgatgtcaaattgttctctgaaagaaataatccaaatgyctatcagtagggagctggttaaaaagcattgcattcaaaaagggtaatctctattttaaaaaatgcatgcctatacaatggattgccaagaaatttttgaacaaaaaaaagaaagacatagtgtagttcttgatatttcttcatgggatggtctccrtgatacaatggtaagggaaaacagcaaggtacagaaaagcatatrtagtttgctaaaatttgtgtgcaaagggagaaagaacatayacatatacatttatatttgcttgcacagtcacaaaatacctttgaaagaataagcactacctgatgagtttggagtgagagatggtcaggatgatttcccgcacagtcaggttgtttgaagggaggggaaaagagcaagcagcaagttttgtgtttctgcaaagacagagacagtgcaggagacactgagagcctggagtgtcygggaaacccgagtctttctgccatttccccacttctgtgtatctggcagggggtggtgatttctcatccttgaacctaattgcactgtcagttggcccctcaggcctgggcagatgggatggttmatcccctgccctgcagcaagagggccctgtccaggaggcacccacagcaggggcagtgcaggtctgtggtcgctcctgctctcacctgtggtgtctcctgaagagggattgtcagttctggttccccgtgggygggaacggttgccttgtaggttactggggcaytggccaggaaaggggtgwgaaagttatgtgctaatttctcaaaattcctgctttaaatgctgatgtccaataaagatgttcgtagtttcagctgggtcttaaaaggatttccaccaatactaatgttgtaaysyatatcaaatgaaacaggaactcaaatgtggagctccctctccaggacggtccatgtgggagacrgtggctgtggcagtggcaatccccaagtgcaaagggtgggcagaggcagcctcaggctgaggggtctcaagaaactttctactccacagggagaagaagatcccctatgggctgtgagggcagtggcttgggtggaatccctgctaggaatccctgctaggaacaggagagraaggcctttcagcctccccaagcagcagccctggggagaagctgtgcttccagggatgagtggaccaggctggagcaagcwtggcccaagtgcaggtcatgggcctgggggtcagggtaggcagggcctccttgagcaagggggttcccagggtcaggtcagctgcagaccccatagcagctacatgtttccatgctgggcctgccrtgctgatgggattcttaatgggcttcccagttaggagctgcctgctcagggctggaagtggaggagcactgagctgcaggtggagggcagaaccacagtgtttagggcctgccyttgtgtgcaggtgtctctacaggtgaggtgggactggggactgaggragagaaggactgtgmgtgtgacccagcccagtcctggaaggacatggagccagggccagagcctctctttggggagtcctcctgctgtcagagctggccaggcttgagaggaggggagggcactgggtttttcccaggtcttgtcctttggtcctggggctcttttcctccttkcatggtggctggtgggcacagggcaggggytgatgttgatggagtcacgggaggggactggcaggggctgggaaaagtgccatgggagggagaaaaaagtgcagacatcatcttccctcggagaaagggtgaatctgatttgggactgactgaggagggagaagtcgtcagggagtaaaaagcagcactgtgcacccaggggagcacttactattttytctcttttctccagagcacatgagcctgcaaggcccagatcaacacctgactcagacagaacaccagggcagtgcacagctgggatttcagtctctgctctcagctcccaggtccactggctctactgagggcacctacactctgcagccaggcggcctggattgaacgccctgcccaggtctcaccagcactttttctcttgctggctcagctttctcatctatgaaatrgggaatgtaacarcatttatttcttgtggttgggtggatgaaaaktgttagtatatatgaggtgtttgcagctgtgccatattatttttgttattttgttatgattttattatattttaatacattaatgtcatgtarttgtattatcacaggtgagctttatgagtgagtgtcctggtgacggctcctccaggggagccaaggaccaactttcctggcacgttgaggtcccctygccctgtcacactctcctgcattaccccattctactctgtcttcatattttatactatagatatttagcttytaaatagacatttctggtctgtgttttatttcaagtgtctgggaacrgatagagttgaggttcaagggagaatgagagytctgtctagatgcrttgacatagcacaaagaaatctcccctcctccctgatatctccccgccagttctcagggaaggacagattcagagcaacacagacaggtctggraagggatggggggacatctgaagcaaatgttcagggcctgaagctgtgagagtacacctgccctrcagagttggagccytcatgtgatgatgcagagctgaagtgttatattctggaggggataaaaagtgctctggggtttcctgattatgaagggtaggggtcagtctgcttctaggagatgtggactgaattagtgaaaaataaatgcacagkgaatgaggatgartaaagcaagcatcagcatctcccgccatcagttcagactgattcggaggtggggaggtgggatagttcctgaccctgttgcaaggtttcttttgactttctggttttggggcacatagatggstggygctcttcttggtcagggcggcctcagctccacccaggtaaggcagtggtggcagagagttaggggagcacctatgaaacagaccaaggcagggatgggagccctyggtgcagcaggagtgyatgcaggacttgcctggaagcaagagtattagggaccctagtcaggtcctggtcccctccctgcctaggctcacaggacaaccagtaaagatgctggagtggggaattcattcatgggctatctatccagagttgtttatagacatattctttcaagtttgtattcagggttgatgtcacatacacatttatacatgctgttttatgtytaagtgtttttatattttggttagccytttatcattgttaaacaaagttgtcattaggcataaacttgcatgttaactgaagcttttgtttttattttattcgaagttacaattgcacataatkgaaagagtaaatatttgygcaggacttyctgagaaaaaygagtcttctctgcctttctagggagagtcctctcttctctrtttctgcctttctagggagcaaccactttcaagtttcagctgattcttttgactttactttcacatatctaagcaccaaagcaccatttctttrttaacattgcttgatttttcagttgcagccattgactattgcactgcacgatggtggaatcaatagttaagattacttgttctctttctttttgtatttttttcttattttttaatttatttaaataaataaaaatattctacctccccaaaacccctcaggacccacacacaggcactgcagcagcgacaggaggagggggcgctgggaacaggaaggacaccaccgcttggcctccggcaccggagggacaacctggagggctccgggagcaccgcaaaggtccaagcggagccaatcctcacaagcccagggaagggcaacgtgacaggccggcgsgacagccccaccgccgcgaagaggggctgcccaaaaggcaacagccataggagatgagcaggggtgcctrctgcgtcggagaactcatctccccaaccccaccgaygccacaaggtagagggcgaggacagcgaggtcggccggattccgcacccctgcctccaaccaccgcccatgggcggggaggagagactaccgrccgcaagcagaacgcagaacgagaagagcsgtccygttagccatgaatgtgtccctcatctgtaccgcctccggccccgcccgggagaacgcgacgtcaccacatccatcacttgttctctttcactcttcccgttctttccttttcccagtatatttatatagtaattatgtttaattcagccactccttgtttttttccgtgactcatcttctcatatgtcaacttgactacttttcacttgcttcgtagtatttgttcttcctcaagttaatacttgcctttgtttttgtttatgttctagataactctcattaatttaactttgatatctgttccatttctgtgactctgttaagaaattagagactttgaactttctattaattttactttcttggaaatgtccctcytgggcccttctggctgctcccatctggactggaggcttctacctgtgggacagagtcaccttcctaggatctccctccaccaccatctggggcggtgctttacatgcagtggagccacctggggtcctgacaaatgcagactgatcaacctgtcaaggctgggcctgtgagcctttctgtccagtttcatgagatgctggttctgctggttcatggataatagctggggtagcaaggrtctctctttttgtctcacagttttctgcatctctttttcatagtaagcacatgctaatatattttcaataaattcatgtgctcttttcctaagttggtatcagagctaattatttttttcattgcgccaaaatcyatattatataaaatttggtatcgtaacaatttttaagtatagagtactataatatgaactgtagcacattgttatgcaacagatctctagaacttttcatcttgcaaaactgaaactctacgctgaaaatctcctcawgaatccccccagcctaaccactggcagccgccattctactttcaggttctaagagtttagacgccgcatataacgaattgcgcagtattggaatttccttgtgattggcttattacacttagcattgttctccaggttcatccatgttgcagcatgtaacagaatttccttctttttaaggttgaatcatattccattgcctacatagaccacatgttcttcatctattcatgtgttgatgggtgctttgtttgcttccttgtcttggctatggtgagtaatgttgctgtgaatacrggtatgcaatgtttttcttttttacagcctccctcatttcagtggaattaatgttttagtagctacttctgatagcacatatttaaagtatttttgcatgcatcaatgtgtccattgttgttttgattctctcctggaagaggatggaaatgtatgaaggtgctgtttggcacagtatttaatggtgaagaagagacggtgtaactgaccagtgctgggtctcagcatcctgcaatttcagaactactgtgaatgcaaaaataattaaaaaaaccagtgctgcccagaaagggggagtcatccctaaatatggcggccctgggacagctggcctccctgccaggcctcttccatgggggcccttttctgcagtgactgggatttcttyccatttcactctaccctgtgtcctgacccaagagacaaggcatgtctgcmgctgtgcccacacttggagtgtgtcagtacattataaacactggctcagtggtgttagtacattataaacattggcttatcatgggttrttttattatttattgtgtattttgatttcactttactggcaacacaataaacaatgacatgatgaccctagcartcacatcctctttcttgtgtcaaaaagcaccttccaggaacgtgagaaggagacagttttcgctacagttgattaagggagagcccgctaggctgggcaggaggatttttaccgggaacctgtgcgatgagctgtgacatccttctccccaccttcaatctcagccccagcaggcacctcctgggcgcagaagcagtkcagcggcgccacctggcggtctgcamtcttcctttcccagatcaagcacagccctgaaatccacctgtccctcctctgtgcctgtgatttcttcaggggacaccagcgtgggtcaactttcttgtaaagcagaacaagcgtgagattggaccatgttacaggaggaatggtgtcatctctacctgtggagagatccctgtcaccgtgttcaggggaaggaccgagcctcactcccacgcagagaggaggctctggttgtaactgctccagtggagagatgaggacctcctccctctrcactgatggccaaagcctgcagactgggccaggcttcccctcagctatgtcctgtcaggttcatccaggactcaagaaataaactgtggacattgtctccagcgacgtggagctgaatgcacactcagtaatgagacagccttgccaggggtcctggggctgccggttgttctgggtgctcagtgtccagagaggaggatggggaggaggctttgtgcagaacaggaaccgtggagctgratgcacactcagtaatgagacagccmtgccaggggtcctggggctgccggttgttctgggtgctcagtgtccagagaggaggatggggaggaggctttgtgcagaacaggaaccgtgccccataactcattttattctgcgttcgcctttttgtcataaaacacaggtgacataaaagaaaaaaaatcttaaaatggtgacctttaatcaacagtaaacactctttaaccatcagaaagagagagaagtttgtcannnnnnnnnnnnnnnnnnnnaacaagcgtgagattggaccatgttacaggaggaatggtgtcatctctacctgtggagagatccctgtcaccgtgttcaggggaaggaccgagcctcactcccacgcagagaggaggctctggttgtaactgctccagtggagagatgaggacctcctccctctgcactgatggccaaagcctgcagactgggccaggcttcccctcagctatgtcctgtcaggttcatccaggactcaaaaaataaactgtggacattgtctccagcgacgtggagctgaatgcacactcagtaatgagacagccttgccaggggtcctggggctgccggttgttctgggtgctcagtgtccagagaggaggatggggaggaggctttgtgcagaacaggaaccgtggagctggatgcacactcagtaatgagacagccctgccaggggtcctggggctgccggttgttctgggtgctcagtgtccagagaggaggatggggaggaggctttgtgcagaacaggaaccgtggagctggatgcacactcagtaatgagacagccttgccaggggtcctggggctgccggttgttctgggtgctcagtgtccagagaggaggatggggaggaggctttgtgcagaacaggaaccgtggagctggatgcacactcagtaatgagacagccctgccaggggtcctggggctgccggttgttctgggtgctcagtgtccagagaggaggatggggaggaggctttgtgcagaacaggaaccgtggagctggatgcacactcagtaatgagacagccctgccaggggtcctggggctgccggttgttctgggtgctcagtgtccagagaggaggatggggaggaggctttgtgcagaacaggaaccgtgccccataactcattttattctgcgttcgcctttttgtcataaaacacaggtgacataaaagaaaaaaaatcttaaaatggtgacctttaatcaacagtaaacactctttaaccatcagaaagagagagaagtttgtcagctgacctagaagccccatcaattgacccagttcaatagtaaatttttattttttcaaataaaaatcaatcacatcctgacttttgtggtcctcacttctttgttctattttatattttcatcatcccaaatgatagtttagttttacctttaaaaataagttttttgttcttatttgttctataggttatccctttgaaattaatattgtctggtagagtttcctgttgtttgtattttgtggattgcaccccaaactatggtttaatatgcatctctattacctgcattttctagaaatttgtagtttggtatagaggtttgcatctattcagatttttttccccgtgagttttggtggtactatatcatgtttttcaacaaggggaagagtttaatactggttatttccctttggtgatgaaaattgtcattgctgttcagtggctagatctgttcattcattacggatggcaaagagttgtagtctcagtcttccatttcttttcatgtattatttgaataatttgtaaaataagagacttacccccttctactatttacctattataggaaaatcacttttaattaattagatgtgaaaattctaagaaaaatattagtagactgtattaaccaatgtgttataaacagactgtcttgaccaaggtatatagcccaagaatgcaaggatatttaaactttaaaccttttaatgcattttgccacttaattaaagaataaaaaacagagatgatgttattttactagattaagaaattattctagatgaaattcagcactccatctgacccatatttctccagtcatctccaggttaaagaaatcatgcaatcagattggggccactcaaataatacaaaataatctccacatctaaaggtccatgctcttaatcatatcagcaaagtcccttttgctgtgtaaagtaacatatctaaatggtctgcgtcttagggcttggacatatgtgtgaggccattattttggattccacagtgtatatggtggttgaatgaggtttaatttaattcttctctaattaaattcctagaagaagagaagtgagtaaatggaaagaggcattccagaaagaggttatcttaaaatattaaggaaatgtattattgtaaataaagtctygatgccacaaagaaatagcactcaaatataaaattttctttttttcttctcagcaaggcaattacttctatacaagggtgtgccctcacagatggagcaatggtgagcrcacccctggacaaggaaggggaaggggttcttatccctgatgcaygtggcccctgctgctgtgttattcccctattggctagggttagaccgcacaggctaaactaattcagattggctaatttaaagagagtgaaacaggtgatcagaatgagtcagggtggwgcaggtaactggaatgagtcaggctgggrcaagtaatcaggatgartcagggtggagcaggtaatcagaatgagtcagggtggagcaggtgactggaatgagtcagggtggagcaggtaaccagaatgagtcaggctggagcaagtaatcaggatgagtcagggtggaacaggtgatcaaaaaaggttgctttatgaggaagttaagtttaaaagtagagggcaaagaattgaacatactgacatgttaattattttaagagaaatttagaactcatacctaacagtatcatagcactgtgaataaaaagagatccacatttactcatactgcactggaacagaagatgttaaagagaaacagatatcttaaaatttgccacaggagaaacacagatcctctaagaagcaactggttaaaatgtaactgactatyccctgtcagccacagcagccagaagcaacataatcatcaaagatctgagagaaaaccaatgtcaaactagaaatttgcagctgacaaatctctctttgatgaataaaggtaaaacaaaacattatcatataaatgaaacygttgcactgtctccataatacccaatytcaaaatatctacaagaacagagaaatatgtaagaacaaaagagagaaagaaagcakaaattttaatttgtaatctttggtatatgtaactcagtactgtcataaaatattaataatgtagctttcaaagaaaaaagtcatgtaaaatacataacatgctgtgytataatttctttatttatcttcccacccccacctttgacttctatgaagtccaaggaagtttgaktcttttatctgaggctcaactccatagagcacagtacccagaataaggtaggtgcttaatgatgtttaccatwtgaatgagtttcctggaagtacttagcagatcaggaattctgatgcataarcacaattcaaaggtggctgaggagtgacatcagagaacatagtggcataggaactccaagggccacctctgcacagagacaatgtgcttgtaaaacatcactataaaaaaaaatcccttggctgggcatggtggctcatgcctgtaatcccagcactttgggaggccgaggtggggggatcacctgaggtcaggagttcgagaccagactgatcaacatggagaatcccagtctctactaaatatacaaaattagctgggtgtggtggctcgcgcctgtagtcccagctactcgggargtgaggaaggagaatcgcttgaacccgggaggcagakgttgcagttagccgggatcatgccattgcactccaccctgggcaacaagagcaaaactccatcaaaaaaaaaaaaaaaaaaattccctcrgagagctgttaaagcaagaattcctggacctaccaccagatattctgattgggttgataaagaatcaactgcattggaaccctgaaaaatcatcaaaggtttattgcaacctagcaagtccagaaaaatcaactggaactcaggagcagagctttgtggcamcatatcttacccttggcccattcctccctgttcaagtcagtagtgatcttgaagacagcagcctggttccttagtgtgggctccaatgccagtgggagccgagtggaccatgttctcraagtgttgtggttgtctaccttttcctgttgggtgactccgtgaaggatgataagaaatggcttacattgggctgggcatggtgactcatgcctgtaatcacagcactttgggaagctcagctgggtgcatttcttgagttcaggagtttgagaccagcctagacaacatggtgaaactccatttctacaaaaaatacaaaaattaactgggcattatggcatgtgcctgtagtctcagctactcaagaggctgaggtgggaggattgcttaagcccaggaggttgaggctacagtgagccaggatcgtgcaactgcactccagcttgggcttcagagcaagaccttgtctaaaaaaagaaaaaaaagaaagaaaaagaaaataaatggtttgcatttattttccctactcagaactctcttaggtcacagaggcagagggcatctgctaaaaccatttaagtgccactgaaccagcagctgcccccttggggcaaaaatatattacatgagraaggtaatagacatacagaaaagcctggaggagaaactgggtgagtgagatgggaatatgggttttgaaaagcttccatatccctgggaatctgtatagcctcctbcatgaccagtatgtcgcacagactcacaaagcacctgagaatgccctgtgttcacacctcttgctaactttcaatatctgcacaagtaggaaatgaaggccaaagcagkattgtaaactgcccagcagagtgttgagggcatgccccaaaacacacagagagcccagataaaaagattgaattttyttttcttatttctttttggctgaagatgtttcaggaaatatctatcaaatcatgagttgaccactaagcttacagaatagagacttcagtgatgacacacaataaagaatacagtctatacaaaaatagtttagaaaacatgattttcaaagtcaccacatgttagtattcaaaataaaaatgaggtatgcaattaaactagacrgtaagacccattctcaagaaaaaagagsaattgacagaaactgttcctgagaaaggccattgaacatacttactggacaaacaactttgaattgactgcttaaatatgttcacagagctaaaggaaactatgggcaaaaaactaaaggaaatcagaagaactatcttaactcaaatagagaacatcaataaaaagayagaaagtttaaaaagaaaccaartagaaattttggagctgaaaagtgcaataactgaaatgaaaaatttactagagtaattttactattttttactatattttactagagtaaatttactatttacttttttacaaaagcaactttcactatgcagaatgaagaatcggcaagcttaaaggtaagacaattgaaattatccagtttgaggtgcagaartaaaaaaaaattatgaagaaaaatgaacagaacttawgaaaactgtgagacaacaccaagcatatgcattttgggaatcctcaaagaaaggagagagaaaaagaagaatggctatttggaggaataataacttcaaatctcctaaatttgatgaaaaatataattttactcatccaacaaacttgatacattttaagcagcaagaattttaraagtccacactgagagacgttataatcaaccagtctacaccaatgacaaacagaccatcttgaaagcaataacagagaaggaacttttcaggtacaatggatcctcaataagattaacatacaaattttcatcagaaaccatggggttcaggaggcrttgggatgacaaatttaaagctgagaaagtaaaaggactatcaaccaagaattgtatgtctgcaaaactctccttcagaaatgatggagaaatcahgacattcacaggttaaaaaaagctgactgagatdgtctcaaccctacaagacatatatatatacacacacacmtatatatatttgtaattcctctcttgtttttcctatttgatttaaaagaaaatgtccatcgaccaatgaatggagaaacaacatatagttttttcctacaatagaatattatttggtcataaaatgaataaagcactggyatatgctaaaacattgctgaatcttgaaaacaagacaagtgaaggaagccagtcacaggaggctamrtaacttatgagcccatttttgtgaaatattcataagaggcaagtcgatagagaaagaagtggatttgtgrcgacagggtctgctggcaggtggaaatggagggtgactgcttaatgggtgcagagttccccctgaggtgataaaaacactctggaactagagagtgatgatggttacataacattgtgaacatacraattgtcactgcattgtgcactttaaatggttacggtggtatcctttgtgtttatgtgtattttaccacaatgaaaamgaggctgaggaagrtattccaaaatcttttgtatagtaaactcctgagtttgcttgagaatctgcctatctgtcttttcttctcaggacatcatctcctacccagagcamacctttgttcttctgcaagtagaaagccctctttcagaacattgtccaagatcagccaggcccaaccctcaaaatgactttctgtctttgacccaaatgctcaaatrcaactctggggctaatttcagtgggagtaagagattatccaatcaggataattcatttggagagaaaatgttttgcttaagtcagcaaagtcctttgctttcctaaaaaggatcctgcttaccagtgagtacagastttttgtacatttgaggtggagttctcagcagartaattaaagatatctgtagaaacaccacacacattatgtgtagctgactgattcacccctctgccacccccaattgaaggaaggagctgtattcttatcttggcccatccatcaactgaatgccgctggacatggaacattrcaagtrtgaagcttccagggttctcagttgctcttcctgctgttgyggagactccaytggtgtggctcacatccaggcaggcctgcaggaagctgtttcctaattctcaaggccaacattttcagtgaacccataccaaamccctaggttctcagggactcagattttcatctgtggaagaaaagaatccatctcactctctcaggtgtgatggtaattatatatattataatataatrtatatatacataattataatttatatatctataaaagagataatcagtattccataaattgatgatattctyagtgttgacttcattgcccaggtgaacactgtaacagaaggatgagtcatggattgtagaggaacaatattttttttactctctggaggagccatcagtaggcatttctgccatatggacttcaaatgagaaatttgttttaggttgagattggaaggagatctgaacttctttttattattattattttaaatatgaggtctcactatgwtctccaggctggagagcagtgactattcacaggtgtgaccatagcctcaaattygtgagctcgagccattctcctatctcagcctcctgagtagctgggactacaggtgcccaccacagtgttcagccacttttcattgttattttacttcaaatgttttattttgaatgttaaaaatacatgtttctacaytagaaatatgaaaatgtatttgattacasaagaatttaaaatgcacayatcaacacstggttgaattttaaagaaaaaaaaatgcagagaagaaagaaatatcacccaggcttcccctccaaagaaccactgctatcrtattattgaaacttcctggactgcagtgtgaatggtcatccctggagctatcttctgcagtgrtgctgayttccattcttttgttttctatgtatatatttttatatatgctttcattgtagaaagttgcattcataagttttggggttttttttaagatggagtctcactctgtcccccaggggctggagtgcagtggcatgatctcggctcactgcaacctctgcatctcggatgmaagtgagtcttctgcctcagcccctcgagtagctgggattacagatgtgcactaccacgcctggctaattttgtgtttttaatatagatggggttacacttgttggccaggctggttttgaacacctgacctcaagtgatccacccaccttggcctcccagagtggttgtgggttattttgaagttgctttttgaatgtattattatgaaagtagttttccatgtcataaagtctgcataaaatttacacacttctagaagctgcatcccatctcaaacaaggagaagtcascagggttcttttagatccatgtgctttcatcttgtcttttggtaaagaatattttgacaagcatgtttgtacatgaagattcttctatggttgtgattttaaaaattcatagaacactcaggayggacatggtggctcatgcctgtacttccagcactttgggaggctcaggctggcagattgcttgagcccctgagtttgtgaccagcctaggcaacatagagaaaccctgtctctasaaaaaattcaaaagaattagcygggcttggtggcacatgcctgtagtcccagctacttgggtgtctgaggtgggagggttgcttaagcctggaagattcaggctgcagtgagccatgaacaacactgcactccagccagcaagcccartctcaaaaaaataaattatagactactcaaattgtaagtattaaaccagtgtctgtgagagtttttctggaagggatgtgagtgggtggactggtggggaagatsctctctcactgtgggcagccacagtccaatcacctagtggcccagatagaacagaaaggtagatagaagtaaaatttctctctgtctctgtctctctgtctctctctgtctctgwctctctctctggaactggggctgggacacccttcttctcctgccttggacatcaaaactccaggttcgatgatctttggactctgacttttgcaccagtgagcccctttatcctcctgttctgtattctgggtcctcagggctttgactttggactgagccacrctactggcttttctagttctccagcttccagacagtctatcatgggacttctcagcctccataattgtgtgagccaattagcccaataaatcacctatctatctatctgtctgtctatctatctatctatctatctatctatctatctatcatcatctawcmtctatctatcawctatcatctatctatctattatctatctatcatctatgtacctatgctattggttctttctttcttggtaaccttaataaatcaacagacaataaacaaataaaacctgtcayagtatcactgataattgccattaagaaaaatatgcttgggttagaagattggtggcrgtggtgggaatggcaggggatagatttcagaagaggtcactggacaagacatttctgaacacttgaccatgggacatttragcagggaccttaatggtgtgaggagtgagccatgtggatcactgggcagcacatgcatgtgggagtcacarcaggggcaggtggtrgagacagggtggagtagacaagaaactggtgtgagtggagaagartgagctaggctgagagtaatgggatgaggccaaagtggccagaggggaccctgtgataaggagtgcataggaaatggtgggaaactggggtttccttgtgcctaagaagggaaggagctggagcgttcataggatatgcyctaattcccattggaaaggcacgctctctctgttgtgtgggtgatggacagtgggcatgagagwcagcaggcagcccagctggaaggcccttccggttttctatcctagtgakgatggttctggggtggaggtggcagaggagtgaraagtgattggatttggtgttgatatatatttttwaaattgtggtaaaacacacatactatacgatttaccttctaamaatttttttcagtgtacaattcattggcattaagcacatttacaattgatggtggttacacaaacaccaacatgcattttcagaacattttcatcatcccaacagagactgtacccattaaatgacagctgcccattgttcctgccytcagcccctggtaacctgtattctactttctgtttttgtgaatttgcttattctaggtgcctcatataagwgaaatatcatatttgycttttttytggcttattttatttagcgtgttttcaaggttccatccaatccaaatattcttcacttttaaggctgattaatattccatgtgtatatgcaccacattttgtttttccaatcatcctctgatggacacttgggttgcgtccaccttttggctattgggaatagcactgctatgagcatgactgtacaattatctgtgtgcatacctgctttcaatttttggggggtatacacccaaaagtggaattgttgcttcatrtggaaattctatgtttaccttcttgagaaagcrtcatcctgtttccatgrtggctgcactgttgttcactctcagcagcagtgcacaagcattccattttctccacatcctcaccaacacctggactagtgaagctgagcatattttcatgtccttattggaattccttatttttatgtccttactgtgtatcttctctggagaattgtctattcatgtcttttacccatttttgaatgagattgttttgctattgttaagttgtagttctgtatgtagtctggatattaattctttatcagatatgtgattggcaaatattttatcttattctatgcagtttcttttattttyactttyttttktttttttttttttttttttgagacrgagtctctctctgatgccccrgctggagtgcaatggtgcaatctcagctcattgcaacctctgcctcccaggttcaagcgattctcctgcctcagcctcccgagtagctgggattacaggtgcccaccactgcgcccggctaatttttgtatttttagtagagacagggttttgccatgttggccaggctgatttcgaactcctgacctcaggtgatccacccactttggcctcccaaagtgctgggattacaggcgtgagccactgcgcctagcctcttttcacctcttaatagcgtcctttgatgcaaaaaagtttttacattttgatgaagtcttatttgtcattttccttttattgcttgtacttttggtcaccagccaagaaacsactaccaattctaatgaccataagactttccctcagtattttcttttaagagttttacaggtttaactcttaagattagttctttaaggcattctgacttaatttttgaaaagggtgtaatggaagggcataaattttgtccagcatcattcttttgcatgtggatatccaggtttccagcaccatttgttgatgcaccatctgttgcagtggggctgacacatttgtaagatgcaatgagcaygaatacatgggagcaccatgaatttatttacatgtctttacttcacagttgttttgaggaggctttcactgagaaacctaacagaaatgaatayatatgacttcytataaaatgaaatttaagtaaaattatactttttaaaatgttaagactggagcaagactggaacatcaccagacaaacagaaacataggctgaaatgaagggtttatgtttatcttgctacaaattctgttggcccacaatctcttatgcttattgcataagagagccacagaktggggygatagctcaaataaccagtccctggttttctgcttcagaaacaagtttaaattctctgcttagacaaagtaaagaaaataattgaaagatgttgaatgtgaagttggcatctacaaagtcaaagaagtgagtagtaaatgtaaacatcaggaatccaaggagattctatctttttacacagaaatggcctcactatgcactgctgaagggagaaggtccctccaggagamcttcatgatgaggaaaaacccaatatgatgtaggggttttctgctgcagccctaaattgaattgtccttcgctctaaatacaggtctcacaaagttttatgtcttcaatgatttcacctgggccgagattttgttttgtttttgrtgttgtttgttttgagctgctgcctggggcttagaaaagtgacttggatattttgccaaagttgtatttctttgatggaattcgaaatccatgaacactctgctttcctgctgtatycccagagcgggttgagtaccttgcacttcttttcagcacttccctagaagtggtagaagatttggagttagggcctccctcaatctctgccctttctttaattcagaggatcacaaactgttgggggaagagtggtatcttgggcccccagttgatcggatgaatattaatatccaatgtcctgtaatgaagtcatgtgtgcatgtaacatcacttctgcacgcagtgtcatgggaaagtgggttcgcggaccccaggttaaaagcctaagcactaaakgcacagagctagagctctaggaggggcgggatggctggggtggaacgtcatcttgtcctttagtcctggggcattttcactcctcacatggtgggtgctgggcatctggcaggtactgatgttkatggagtcgagggagggtactggccggaactgggaaaaacagggttggggagataattaaggtgaacattattttttctgagtgtaagtcatggcttgaaatctggagagcctgaaggagatcccgctacctaaacccgttttccttttccctcaagcctcatttggccayaggcccagtgtcaacaccagggggcgccacagaccatgaaggcaccgcgcagctgggattgtttgtggtgggctcctgggtccctgacttaaccagggaagccaagaccctgcagccaggtggcctggattcaaccttcagctctggtcctactgacacttttcttcctggtgcctcagtttcttaatctgtgaaatggtgaggacattacagcacttacctctcgggcgggtttctcaacagcagccctattaagaatttgrracagagaatcccttgtggtctgtcctgtgcattgtgggaggtttgccagcagcaccccactcaccccctcccaccaatccccacgtgacaaccgaaaatgtcccaggatttttaggtctcccttgggtctagagctgcatttagtcaagcattttcccacctgacatttgagctcatctctgctttggtccacataaggccactttaaaaagatgttgtttctttaaagattctaaccatcttttaaacaaatctattttcttcctttatttctgcattcagttaatccttccaaacccttggtttagtatatctcaaaatgtatcaactccagttctagtaattaacatatgtgacttgcatgatatctgctatgacccctagtagagttctgattcctttagcacagggaatgtgttctcgattctgctctggatgatgtaaatcaatttattttactttacttgtctgggatgttgctcctcacctgtaaaatgtaaatgtggatatggcttggattactaagtggttttatttcttcattcacctgacatttgttgtgtacctgctgcaagtcaaatacatggyatgrtattgtttccttgttcacaccacagcaaatgagaaaatgagacattatagccaggtgtggcggcacaggcttctcgtcctagctactcagaaggctgaggcaggagaattgcttcagcccaggagtttgaggttacagtaaggtctgatatcaccattgcatttcaacctgggcaacagaccctgtctctgaaaaaaaggaaaaagacactgtgagctgtctacatgtactctatgtctcaggagactcatgtgctgtaatttttctaaatggcatctccatgtggtctttcatgaatgtttgtctggtatttcttttctatctttttactttcaacttttctgtaccttctactgaaattatggcttttgtaaatagcctacggttatttatttatttacttatttatttttatccctctgcactatttgtcttgtaattggagtgtctgagtccattacgtttaatgtcattgttgacctcrttgggtttaagtctgtccattttcatttactgccttctaatattatctttcttgctcaactatttttcttctgttgccttctttagatgaataaaaavctttgcattattgtggtcttctcagtaagtgttctagttacaaattctcttrttatttctttaattatctgagaaagcacaataatctgtgacttattataaccaacagcagaccataacttccctgactttcacctacctgtgcagacagcacaggggagaatcaatgctctggctctgagacacaggggtggtggaagtaggatagtgattggatgatgaatctgtagctgcagaggcatctgggcccctcaccttcattcctygtagatgtcacctccactggatgcctgcaatgccctctcctctgtatgctcctgccagagtctccccatctccaytgacagcagctccacccttctgctcactcagtccaatactgtgggtgtccttgattcttctttctcacaccacagataaatccattagcaagtgctgtgaattcatccagaatcccatcacttcccactatttcccctgctcacaccccagtcaaggtaagcgacgtctccatcctggaatactgcactcctttcccaccgttttycccactgcctcactagtcccccacctctcaattctgttctcagcacagcagccagagagaagctttcaaaggataagtcctaccatgtcccactttccaaaactgtcctctaactccccatgtcattcagagcaaaggtcaacatccttcchacaccctccagggcaacctgctctgggcacacctctgacttcatttcagtttctctctgttcaacacttctggcctcttcctccttccaggaacacagacaatttcctgccctagtgcatctgcactgaaggtttccctgcctgaaaagaactttctgagacatccgtgtagacaactcctcacatccctcaaatctttactccaaggtcacatttgcaacaaggcccatgctgaccacccagcacaacagccacctccctgtacccacagcccaccctctsgatcacctgccacacagcacttgccaccttctaactcaagcattttctgttcctactctgcttatactatatcatctgcctgcagaggtgtccaatcttttggcttccctgggtcacataggaagaagaattgtcttgagccacacaaaaaatacactaatgacagctgatgagcagaaaaaaatagaaaaaagaaaaaaaatgcatggataattttcatgatatctgccactacagataagcaaaaaaatcrtcacattctaaagctgtcctgggccacatgcatcccgagakctgcaggttggacaagcttgcatctagaatgtayacacgacaaggccagaaatttttctgtttttactttaacgatgttttctaaatgcaaaaacagtcaaatacctagcagacaacaaatgccacttgaatggatgattactgtagtgcgcccccctattctaaaggcaatatctttattaatgtagactcaggccaaatgtcattttgtagccgctgtggaacaatattatctcatgtggatataaatgcaccagtgcttttctcaccagggctgcttttgtgtcctccctccctccctcctcccacaccaatcctcctgcacactgcagcacacaaccatatttgtctcttsaggaaagataacccaaggcttatggctccaattatccaaccacatatgaatctaaattagactctgctttacaaatccatgagtttggtttggagccagcaataggattactacaactcagggcaggaagaagagtaggagagagagcagaagaggagttccaacagaaagtaaactacaatgaaaaactctgggacctctcctctcgggaagtttcagaatctgcttcctttaagaaggttggggaagccaggcatggtggcttacacctgtaatcccagcactttgggaggcagaggcgggcagatcacaaggtcaggagatcaagaccatcctggctaacatggtgaaatcccgtctttactaaaaatacaaaaaattagctgggtattgtggcatgtgcctgtactcccagttactagggaggctgagacaggagaattgcttgaacccgggaggtggaggttgcaatgagttgagattgcaccactgcactccagcctgagtgagactccatctcaaaaaaaaaaaaaaaaaaaaaaaaaaaaaaaaaaaaaagatggaaaatacaattgaaagagacctggaaggaggggaagaggtgtaggggtctgaaaatttttcttctgataacacaggaacttctavgtgtagggaccaycctaggtgatatccaagtctatgtgatcacaggtcctggtgggacaaggttctactgaagggccaaggacaatggagcagcaaagatgacccagctgagcagtgaccacataaagttcatggtggcctgagcacccactgggcgcagccccatctactctcctctcctgcaacaaatcagcacaagaaacacgtgtactgtggaaagttctcatgtcttccatttattttgtctctcaaatttcaggaatcttctcctttaattaacchatcaatctctcttggaaataatttgaaaaastaaatttayactcagattctaattttaatacagaagtaagttatagctcagtgsaccacaaatttgagacagagacggagacatcccagccccttttctggaacaggaaaggtgattggggaaggaatgcagttcagcatgaggaagagggtcatggtgggcacaggggtgggctggtctctgcasaaagagragtcagggttcttgaagtcacaaagggacttgccactcagtcccacacagggcagctgtttcacactacagaaaaatattcatgaacaaattcatatcagtcacagtgaggggtgacactttaaacagcccatcacatgctcaatacattsaagtcaaagaaacctcatagcacagctatgtccvctgttbccctcaacaacccacacacatcaggccccccggggtgtcacatttacaagccgtgagagacacattagagccctgggcactgtcactgcctagagtagaacaaaaacagcacctggtcagagaccacaggagatgtggccagaggaggaattgtggggtgggtgagctcccccatgggctcccaaacacaagatcccaaggatctcagggatcagcctccttcatacttacttgcagcctgagagtagctccctccttttcaatctgtgggaagaaaaygtcctgtgagaggccagaaaggtggcagggccatgaggtcctagaggaacctcctartcttggaccctcgagaagtttccagaaatgtgtgactgcagacycagggcgggatcaggaaaaacaaggaaagcagatgtgggtcctcgaccaactgccctcctaaggtctgtccttagccagggaccttcycctgacctgtgattactrggatcaggtccccatcactacaatcatcaaggtrataaatctgtccttcattgtcacaggtgctttacaaaagagaaggtgctggcacacagggcccaggctgggtaggcccatgagtgtggatggtgcttcccagtaaccaggcagggcrcacttctacctggggcttgaaacccccagtgggacaagaaaactcagaccccacttgtcaccccttccttacctgagctcttcttyctccacagcacagcagcgaccgcagctccagtgactacagctgcaaggacaaccagrccagcaacgatacccatgatggggatggtgggcagggaagactgctctgggaaaggaggtgaaggtgagggtctctgacccccagscctcaccaccgaccctgttaaaggtcttcagagaggctcctgctttccctaacagacatgatgcctccatctccctccttactccatctcagcatgaggggctcyggcagcccctcatgctgcacatggcayrtgtatctctgctcctctccagaaggcaccaccacagctgcccacttctggaaggttccatcccctgcaggcctggtctccacgagctccacgtcctgggtctggtcctccccatcccgctgccaggtcagtatgatctccgcagggtagaagcccagggcccagcacctcagggtggcctcatagtcaaagacagggtggtgggtcacrtgtgtcttgggggggtctgaaaggaagagtcagaaaaytcaagcactttgcatctstcatgggacactccagcagcacctggatgtgaccatcctaagaatgaaccagatacctggggtggggaagggagcacagaacccagacaccagcctggacacgggcacctgggataatctcctattccttggaaagttctagtctctgagcgggggagcagggacctcyggttctgacctgagtggaggccaagggactcagaggagctggagtcagacycccacacacattgagtgtgaggcagagaacaaggcctgaggggaaaagtcctggtgccaaggctgctgtggggtcaaagggaacccctgatcagtcytccagggattgtcttcccctccactccctcagagacttcatcccttaattgtcccagagagcaggacggrccctcagaatcactctctggtacaggatctggaaacccaggaggattcctctccctcaggaccagagggagggcgatattctrgtgttggtcccattttcctcctctccttgtgctaggccaggctgrgaggtctacaggagatcagggaggcgccccactgcccctggtacccgcgcgctgcagcatctccttcccgttctccaggtatctgtggagccactccacgcacgtgccctccaggtaggctctcctttgttcagccacattggccgcytcacacttgcgcttggagatctgagccgcagtgtccgctgcggtccaggagcgcaggtcctcgttcagggcgaggtaatccttgccatcgtaggcatactgttcatacccgcggakgaggcgwccgtcggacmccaggtcgcarccaatcatccactggagggtrtgagaacctggccccaccccytcggtcagccccgcccaccgagcctcgccctcgcccggacmcacccgcrgggattttggtaaaggcgcctkggggttctcccaggtagagggtctgggcgggtcccgcggcctcggggtggatcccagacccggagactcgggagtacccgggscgtccgtggggcatggaggtggggggtcgtgatctgckccctgggccggrgttactcactggcctcgctctggttgtagtagccgcgcagggtctgcaggttcattctgtcagtctgtgcgtgggccttggtgttccgtgtctcctcttcccaatactcyggcccctcctgctccacccacggcgcccgcggctccatcctcggacacgccgagtcgctgtcgaaccgcacgaaytgcgwgtcgtccacgtagcccatggcgatgaagcggggctccccgcggccgggccgggacacggcggcgctgaaatacctcatggagtgggagcctgggggcgaggagrggttgagacccgcccgaccctcctcccggcgcggctgccgrgtcctgcgcccccgccrggcsggcccctccctcctccgcgcaggggcygtttccctcctgaccccgcactcacccgcccaggtctcggtcagggtcagggcccccgagagyagcaggaagagggttcggggygccatgaccaccatccttggcgtctggggagaatgagtccgggtgggtgagcgaggactttagaaccagraccgcggcgacgctgattggcttctctaaaaacctgtcacctaatgggagtgagaactggggccgcccggtgagtatccaggaagaaggacccgacacaggttaggagaaggaggagagaatccccaacgcggggcctccccaayccatacaccgcctgtggggcctgagaccctgagagccacgcttgaggccctgggacttcgccctgaccccgctactcttgtgccaagcgttctgtctcagtgtctccctgagtcttggcccaggagctgtctgagaaaccagggagaaaccctcggcaaggtccctggccctctcccttcacttttcatcccggaatccctgtccctgaactggactccctgcctcccactccttgcctgtcctcctgtactcttctagaagaaaaatcaccccasggagcttgktgccagagagtgagctcgccctgggattgtaggtgtaaagacagggttttttttcccccttaaatctggaaaagttgtgcctgagtgcatgagatagaatagagaccagtttgctttttgtttattaactatagtgggtagcataaycttggtaacccctgaatgatcaggaatctaatmggtaaaaaatgtgactttggccygttggtatataaatgcatctaaaagcmttacaacasgactcacaaagctcttaagtttcactttcccagacartgtatctgtgactcccgcttgttttattttaaatttaccttcattccgtagccctaagtttccgtgtgagtccaggacatctcctcaagacaaagtaccacactatgttactatatgttgcaaccaggagccagcacaaactttattcacctcacagttgtaagtgttcagtgcagtcacaatgcccctcactagtgctcacgcactgcctgtttttaggaagtatccacatgtgagtggagtgtatattttttaggaatacttagtattttttaaacctgattaacataaaaaacaattagtttctaggcagacccacataagatattaaaggccaactgcaaagaacacccagcgaggctctgtagatggatgtawtaaaatctataaaayaatgtgtttaaacctaagagttcygctgctttggaattctttcctctgctccttttcctcacctcctgctcctccagcccttccctccgtccctctcatccctcaggccctcttctccccttaatccccaccaccctctcactcctgaaytgtggctctagcactgttccatgacctgctacatgagtgttctctctatagtggtcctgctactatgagtcagagtgtgtcatttctccacctaaaacactccagtggctccacctcattcttgtgaagcttctagaatgtcaggcacttgagcatatgagggcatacctggttcattgtagggactaaattattttttcttggctgaatgaatgaattatgagtgtattaaattgcatcacagaaaattataaaatgtaaaacactraaaaagttaaaaaagattttattttatgtaactagtgtgcgtatcaattcatcagttcattccaggagtcttttgagtctgtgtatgaattttataagactgggtaacaaattgtcacaaacattggctttaaacagcacccatttattgtattcattgatttatttttagakacagagtctccctctgtcatccaggatgaagtgcagtcacatgatcatggctcactgcagcctcaaattcctgggctcaagggaccctcctacctcagtcttcagagtagctaggactgcaggcaagtgccaccatgcccagctaattaaaragaaatgtagagacgagtgtctcactatattatcctagctggtctcaaagtcctggctgcaagtgttcctcctgtgtcagctcctcaaatgttaggatacaggtgtgcactaccacgcctggccaaataacacycatttgttstttatagtttcttaatcagaaatctgggcatgatgtggatggaatctctgttccggtcttcctaaacctgtgttttcattttgaatcctccttcaggcttatacagaggtggcagaatgcagtttctggcagttgtaagactgaggtccctgttcctcactggctgtcactgtagagaacagggagggctgcactyaatgcatggtgcccaccagcgtyctttcctacacagccccttcattttcaaagcccacagtggaggaaacccctyatgctgaatccctctcacactgtgaatctctatgctcaggaagaacccagtcctttcaaggactctccttattaggacagtccaagcaggataaactcagcctaaagtcaactaattgaggcccttaattatatctgctaaatcccttcacagcagcacctacattagagttggttgaataactgggggaaggtgaatgaccaggagctggttgttgggagccatgatagaatcagcccaggaagggctggatcttccttttgtgtttaatttggacacagttggaaaytgaagttcaagtaaagtgatcattrtgaatagtaataaaatacatcctcttcagccgtggaaattctcctttccttttaaaactaagttacatgtttaatatcttatagttaatttagaccaggkgtggtggctcacgcctgcaatcctagcactgttgaaggcagaggaaggcagatttgactccagaagttcaagatcagcctgggcaacatggtgaaacccccatctctacaaaaaaattagaaaattagccaggcatgttaattcatgcctatagtcccagctactcaagaggctgagatcagaggatcccttgagcccaggagrtcgacactgcagtgcatggtgatcatgccactgcactccagcctgggtgacagagyragaccctgtctcaaaaatagtaatatgatgatgataaatttagagcaaatgcaaattaaygtgtaataatacatcctctcttgtgaaaatgtattagttatttactattgtgtaacaaattatgtaaaacttagcagctcaaaacarcaaatattcatcatctcccacagtttctaatggtcaggaatccaggagcggttttcctgagtgcttctggctcagggcctctcacaaggttgcagtccagttgtcagcctagggctgcatcgtctgagggcttcactggggctrrggattcayrtgaaacatggcttagtcacatggctgttggaaaagcctagttccttgctgtctggtcccaggggrcctcagttcttagccacatggaccttcctgcagggctgcttatggcacagcagctgggtccccaagagctcatgatcccagagacagagagagagaaggtggaagccatagtgagtttcacattctacacccagagtcacaaactgttatgtcarcattactctatcagttagaagttgtattagtctgttctcacactgctataaagaaatacctgagactgggtaatttataaaggcaagaggtttagttgactcrcarttgtgcatggctgaggaggctgccccaggaaacttacaatcatggcagaaggggaagcaaacrtgtcattcttcacatggtggcaggagagaaaaatgcagagtgaagtggggaaaatccccttatatggtacatatacaccatggaatattatgcagccataaaaaggaatgagatcaagtcctttgcagggatatggatgaagctggaagccattatcctcagcaagctaacacaggaacaggaaaccaaacaccacatgttctcacttgtaactgggagctgagcaatgagaacacatggacacagggagaggaacatcacacactggagcctattatgggagggcagtgctgaggggagcattaggaaaaataggttcaaccgctgacttccacagcttgggggaatcatccccatgattcgatcacctcccatgaagtcccdccgccaatatgtggggathagaattcgcatgacaattcaaaatgagatttgggtgggaacacagagabaggccatatcagaagtgcatcattaagtccaagccacacttaagagagggaattaagctgcacctctgaaagagagctgtactaaaggacttacgtatatgttaaaagcaaaattaaaactattgtttcaggattttgtaaatcaaagacttcttttatctaattatttttctttaatgctttaagcttatcttttaatttaatttaatttaatttaattttaagttccagggtacrtgtgcaggatgtgcaggtttgttacataggtaatcrtgtgccatggtggttggctgtacctatcaacccatcacctaggtgttaaccctggcattcattagctatttttcctaatgatccccccatcactgccctccccgaacaggccccattgtgtgtttttcctctccctggttccatgtattctcattgctcagttcccaattataagtgagaacatgcggtgtttggttttctgttcctgtgtgagtttgctgaggataatggcttccagcttcattcgtatctctgcaaaggacttgatctcattcctttttatggttgcataatattccgtggtgtatatgtacyatattttctttatccagttcctcaytkgtgggcatttgggttgattccatgtctttgctattgtgaatagtgctgcaatgaacatacacatgcatatacctttataatagaatgatttatattcctttgggtatataacctttaatgggattgctgggtcaaatggtatttctggttctaaatctttgaggaattgccacactgtcttccacaatggttgaaccaatttacatttccaccaacagtgtaaaagccttcctatttctctgcaaccttgccagcatctgttgtttcttgacttttaataattgccattctgactggcatgagatggtatctcattgtagtattgatttgcatttttctaatgatcagtgatgtttagctttttttcttatgtttattggccacatgtatgtcttcttttgagaagtgtctgtttaggtcctttgtccactttttaatgaagctttttttttggtgtaaatttgcttaagttctttgtagcttctgaatatgagacctttgtcaggtggacagactgcaaaaattttctcccattctgtaggatgtctgttcactctgataatagtttctttcactctacagaagctcttttgtttaattagatcccatttgtcaatttttgcttttgtggcagttgcttttggcattttcatcataaaatctttgcccatccctatgtcctgattggtattgcctagattttcttccagggtttttatagttttgggatttacatttaagtctttaatccatcttaagttaatttttgggcaaggtgtaaggaaggagtccagtttcaattttctgcagattgctagccagttctcccagcaccatttgttaaatagggaatcctttgcccattgcttatttttgtcrggctcattgaagatcacagggttttagatgtgtggtcttatttctgagttctctattctrttccattggyctatgtgcctgtttttgtaccagtaccttgctgtttcagttactgtagccttgtagtatagttttaagtcaggtagcctcatgcctccagctttgttctttttgcttaggattcttctggctataggagctcttttttggatccatatgaattttaaaatagtttttttctaattctatgataagcttcactttttaaattaatgactaaaagtttgagacatcacagagccttaggtgttgaggggaaaacagtttgaggcagagaaaggagatacaacagtatctctgagtttttcttgccaatatctttaataacagcaatgttctcttcaatgagttaacacagttgagaacatagaataactagatcaaatagttccaagactttagtgctataaaaatartgccttgaaaataagtctttgttttgtctaaaatgtctcaaatttaggggaagtatgcccctagtgccagttttcttattgaaatatcgtcttccaaaaaacatttgcctacacttaaaaaaagaagtactgctctgtctctggagtagccatcctttgtttctttctctaattaacttgctttcacttagaaaaatattgcttaatcagattgcttttcatttacaaagatgtgaatctcatacttcagtcaacacatctagcatgccaataacttcggtttgatgcagtatcacgaaattgttagctcgaattgagaaactagttttttcrataactggctattcgatcrgcattctataatacacttaacatcttttgttgtgatattgaatgatatgtgatagaagtgatttggacaccactatgattctaaatagcatgccatcaggtgcttctgaagtggttttgtttgtttctttgttttcgcagtcctattgtgttttctattcatattgctattcyrtcactggttrttcctttctactcttttcttgtttcatttattttgatcaawgatgtgcatttccaattctgtaaaagtttaattcagtggtatgtgtggtagaatgtaacatcaaatcctttgcaagatggaattaccttgcacatcagattgaagattgtatacatgaaaatctacagagatgccagtgagccaaggatcaaatgacctatttgtagccaaagccrttttcatggcmtsgtggtcctctctgtcacatggctccttacaattctgtgtggttttgttccaatgtaagtagttctygbtaaggatgcttgcaatgaactttggtattcttttctctttcatttttataaaaaccaagcatattttactttgaaaaaatctrtttaaggaattaggaatttaagtcaattctttcaacwcaatgttttcagaacacatcatcaacatcaartattacacatttattttaaaagttccattttaaaagggaatggatgatatgttgtttggactttagccagcactgttgtaaaacacagaacctgtaaactaccctgggctgctkcccattcacatcccccaaaaggagactccahcctgagtcttgtgattattattcctttatttagatgtgtggtcttatttctgagttctctgttctgttccattggtctatgtgcctgtttttgtaccagtaccttgctgttttcataatatctataaagaaattatagagtttctttaaggatttgtgtaataagtatagatatatccccaatccaaatattagttagttttgatggtttttaagcttccagtacmgcaaattcctactgcatttattttcccatgatgcacattacatataggagttatctgtggtgtgggaggctgtcattcattcgtttttactgctgaaggtttacattttatggttataccataattgcactagttttctattgatatatatgtagctgattccagttcttgccataaacattagtgtgcmtgtctcctgggcacataggcaagaaagcccgcagagtgtatgattaggagtgggatgattggatgatatgttrtatggcctttaaccatactagataataataatatgatttccaaagtgattgtgccaacttaaacttatttatttatttatttatttatttatttatttatttttgagacgaagtcttgctctgttgcccaggctgaactgcagtggtgctatcttggctgattgcaacttccacctcccagttcaagcaattctcctgcctcagcctcccgagtagttgggattacaggcatgcaccaccacgcccagctaatttttgtatttttagtagagtcggggtattggaggccgaaagaatgagggtcgtgatcaactcagtataccactggaggctatatgagcaaacagcaaactgttctcatgaaagcaggatgttggcaaactgacaaactgagtttgctgccagaaggaatcactagaagcaagaagcccccgaccccttcttttagaacagatctttttgtctttgtctttatttctgtgttcatcccccttcattatatcccatagtaaccgattgcgacaayggggttttaccatgttagccagactggtcttgaactcctgacctcaggtggtccacccacctcagcctmccaaagtgctgggattacaggcgtgaaccaccacgcctggcytaaacttttgaaataagtgyrtaatacttgatgttgatgatgtgttctgaaaacaytgagttgaaggaattgagttgaaagccrctgtcttggctgcagaattatagcaggcatttttatttagattctgtcaataactttctgttgtttacttgtttctcatataccgtggcattgtacttttgrcatacagattcagaaaatgcttacttatagcacaatcacatagggttattttatatgttaggaaattttcataataaaaaggaaaaaatggaggaagggagggaaagaaggaggaagagaagaaggagtgaaagaagaaaagaaggaaggggaaggggaagaaaagggaaggaaagcagagtaaaaaggagggaaggcgagaggttgaatggaaatagagaagaaagagagggagggagggacagaaggaaggagaaagggaaggaacaaaaaagaaaagaaactaaaataaagaaaagaatacacgttgagaaactagaaaccctacgtatggccartrttatgaaaatggaaggaaataaagcagatgtacgtaacctgtatagaataatggaaatgtaagagggcttcattagttatccattgccgcataacaaactacccccaaatttagtgattaaatcaacaaacattgacgaactcaaaaacataatacaaataccagcaaaatggagccaacgcaagtagaagaagttgaataaacaaaaggattttacaaattggaataagaggacactggtgtgyagatgaaaatgattttgtagtccaaatcctccaaaaagcaagtgccatcatgggrttaaagttacarcattttattaggggacatacctgtcagacgatattgtgagggagtcaggttaccctgggaaaggcaacaggccgagatgcaagtgtgacccccagtgatggacagaaggagagaaggtttactggatgtttcctagaccacaggcaatctaaggagagttgagcaaggccatggagragacccggagccaccattggccrtcagaggagtcccctgtctcccaggaatgtcctgccttagtgtcactggtgtgagccatcactgactgggaacagcccatgggaagcagggcctccataccaatgctactgaggatgtcagagcacaggagcagggccttgggagattacccaggagtgtgactcaaacctgctgcccagatgggtctgggttcttggaaatcaaatcctctcargctaaattkctggatgattctgctcacacttacaatggggcaaggggacccagaaggttcccaggtggatgtctggtttccacacacacttctgccctcattgtgtgaaagyagccatgcctcctcctggggatgagggcctattacctgggcctggagagaaggacactcctcttctcacgatgtggtctctgggaacatgctctccaaacttctctggtgactaaartaatgtgtagttcaatgggctctcttttgtctacttttaagggtaccctcctttggaaaccaggacctcctaacccgcacagcccattgttgggasataaaaaaggcaaaataccttagtggrtgaatctaagagattggacatggagccatacctgcttccaccttttgatttctggaccyacatgttcttccattgagaacacagcaccatagagacatctctgattcaaacaatrtaccatgttctgaaagatggcactytcagagtgcttcctccaggctggcactgagttgtgcctatagaagacctgtccagcattccttgtggctggtagctcctgggtggtgcagatggtgataggattagtggaacccacagccatggaaacwttaaaactttccaggccaaatgggtccttcaggcagagaatgggctaggagcaccgcctagcctgcagatcaggaatgtcaacagcacccggagagtggtgctggctgagtgtcagagcaagacaggaaaacccacccatggaatatgrgcctatttctgtgaagatgaacctctggcccttccaggatggaagtagctaaatgtagtcacttgttacttagtggctggtcgcckaaagaaatagygccccactagggcacatcatgggctccaaatgctgacgagttgacattcaggagtggcagtagctggatctaccttggtagggctgggagagtcastgctgctggccycatacatagcctcatgcctgccactgtggttgctccattcatgcacccatcctaccaggcctgggctgacccatggtgaaggctggctaactgccatttgtctgtttggtwgttcagtgccacwtcacacttgggtgttttctgtgggtgtmarcrwgggattcaagctcaayccaggtggaccattttcacctgttgatgaatgctgttgggcctgtgcaatttatgactttgtgggtcacacagccacttggaaccacattgttgtttggtgtcycwtggtcaagcattctatcaaatcagkacaagtaacactaaatgttgcttctaacagggggcatatgtctctgctgtggatgayatgatcttactccagaatcccaggccctycattgtgactctcccactggtgcttggttcagctccatcctgcatctttccccaccactggcaccaccagccccaaggggtctgagggatgctggctgcttgtaccatggcctggatctgctrcarggtcctttcctgtgtgggccccacatgaaggtggcctcctcctatgtcacctagagtgtgggccaaagcaacacacctaaatgtggaatgtggtgtcatcagaactcaaagaggctcatcaggcagtgtgcttccttccttctggtgaggatgcaagatgaaacagtttgtcttttaccttggaggggacacacctrcattcccctaaacacttggcacttgttcacccataaaacttcacttcagtggccactcttgaagctctgtaaggtttaccttcaccttctggagtgtgcttgttttgccaaggactccagtgcastttctacctgctgctcatccaccccagtaaacatgaaattgtcaatgaaatgagctgatttaatatcctataggatatccagtatgtctagtgtagtcttaagactatatactatagcgggcagaggagttacaatagccctgaggcaaatgataaataaatgtgttgtggatcccacatgaatgtgaatcattccatatcccctttctaattggagtggaaaggaatgcactcaccaagtctgcagctgcacactgtgggcccaaggatttattaatctgctctaccagtgatatccagacaacataaaagctgcaattataactcctacttggccatacctagagtaatctcattcattctttaggcmtcatcaggctccctcagggacagtttgctggattacgtagagacgatagacagccccaacaccaccccacatccttcagctctctcatggtgatgtgacccccacagtactttcagtgccttccacaagacacatgaggttgcctggttgctgtggtgcccrctttccaccccaccctcccgtacccccatgtcactttcattgtgtcctgaataacagtttcaagtttgtctatggcttctgcgaggagccaggacatccagatagaatgggccacatgaatcaattggtaygtgtttctcctttcaggcagagtctcactcacttcacrcaagcacagagatccccatataggcaactagattatgagaaacaaacgcacccatccaaacccaaagaatggactctgagacccagagaacagcaaaagtgagagtgtyagtgacggttttgcaatattgggtgtctggaatgcaggcacaccagggagagtttcaacaatttattccctagtgckcaactccctcccccagttgctcattagctgagtaccaaggacttacgatcttcccggatgtcacctattggtagtttaagacttcwagtatgttccttagggttttktttttttttgctgcattttgttgcagcccataatgcattgtgattgtctcaggactctttaaacatttgacttatgtccctaatggctgcacttagttgataagaaagggtacaattatctatgttgcaagytagcctaaactacattttttggtgaggtggggaaggggtcgttgagggggccccaaccgataggtgcctggccagtgcatgaaagggaaagcaagaagtaggggggatggtggcttagtacattttccttctttatctctttatgaccatgtggcctgcttaaacctatactaaggcacatagaattgaaaatgarccatcacatgtaggttattttttacacccttaagtcctgcccaagccagggctgrgccaaggccctcgaacatccagctgtrgcctcctcctgctgcaggtgaggagtgggcagcagggagggccgtggtgcctgctttgtccccatcccggtctctgtctctcaggcttaccaggtygcatccaggtgggtgagttgggaattgcgtgctgattgctgagggcctggatgatcrctatctcagagggagcaaatagtaaaggcagatgtgatctagggagggctagaaactggagaggaatccaaggagaggtggtgcctctagtcccttcctytctgcatccccctcccctgtttctccagccatcaggaggacatcaagaaaaagacccacgagrcccagaatgagggcccccatgtgtacagcccctttgaggtccccttgtaacagggagagtcctgagtgcacatggccatcctctgtccactttgcagctccccatatgcctcatctgggagctgtctcaggggtgtcacgtcctctgggtccctcgagaccgtgctttttctgggttcccaccatatggcccctgtctccctgtgtttccttgcagataatatggaccagttgataagcagatgtccctgggctatttggggagtggggaccagccctctgtcagggcagctgtggtccctgttttcatcccatgtccaggtgttactttttccagcccccgagggtcatagtacccagtgggctgttttttgggctttgttctgtgctctgtggcctcaccttgcctttcctgagccaatktttttgttcttagtgtagtcrctgcctggtaagtttavaataagagacagtcagaatcatdtcccccacagtcaggttgtttgaggggagaggaaaagagcaagcagaaagttttgagtttctgcaaagacagaggcagtgcaggggacagtgagagtctgrggtgtccaggaaacccgagtctttctgccatttctccacttccgtgtgtctggccagtgaggtggtggtgactcatccttgaacctaattgcacagttagttggccactcaggcctgggcagatgggacggttcatcccctgccctgcagcaagagggccccgtccaggaggcaaccacagcrcgggcagtgcaggtctgtggttgctcctgctctcacctgcggtgtctcctatagagggattgtcagttctggttccctgtaggcaggaawggttttctcgtaggtcactgggacattggcbagaaaaaggcatgaaaattacatgttagtttctcaaaattcctgctttaagtattggtgtvcatcaacataatttcagctggataatcttaataggatttccbccaahactgatgttgtaaaggatgttgaatagaacaggaagtcaaatttggggcttcgtttctcagagggtccatgtgggagacagtgcctgtggcagtggcaatccccaggtgcagagggtgcgtagaggcagcctcaggatgaggggtctgaagaaaccccctactccacaggcgaagaagatcccctgtgagctgcgatggcagtggcctgggtggaatccctgttaggaatgggacaggaagggcttgcagcctcaccaagcagcagccctggggtggagctgcatttccagggttgagtggacaggcaggagcaagcacagcccaaatgcaggttatggggagggcaggctgggcctccttgagcaagggggtccccagcatcaggtcaggtgcagactccatggcagccacatatttccatgcvgggcctgtgagccccagggcttcctgatrgkatctctwgttaggagctgtctgctcagagctgggaggggaggaacagtgagctgctggtggagggcagaacccacagygtgcagggcctgccctggtatgcaggtgcctctgcaggtgaagagggcctggggtctcaggaagagaaggactgtgtgtgacttggcccagacctggaaggacatggagacagggccagggcctctctttggggaggcctctcactgtgtcagggctggtcaggcttgagaggaggaggaaagggcactgagtttcctcbtgggtcttgttccttagtcctgggtcctttcactcactgcamaatggatggtggacacagggcaggtgctgatgttgatggagtcacgggaggggactggcaggggctggaaaagtgcsatgggagggagaaaaaagtggggacgtcatcttccgtcagagaaagggtaaatctgatttgggagtgactgaggagggagaactcctcaggraataaaaagcagcactctgcacccaggggagcatttattggtttctctcttttttccagagcgcgtgagcctgcaaggcctgggtcaacacctggttgggacaggagaccaccagggcagtgcacagctgagatctcagtctctggtgtcagctcctgggttcgctggctccactgagggcaactagactctgcagycaggcgrtctggattcaactccttgcctaggcctcaccagcatgttctctctttgtgcctcattttcctcatctatgacatggggaaactacgagcatttatttcttgtggttggatgaatgaaaagggttagtatatatggggtatttgcagctgtgccatattatttttgttattttgttattttattatattttgatatattacatatgcagtaattgtattattataggtgagcwttatgagtgagtgtcctgctgatggctccttggtcctggcccagcaccagctttcctggcaccttgaggtcctgtcatctctgtcatgctctcctgcattaccccattctactctgtcttcatattttatactatagatatttaactcttaaatagacatttctggtctgcgttttatttcaagtgtctgggaagggatagtgtgaggttcaggagagaaggagaggtctgtctccatgctttgacacagcataaagaaabcthccctcctcccccacatctccccrccagttctcagtgagggacagattcacagcaacaccgaaagggctgggaagggatggggggacatttgcagccagtgttcaggggctgaccctgtggggcaacatcttccctgcagagttagagcccacatatgatgatgtagagctgaagggtgatatcagggaggggacggagagtgctttgtggtttcctgattacgaagagtagaggtcagtcagcttctggggtgaagtgactgctggggagattggattgaattaatgaagaataagtgagctgggattgaggatgagtaaagcaagcatcagcatctcccgccatcagttcagactgaytggggaggtgggatagttcctgaccttgttgtgtggttcctcctaacttcctggtcttggggacacagatgggtggtgctgttcttggtcagggcagcctcagctccatccagataaagcagtggtggcagagagagttaggggagcacctgtgaaacagaccaaggcagggatgggagccttctgtgcagccagagtggatgcaggacctgcctggatgcaagagaaggatgagggaccctagctgggtcctgttccctgactccbtgtgttcacagggcaaccagtaagggagctggggtagggaattcattcataagctatctatctagagatgtgtttatagacatattatttcatgtttgtattcaggtttgttgtcacagacacatttatccatgtgtgttttatgtttaagttactttggaatagctcagtcacaaaatcttaatctcttaatttgtgctgcctctctacacggamacacacacacagghggacacacacacmggcacacacacacattcacacacatgctatacaaacatgtctacctgtatctataaagaracatgttatgttattttattttttatttcttarattcatatatattcatgaggcacaagtgcaattttgctacattgctatattggttgtggtaaagtcagggccttcagagcatccagcactggagacaagcacattgtaccmatcaagaaacccctctattatacaccaactgccaacccccttacccttctgggtctccatggtccatcatttcacactctccttttatgtatataaagagatattaaccaaatacggcagagtggtarcttgaattttacygcaccrttctttcagcttctttgcacatttgaaaatttatacagttataagttggaagaatgagggaaaatagagagcaagacagtgctgaataggaataggctaggggttgtgtcccactaggaaccataattgatctttgccattttgaaagtgtgtcccctgagcagccttcagagagtcctggaggcagrcttgttttcacagtaataccaagatgccatctgcctgtttcattgtgttgacttttccattagtgctgcaaatgccaaggtcggtarcacacccagcacctmagcagaaccaggcagtggctccaaactgcagtcccrtttaagagtgtctttgatggagcagtaaaaaatttatgtggrttaaagtttgatccttgagtatacgtctttaatattctttgtgagaaaatgggaaatatgcataaracmcttactgcacagagaagcaggatggtagccttgagaaagggcacttgtgtgactcagttatkatttcaaccagcagatctcactcacctacggaaagacagttgtattaattcctgtttgggggtatcatgaataaagctgcaagagtatttgtgcacaggattttcgtgaacataaagtattccctygtttgaaataagtgcctaggagggcaattgctagtcataaggtaaattgcatgttcggtttgaagaaaactrcaatactcatttccagagyggctgtaccattttaaaatacatccctaccagcaatataagagtgtcccagttcctctgcgtccttgccagcatctgttgctacctttattttgtatttcagccattctcatcactgtggttttaatttgtattttcctactggataatgatgttgagcacctattcatctgcttattagcccagtatttatcctcttcagtgaaatgtctgttcrtgtcttgctcattgcctgttttgtatttggatttcatttttattgttgtttaaaatttcttcatatattctgaatacagtctttacakaatatgttgcctgcaaatatcttctctcattctgtagcttgtctttttatgctcttcataggtctctcacagaacaacagtttttagtgttgataagatccaatttattaacttttatggatcatacttttggtgttatgtytaagaactctttgtccagtcttagctctgatgactttttcttaaaaggyttgtaatttaaaaatttaaatttattatttattttagaaaaaaaattcttgcctaggctggccttgaactcctgggctcaagggatcctcccacctcagcttcctgagtagctgagagtacaggcctgtgataccacacctggctcaatgtttgccattttaactctgtgctttacatgaaagcttgtgactcaytttgagttatttttgtatgaagcatgargttttggctcaggttattttttttccactgtggttgtccagttgttccatcaccatttgatggraaagctctccttccttcattgaattgcttttgtgcttttgtaaaagtcagttgagcatgttttgctcatttttagttgagttgctcatcttcttacattgagtttaagaacttttcacatattctggatacatgttcttcatcacagatgtaatttgtgataaattgtgaaatattttctctcaatctacggcttgtcttctcattttctcaatattgtcttttggagyacttaagttttaaattttaactaagcccaatttgtctctcacttttttttcatctgtagatcatgttttttgtattttatgtaagaatcttttgcctaactactcaatgtcacaaaaattttctcctatattttcttttagaaattttatggttttaacttayaaattttagctgtttaggtctctaatttgtttgagcttatattttatatggcgataagtgtcacatcatattacctatgcaacttcattgaagatcaattgacaaaaaaatgtaagaatgtctttctagattctcacttctgttcattaatctctgtgtctctcgctttcacactgtctggattattgtagttttatatgacattccattttttttcaaatttgcgttggcttttctgcatcctctgcattttcacatacatttttaggattaaattgtcaattttccataaaatgcctgctggggttttgatagagattgtacwgaacctatagatctcttggtggagaattgycatcttaacaatattattgagctttccaaccgcatctmtccatgaatttagacctttaatttctctcagtaatgttttgtagttttcaacaaactctgctgtcttcctaaatttattcctatttctctctttttgtaactactgtgataggaaagtttagattttaattgcttgtatagagaaatatgttaataatttttaatttgaktttatatcctatgggagcttctggattcattttttagtgctagcaggcttttatctgcttgtgaattctacagacaaggtcatgttatctgtgaatagagttttatgttttcctttttatctggatgcctttaacttttaattatttgccttattgcaccagctgcaatctccagtacaatgttaartagaagtgttggatkggacatccttgcattgatctccatcttaggagaaaagcattcagtmtttcttcagcaagcatgattttagttgtgggttttttatagatgccctttatcagggtgaggaaggtcccctccattcctattttgttgaaacttatgaacatgagtggtgttaacatttttgtcaactgtttcttctgtatcttttgagataattatgtcttttattcccttactacagtgcattccattaattgatttctaattgttaatccagccatatattcctgggatgaatcccaytggtcatggaatgtaatccttttttacgtggctttctattgtctgccaatgtttgttaaggatgttttcatttatgtttattggtgacactggtctatggtattcttttcttgtcagtcttgctctgactttgatattagggtaatgtcagttctgtaaatgagctagaaagtcttgcctcctctcttcttgtctgaaagagcttttgaaatatttgatagaattcaccagtgaagatatctgggctttggcatttctttgtgagaaggttttaaaattactgtcttagtgtacagttctcttcagattttctatytatttttgagtcagtttcagcaatttctatctttgtataaatctgtccattttatctaagtggtctaactgattggcttcaggtttttcagagtattaacttataatgwtttttaacttctaaagggtcattagtgatactctctcttgtgttcacaattttggtaatttatctcatttctcatactgtctgttttgacttttggtcaagaaaacagacagaggcagctctgtgacagattctgtagtgggaagctttgatcattcatagctggcaagccagactaatgccagcaaccccaaaggagctgccaatggatcttgacagggaagtcactgactctggattgggctatgwtcaaccaggggtagatgtcaatgcttcaaaggctatacaagaaccagaaaaatggagattacaccaatttggactgttgagtcacatttctttacacaagaaaacacactttacagccttaaaaagccaacartgcacagggaaatgtactattcaggggaaactttgatagaatattgaaatggctgaccaggcgcggtggctcatgcctgtaatcccagcacttttggtggccgaggcgggcggatcacctgagtttaggagtttgagactatcctggccaatatggtgaaacccygtctctactgaaaatacaaaaattagctgcgtgtggtggtgggcgcctgtattaccagctactygggaggytgagacagtagaattgcttgaacctgggaggcagaggttgcatgagccgagatcatactactgcactccagcctgggcgacagagtgagactccatctcaaaaaaaaaaaaaaaaagaaatagtcagttgaaacattggttgtctaattgtctaaaaactgccaatataattgttgggcaatataaacatgaaggactggcttttatatcttcatgaatgtgcttactgtcaacatgggtggagctgcgaaactgactccactaggtagcttcctctctttttcctgatggatcagggtgatgctgttatgactgtacatacaattcttcttaaggggaggatgctggaataatgactacacttcatttcttatttctttttttacacagggtgcagtggtaccaggaacagggatgcaaatcgaactgccagaaacaggaattatccctaaggaaaaaaccataactatatttttatacctttatgtaagaattcccaagcaaatcaaggattgcgctgtgccttcatttcatctggcaaagtcgggattaactgtaagtagagctacgtagactggtggtcagatagcctgcactagttcctaacctatgtaacctacygtctatgatcaagagtagattaagagaagacatggtagaatactrttgctgcatgcagtctaggccagcacagcagccaaacctaatgtcacttctagaactggaaaagactgatataaagggacagaaggaggaatagtggctgagggtaggtgaataaatcaaagggttatgtaatgaggaaaattcaatattagcttatctcctcaaaagtggtgtgagcaagagatgttgtctcttaggtcaactatactggatgcctaaaagggtgaagctgtrtgtccctgagaccattcttgtttttggaacctgwtaagattgartggtgtctgcaaagctgagtgatgtcattctgggagacatattcatacaagaggatgataaactggcctaattttgaatgaccgaatgagacttggataatatgccaatgcttctttactgttataatccttttcgtatgaaaaatatgtggtcaaagaaaaggggrtaatatgagttatcacaaaaacatttagtyttgtccctsgtttctcctawaaaccttagaatctcttgagtgattagagtgtctttagaatactgaggaaaggactcttggctgagwggatcctggataccttgagaatgggggctgrctgccacagacacatasctatgatgagagggttgtcttattccrttttgtgttgctataaagaaatgtctgagactgactaatttatataaacaaggttcatttggctcaggattctgatgtctggaaatgtttgagcatttagcgagggcctcaggctgcttccactcatggcagaaggcaaaggggagctggtatgtgcaraagtcacgtggtmagagaggaacagagggagtaggaaggtgcgagactcttttaacaactagctcttttggaaactaatagggcaacaattcattgactcccgagagagggcagtatctctctgttcataaaagattggcccccaagacccaaacgccacccattaggccctaagtccaacattggggatcagattttaacatgaggtatctggggataaatatttatatcattgcatcctgtccctagccagccaaagctcacattcttctcacattgcaaaagacaataatcttctcccaattgtccaaaatgtgttgggttgatccagcatcaactctaaattccaaagtctcatctgagactcaaggtaagttcttatagctgtgcacctgtaaaattaaaaaaagttatttacttctaaaatattaatacaacagtggtagagacatttcctatacatttccattccaaaagaaataaatggrccaaaagaaatgaatgcagtgtcctcacaaggttgaaactcatcatggcagacattaaaacttaaagctctaaaataatctcctttgactctatatcttgaaccctgagcacactggctgstgcaagcaatggactcacaatgccatcttcagcctcatatccgtggctttggtgaacataatccatatagctgctctcatgggtgaacattgaatgcttatggcttttccaggctgagcttgcatattgccagtggctctatgatttagtagtcttggcaggggtcctgttcctgcagctccactaggaattgtcctggatattaaatttcccctttaaatatcagttccagtttcaggtcatgtctttgctcacacatatgtgcataggctattacaagcaggcaggccaaatctggaatgctwtgctgcttagaaatttcttccaccagatacccttatacatcactctcaagttcaaagttctacagatccctagggagggggaacaatgcctccaagttmtttgccaatgcataacaaaagtgacctttcctctaggtcccaataarttcctcatctccatgtgagaccttatcagcctggactchattgtccatatcactatcagcattttggtcacaacagcttaacaaatctctaggaagttgcaaattttcccccattttcttgtcttctgaactctccaaactcttccaacctctgcctgttacccagttccaaagchgtttccacattttcaasaatttttatagtaatacccaactcchggtaccgattttctgaattagttcattctcacacttttataaagaaatacctgagactgggtaatttataaasaaaataggtttctttctttctcctcccaccatccaagatgccaaaaggaaagaaggccaaggagaagaaggtggctccagcccctgctgtcgtgaagaagcaggaggccaagaaagtggtaaatcccttgtttgagaaaaggcctaagaathttggcactggacaggatatccagcccaaaagasacctcacccactttgtgaaatggccctgctatatcaggttgcagcagcagagaaccatcctctataagtggctgaaagtgcctcctgagattaaccagttcacccaggcaccagacagccaaacagctactctgctgcttaagctggcccacaatacagaccagagacaaaccaagagaagaagcagaggctgttggccbgggccaagaagaaagctgctggcaaaggggacattccccactaagagtccacctgtccttcgagcaggagttaacaccatcrccaccttggtggagaacaagaaagctcagctggtggtgatwgcacatgatgtagatcccatcaagctggttgtcttcttgcctgtcctgtgtcataaaatggggtcccttactgcattatcaaagggaaggcaagactgggacatctagtccataggaagacctgcaccactgtcaccttcacacaggttaactcggaagacaaaggtgctttggctaagctggtggragttctcaggaccaattacaatgacagatabgatgagatccgccrtcactggggagacagtgtcctgggtctcaagtatgtggtttgcattgccaagctcaaaaaggcaaagggtaaagaacatgccactraattgggtgaaatgtatgctgttgagttttctgtatgtaaaaataattaaaataatataaattttccttcaaaaaacaaaaacaaaacaaaaacagaaaagaggtttaaattgggtcatggttctgcaggctatacagaaagtatgattctggcatctgctcatcttatgagagggcctcagggaactttcgattatgctggaaggctaaggggaagcagayattacttacatgcctggagcaggagggagagagagcagggaggtgacacagatttttaaacaccagatcttatgagaattatcacaagaatagcaccaaagagatggttctaaaccgttcatgaaggatccatcctcatgagccgatcacctgccaccagacaccacctccaaaattagggattacaattgaacatgagatttgkgtggggacacagatccaaacaatatcaggggtcatggtggacatgaggatgggctggtctcccatttcttacctgttactgtagacatagacacattcagabgctttggcagaaagagaagccagaggchcttaatgtcacaaagaggaggcatgaacaaatcttgcatctcagtccctcacaaggcaatcttagaaaaaacatagtcataaactaatccaggtcagtcayagtaagttgtgacactgaacagcccaccacaccttgaaaaattccaaatcaaagaatctccagagcytagttgtgtcccctctgcccaactcctctttcacttcaggccctctaaggtgtcacttttacaagccdtgagagacacatcagagccctgggtactsttcctgtttggggtggaacaaaaacaaaatctggtcagagcccacaggtgatgtgactaaaggaggaattttggggtggctgagctcccccatgggctcctgtctacactatcccaaggatctcagggatcactcttcccaccmctaccacacttacatgaagcctgagcataactgcctccttttccatctgtggaaagaaaacaaactgtgagaggccagggaggaggcagggcatgagatcctaragragtttccagaactgtgactacagacccaggtcaggatcagaaaacccragggaagaggatgtgttgaggctggaccarttgtcctcctgaggtctgtcctcagcagggaccttcccctgacctgtgaytgctgggagtcaggttcccatgaccacaatcaaggtgataaatttgtccttcattttcacargtgctttacaaaagagtaagbgttgatagacagggcctctgaacagggtaaatgtgtgtggagatggtgcctcacaactaggcaagatatgagccwactcctacctggggcttgaaatccaccaatggaagaaggaaactcagagctcacccctttcctrcctgggatcttattcctccacatcacagcagcgacyacagctacagtgawtacagcaacdagaagaaccaggccagcaatgatgcccacaacggggatgatgggctgggaagacagctctaagaaaggaggtgaacgtgaggggccctgacccccaggcctcagcccygaccctgcttaaaggctccagaaggacttctgctttgcctgagaagagacatgaccbctcattcgtctccttaccccatcttagtgtgaggggctcaggcaacccctcrtgctgcacatggcatgtgtacctctgcttctctccagaagacaccactgcagctgcccacttctggaaggttctgtaccctgcaagtctggtctccacaaactctgcatcctgaatttggtcctccccatccsgctyctgggtcagtgtgayctccagagggtagaagcccagggcccagcacctcagcgtggcctcatagttggagatggggtggwgggttacctgtgccttcaggggatctgagggcaagaggtagaaaattcaggcactttgcattcctcatgagacacagcacccatgtgaccatcctgagaatggahgggacahctggggtggggaagggagcacagaacccagacarcattctggacacaggcacctgggataatctcttattccttggaaagttctagtgtctgaggcggaaacagagatttctggtcctgacctgagtggaggccgagggactcagaagasctggaatcagacccccacacrcattgagtatgaggcagagaacaaggcctgagaggaaaattcctggtgcccaaggctgctggggggtcaaagggkaccgcgtatcagtattccagggattgtcttcccctcctttcccgcagagacttcatccgttaattgtcccagagtgcagggcgggccctcagtcactctctggtataggatttagaaacccaggaggactcttctgcctcaggacaagagggagagggatattttagcgttggtcccattttcctccccttcttttggaagrtggctcagggatatctgcaggagatcagggargcgmcccgtggcctctggtacctgcgcattgcagvctctccttctcattcttaaggcctttgctgagccactccgcccaccttccsggcaggtaggttttgagcagctctgcatgttcctcctccaraacatctgagccgccttdtccgctgcggtccaagagagcagttcctggtttaggacgaggtaactggcgccatcgtagggtatgttcatccccgcgcgaagaggctccggtccgggtccaggtcgcagctgtgtatccactggaggtgggagaccctgtccccaagcccgcggtcagcctcagccactgagctcctcctctgccccgatcaatcccccggggatttgggcctgaactgaaaatggaatcgggtataggcacctggggttcttgtgtcgagggtctccacgagtcycgcagcctcggsgtgggtctccgattgtgctacagtgggtagcacaatcttggtagcccctgaatggtcacgaatctaatttgtaaaagagatgatttttggccccaytatatataaatatgtctaaacgcattgcaattagactcacaaagtgaagttttactttccyagactgtgtatctgtgactctggtctgttgtatttttacagtatctttatttcatagctctgagtttgtgtgtgcgagtccaggacatctcaatacaaagcacaatgtattaccgtatattgcaaccaggagcctgtacagaatttaattacctcagaattgcaagtgcttaatgcagccaaagtgcccttcgccagtgctcatgcactccctttattattaatttttttattttttatttatttacagacaggkcgtcactctgttaccctggctaaagtgcagtggcacgctcatgactcactgaagcctckacctccttggctcatgtgatcaatgctcctccctcagcctcccaagtagctggcaccacaggcttgtgccaccactcctggctaatttttctaaaaataatatttgtagagatgaggtctccctaaattgctctggctggtcttgaactcctgggctcaagcaatcctcccgcctcagcctcccaaaatgctggtattacaggcatgagctataatggccggcccatgcacttgcctattattatgaattattcacatctaagctatgtgtatattttattgagacatttggtattcttttttaacctttttttttttttttgagacggagtctcgctctgtcgcccaggctggagtgcagtggtgcaatctcgctcactgcaagcaccgcctcccgggttcacgccgttctcctgcctcagcctcccaagtagctgggactacaggcgaccgccaccacgcccggctaatttttttgtaattttttattagagacggggtttcaccatgttagctaggatggtctcgatctcctgaccttgtgatccacgcgcctcggcctcccaaagtgctgggattacaggcgtgagccaccgygcccggccttttttaacctttttatcttagagaggcaattagsttttagacagccccacagaatgcattaaagaccaaggtgcaagtaacactgtgccaggctttgcggataaatgcattaaaaatctataaaacactgtatttaagtctgagaattccattgctttagaattctttctctctgttcctttacctcacctcctgcttctccagcccttctctctgtycctgtcatccttcaggccctcctctccccttagtctctactactctgtcactactgaattgtgkccctagctctgtccctygcctgctgcccatgactgttctccccacaaaggtcagcaatcctgctaatgtgagtcagattgtktcatttcttcacttaaaagcctctaatggctccatcttactctcaagaagcctctagaatggaaggcacaagcacaggggctttgggttgytttgatcaaagttgtatctacagaatataaaagtatatctgccacatagtaggcactaagttaatttttgttgaatgaatgaatgaaatataattgtgttcaaaattgtatcacacaaaaatcatgaaatggaaaatgcaaagcaagttaggaaatatttggttttatgcaactactatgcatatcagttcatgaattcattccggtggagaaaatgtcatatacttatcctttgaatctgtttatttatttcctggcagtacataaccaattaccacaaacttagtggctgaaaacagcacccatttatttgtctacatttccttcatcagaaatccaggcctaaygtgatagactctttgttcagagtttcgcaaagytgtatcctcatcttaagattggggttctcccccaagcttgtgyagagtttgttggcagaattcggtttctggcaattgtaggattaaggtccctgtttccttcgggctatcagagtagacagtggggagggcttctaattcctattggccaccagtgttctttccccatgatccctccattttcaaagcccaaagtggaggaagcccctcacgctgaatccctctcacactgtgagtctctattctcaggaaraacccagtccttttcagagcttacctgattaggaccgtctaagcaggataatcctcatcttaaagtcaactgactggggactttaaatatatctgcaaaacctcttcacagcagcacctgctttagtgtcaactgagtaactggggtaacctgagwaaccaagggtggttattggggtgtcatcatagaatcagcctagcatagcctggatcttcctttcatgtttaaatagaacatacaagttgaagatcaaaaaatagatcattgttaatgataataaaatatatcttatatagccatggaaatttttattaaatattaaaagcaaatgacatgtttaatatcttataatgaatttagagcaaatgaaaaagttcagtgattcatcctctcttgtgaagctgtattagttatctactgctgcataacaagtcacctacaacttagcagctcaaatcaacaaatatttatcatctcccacagttatccatggtcaggaatccaggagaagtttctctgaatgcttctggctcagggcctctcacaaygttgcagtctagttgtcttccagggctgaatcayctgagggctcaaatggggccagggattcacaagacacaagaatctctcacatggcttttggaagaggctttagcttcttattgtctggtcccaggaggactcacttcctagtcacatggaccacaggcctccttatgacacaacagccagcttcccccagggctcatgattccagagaaagaaagaaccaaagtagaaacttcrgtgagtcttatgttctacacccagaatcacaaactattawgtcagcattactctatcagttagaagtgagtcattaagtccaggcyacacgaacagggagggaatgaagctgcacttctggaaaggaggagtatcaaagaatttataaacatgttaaaagcaaaattaacattattgtttcagggttttgtaaatcaaatacttcttgtatctgactttttttaatactttaaaattctcttctgtaaagttgattaaatatttgagacagagaaagaagatacaacaatatctcagattttttttgtaaatgcctttaatattaatattctctttgataagttgcaacagagttgagaaaatacagtagctaaattaaagtgtcccaagactttggtgccatacaataatgcctttacaatcrtaactaygtttgtttctcttcagaagtttctaattcggtttaagaatgcccaaaatgccaattttcttactcaagcatctacaaaaatatttgcctaatcagggtgctttgcagytagaaaaatgtgaatctcacacctctgtctatacactagcttagcatcatgacaataatttgtttggctagggtargcagaaattgtttactccaatctaggaacaagatttttcaataactggctattcagtgggcatcctatgaaagtttaacatctttcactgtgttttttaattagatgtggtagaagtgatttggactccagtatgattctgaaaaacactgttcttttgtgctgctatcattgctgtacaagcatctctttcatgttttccattcttattgctatttcatcactagttattcctttatgtcttttcatttaatttattttgctcaacaatgctttttttttttactgtgtaaaagtttaatccacttgtatgtgtggtaaaatgtgagcaacatatcamattctcaaattctttgcaagatacaattgccttgcacatcagattgaacactgtatgccagacaatgtagagagttgccaattagcccagggtcaaatgacctctttctagccaaggctatttttcatgagatyctggtcctctctgtcacatgactctttacaattggctgtggctttgttttaacgtgtgtagttattgctaaggatccttgagatgaactttggtattttcttttctctttcatttccaaataatcagtcaggaatggcrcacaaggtgcattttgaaaaatgacactttaaagatttgtgggccrggaatggtggctcatgtctgtaatcccagcactttggaaggccgaagttggyggatcacctgaggtcaggagtttgagaccaacctggacaatatggtgaaacccygtctctactaaaaatacaaaaattacctgggtgtcgtggtggatgcctataattccagctactcaggaggctgaggtaggagaattgcttgaacctgggaggcggaggttgcagtgaactgagatcacgccactgcactccagcctgggcaacaagagggagactccatctcgaaaataaataaataaataaataaataaagatttatgatcaagtaacttaactacctggacatcccctcctggcataaaaaacaaaacctatgaagccaccctcggctgttgtccaattctattccccaaaaggaacttctatcttgagtcttgtatttactattccttttcattgtctctaaagatttttacaataagtatatatatatccaaatcacagtttgacctgcttttttaaacttccccgtacagagaactcacacaatgtgcattcttctgtgatgctgatgcatgttatgtgtaggagagttatctctgatgtgggagggtgctgttcattcactgttgctgctgaagttttactttttattattatacgacaattttgttaattcccattgatgtatatgtgattgtttcyagtttttgccataaacattggtgtacatgtctcctggacacatagccaagaatgtccccagggggtatgatcaggaggcagatggtgggattatatgatgtatggacattaatcatactagataaggctaatttgatttctcaagtgcttgtaccaagaatgggaaagagcttgtgttgctcatgtgttctgaaaacattcagttggaggcagaaattaaatgttaaaaggtactgtcttggctatagaatcaccctaggcattttttcatattccattaacaacttccttttctttacttttatattataaattacggcattatacttttagcataaagttcaaataatgcttccttttggcctaaacacttggagtttatgaaaaaaatggagggagggagaaagctctgagggaggaaaggaggaaagaaggaaggaaggacagagaaagacaaaatttaaaatgttcaaaaataggaggaaagagttggaaacagcaagtatagctaatgttattaaaatgcaagggattaaaagatatgtagataatatccatggaataatggaaacttaagaaagccttaatagttatcwagtgctgtgtcacaaactacctcaaaatttagtagcttaatagaacaaatatctgttaactcaaagagatactacacacacaagtaaaatagattctgtgggggtggcagaagttggataaagagaaggattttacaggttggaataagagttattgatatgcagatggaaataatttttagtccaagtccttcaaggagcagatgccaagatgagcttaaagtctgcgacatcttatraggggacacacccgtaagggaatatgggaagtgagccagaaatccctggaaaaggcggcagaccacgatgcaagtgtgaccccaagtgctggacagaaggagagaaagtttgtthgacgcatcctagagcacaggcaatctaaggagagttgagcaaggccgtggaggaghcttccagctacagttrgccatcagaggagtcccgtgtctcccaggaatggcttgccttaahgcctgctgtgaccagtcactggctgggaacagcccatgggaagcagggctttgcaccaatcctgctgaggatgtcagagcacaggagcacagccttgggacattacctrtgagtatcrctcaatccttccttcctgagggttctgggctcttgaatatgaaaccctctcaggctgggttgctggatgattctgctcacacttacaacaggacaaggggaaccataaggtctccaagtggatctcttatttccacacacacatctcctgccctccttgtgtgatagcagccctgcctcctcctcttctcacctkcttgtrtctggacacatactattcaaacatccctgggggcagccataargtrtarttccatggactctcatttaaatgtctccttgccagggtgccccctttgggaaaccaggacctcctcccctacagagcccagatattggagatgagaagtgcaaaatcaccctgaaggtgaatataagggtttagatatggagccacacctgcttctacttcttggtttttggacccacgtattcttccttctgtaaacacagcactatagagacatctttgattcaatacatgcaccacatcctgaaagatggcasccattcctcagagggtttcatccaagctggcactaagttgtgtctgtagagacctgtccatgactctgtgtggctggcagcccctgggaggtgcaggtggtgataagaccaggggrtkccatggtcatggmccacgcttcatccccttmcctctgaggtgtgtcccgcgggcagataatgtactgaaattctgagccagtggctcaggaatgccaatagtgatactggctgagggtctaagagtagagaggaaaaccacaccacatctaataggtgcctatccctgtgaggatgaacctccgccccccgggccgcctcccacttgagctgggtgatctgagccgccgtgtctgcggctgtcaaggagcacaggtcctcgttcaggacgatgdaatccttgccatcgtaagcaagctggtgatacccgcggagtaggcgcccgtccgaccccacgtcgcagacagacatcctctagatgggtgtgagaccctggccccgcccccgcggccagccccgcccaccgagccccgccchcgccaggaccaacctgcggggattttggctgaaaatgaaaccgggtaacggctcctgggcctctcccgggtvaagggtctccaggtbccgctgcctcggcgtggatctcggacccagagactcggggagacccgggcggtycgtgggggatgtrgasgggtagtgabctgcgcccccggccggtgtcactcacaggcctcactctggttgtagtrgccgctcagggtccgcaggttcactcggtaaaactgtgctttggccttggcggtccctgtctcctcttcccaatattccggcccctcckgctccatcctgggactcgtggcgtcgctgtcgagscgcacgcactgcgtgtcgtccacgtcgcccacggagaggaagcggggatccgcgcggccgggccgggacatggtggtgtggaaatacctcaaggagtggaagcctgggagcaaggagggggctgagacbctcccgaccctcctcccggcaccgcaaccgggttcctgmgcccccgccgggcaggmccctagctactccccacagasgccgtttccctcccgaccccgcactcacctgcccaggtctgggtcaggaccagggcccccgagagcagcagaagcagggttcggggcgccatgacaccatcctcggcgactgggragaatcggagtcccggtgggtgcgtgggaactttagaaccgggaccgcggctacattgattggcttctctagraacccgacactcaatgggagtgagaactggggcagcckggtgagtakccaggaagaaggacccgacacaggttgggagagggagaagagaaaccctgcrragatggggaatscccagcgctgggcctccccaatccatacaccgcctttggggcctgagatcctgagagccakgcctgaggccctgggacttcgccctgaccccgctacttctgtgccaagcgctctgtctcaamgtttccgagtcttggcccaggagctgtctgagaaaccagggagaaaccctcgraatgggccccgtbcctctctcttcactttgcatcacggaatccccgtcccagaactggactccctgcctcctactccttacctgtccccgtggactcttctagaagaaaaatcacbccagggagcttgttgccagagagtgagcttgccctgggaatggaggtgtagagacagggttttttgttgttrttgtttgtttgttttttaaatctggaaaagttgtgcctgagtgcatgagatagaatagagaccagtttgctttttgtttattaactacagtgggtagcagaatcttggtaactcctratgatcaggaatctaatbggccaaaaatgtgactttggtcccttgacatataaatgtgtctaaaagcattacaacaggaatcacaaagctcctaagtttcactttyccagacaatgtatctgtgactcccgcttgtagtattttaaatttaccttcattccatagccctgagtttctgtgtgagtccaggacatctcctaatacaaggtagccactgtgttactatatgttgtaaccaggagccagtacrgactttattcahctcacagtggcaagcactcaatgcagtcacaatgcccctcaccagtgctcatgcactgcctgtttttaggaagtatccacttctaagtgttgtgtatattttatatgaacacttagtattttttaaacctgattaacataaaaaaattagtttttaggcagacccacataaggtattaaaggccaactgcaaagatcaccctgcaaggctctgtagattgatgtattaaaatatataaaacaatgtgtttaaacctgagttctgctgctttcgaattctttccctctgctccatttcctcacctcctgcatctccagcccttccctccattcctctcatccctcaggccctcctctccccttagtccccaccaccttgtcactccttatttgtgacactagcactgtcccattacctgctacgtgactgttctctgcacagtggtcctgctcctgtgagtcagagtgtgtcatttctccacctaaaacattccactggctccaccttggtcttgtgaagcttctggaatgtcaggcacgtaagcatatgagggcacacctggttcattgtagggattaaattaatttttcttgactgaatgaatgaaatatgagtctattaaattgcatcacagaaaattataaaatgtaaaatactgaaaaagttaagaaatattttattttatgtaattagtgtgcatatcaattcatcaattcattcgtgcactaccacgactggcaaaacaacacccatttatctgcttatacttccttggtcagaaatctgggcaagatgtggatagaatccctgttctgggcttccaaaagctgtgttttcattttgaatcctccttcaggcttatacagaggtggcagaatgcagtttctggcagttgtaagactgaggtttctgttccttgctggctgtcaatacagagaataggcagggctgtgctcaattcctggtgcctaacagtgttctttcctacacagcctcttcattttcaaagcccacggtagaggaaacccctcatgctgaatccctctcacactgcaaatctctatgctcagaaagaacacagacctttcaaggactcaccttattaggacagtcaaagcaggataaacccagcctaaagtcaactaattgaggcccttagttatatctgctaaatcccttcacagcagcatctacactagagttgcttgaataactgggggaaagtgaatgaccgggaggtggctgttgggggccatcaaagaatcagcccagcaagggttggatcttccttttgtgtttaatttggacacagttggaaattgaagttcaagtaaagtgatcattgtgaatggtaataaaatgcatcctcttcagccatggacattctccttaccttttaaaactaagttacatgtgtaatgtcttataattaatttaggccaggtgtggtggctcacacctgtgattctagcaccgtggaaggcagaggaaggcagatttgttgactccagatgttgaagatcagcctgggcaacatggagaaacccccatctctacaaaaaaatttagaaaattagccaggcgtggtgcttcatgcctgtagtcccagttactcaggacgctgagataagagggtcccttgagcccaggaagtcgacactgcagtgcatggtgatcatgccactgcactccagcctgggcgacagagcgagaccctgtctcaataacaataatattaataataatgataaatttagagcaaatgcaaattaatgtgtaatactacatcctcttttgtgaaaatgtgttagttatttactattgcataacaaattatgtaaaacttagcagctcaaaatggcaaatattcatcatctcccgcaggttccaatggtcaggaatccaggagaggtttccctgagtgcttcttgctcagggcctctcacaaggttgcagtccagttgtcagcctaggcctgcatcatctgagtgcttcactgggactgaggattcacatgaaacatggatgggtcacatggctgttggaaaagccctagttccttgttttctgttcccagaaggccccagttctcagccacatggaccttccttcagggctgcttatggcacagcaggtggcttcccccagagctcatgattccagagacattgagagagaagggggaggctgcagtgagttttatgttctacacccagagtcacaaactcttatgtcagcattaccagttagaagttgtattagtccgttctcacattgctataaagaaatacctgagactgggtaatttataaaggaaagaggtttaattgactcatagttctgcattgctgagaaggctgccccatgaaacttacaatcatggcagaagtggaggcaaacacgtccttcttcacatggtggcaggagagagaattgcagatcgaagtggggaaaaatacctcataaaaccatcagatctcatgagaattccctcagcatcataagagcagcatgggggtaccatacccgtgatccaatcacctcccaggaggtccctcccccgatacatagggattacaatttgcatgacaattcaagatgagaatttggtgggaactcagagccagaccatatcagaaatgcatcattaagtccaagccacactcaagagaggaaattaagcagcatctctggaagggaacagtattaaaggatttgaatatatattaaaagcaaatttaaaactcttgtttcaggattttgaaaatcaaaatttttttatctaattatttttcgttaacccttttagcttgtcttttaatttaatttaattttaagttccaggttatgtgtgcaggatgcgcaggtttgttacataggtaaatgtgtgccatggtggtttgctgcacctatcaaaccatcacctatgtattaaccctggcatgcattagctattttttcctaatactcctcccaccactgccctcccccagcaggcaccagtgtgtgatgttcctctccttgtgtccatgtgttctcattgctcatctcccaattataagtgagaacatgtggtgtttggctttctgttcctgtgttagtttgctgaggatggcttccagcttcatccatatccctgcaaaagactgaatctcattcctttttgtggctgcataatattccatggtgtatatgtaccatattttcttaatgcagtacatcattgatgggcatttgggctgattccatgtctttgctattgtggatagtgctgcaataagcatacacatgcatgtatctttataatagagtgatttattttcctttggatgtataccctgtaatgggattgctgggtcaaatggtatttctggttctaaatctttgaggaatcaccaaactgtcttccacaatggttcaaccaatttacatttccagcaacagtgtaaaagccttcctatttctccacaacctcgccagcatctggtgtttatgtagttttaaataattgccattctgactggcattagatggtatctcatttgtggttttgatttgcatttctgtaatcagtgatgttgagctttttttcatgtttttttggccacatgtacgtcttattttgtgaaatgtctcttcatgtcctttgttcactttttaatgaagtttttttcatgtaaatttgcttaagttctttatagattctgaatattagacctttgtaagatagatagattgcaaaaattttctcccattctgtagggtgtctgttcactctgatagtttctttttctgtgcagatgctcttttgtttaattagatcccatatgccaatttttgcttttgtggcagatgcttttggcgatttcatcataaaatctttgcccatgcctgtgtcctgaatggtattgcctagattttctttcagggtttttataattttgtgttttacatttaagtctttaatctatcttgagttaatttttgtgtaaggtgtaaggaaggggtctagtttcaattttctgcatatggctagccagttctcccatcaccatttattaaatagggaatcctttccccgttgcttgtttttgtcaggtttgttgaagatcaaatggttgtagatgtgcggactttttttgtgaattctctattctgttccattggtctatgtgcctgtttttgtaccagtatcatgctgttttgtttactgtagcctcacagtatacttttaagtggggtagtgtgctgcctccagctttgttctttttgcttagtattctctttgctatatgagctcttattggatccatatgaattttaaaatagtttttttttctaattccacgataagcttatcttttaaaattaatgattaactgtttcagacatcacagagccttgggtgcttaggagaaaacagtttgaaacagagaaaggatatgcaacagtaactctgaatttttcttgtgaatacctttaataacaatgttgttttcaattagttaacacagttgagaacatagagtaactagatcaaatagttccaagacttcagtctgataaaaataatgtcttgaaaataagactttgttttgtctaagatatctcaaatttagtggaagcacgtcccaagcaccaattttcttattgaaatatcatcttcactaaacatttgcctacacttaaaaaaaaaaacaaaaactccgctatatggagtagccattcttttgtttctttacttctctaataacttgctttcacttaggaaaacattgcctaatcaaattgcttttcatttacaaaagtgtgaatctcatacttcagtcaacacatctagcttagcatgatgccaataactttggtttgatgcagtagcctgaaatggttagctcaaattgagaaacaagtttttttcaaaagctagctatttggtgggcattacataataaacttaacatcttttgctctggtattgaatgagatgtgatagaagtcatttgcacaccactatgattctaaataacacggctattatgtgcttctgaagctttttttctttttagcagtcctattctgttttccattcatatttgatattccatcactggttattccttcctattcttttcttgtttgatttattttgatcaattatttgcatttccaattccgtaaaagtttaattcagttgtatgtgtggtagaatgtaacatcaaatcctttgcaagatggaattaccttgcacagcagattgaacattgtataactgaaaatctagagagatgccagtcagccaagggttaaatgacctatttttagccaagtccattttcatggcatcctggtcctctctgtcacatgactccttacaattctctgtggtttgcttccaatgtaagtagttcttattaaggatccttgcaattaactttggtattcttttctcttacatttttttaaaattatactttaagttctatggtacatgtgcataacgtgcaggtttgtcacatatgtatgcatgtgccctgttggtttgctgccctctttaactagtcatttacattaggtatttctcctaatgctatccttcccccatcccgccacctgacgacaggccccagtgtgtgatgttccccaccctgtgtccaagtgttctcattgttcaattcacctatgagtgagaacatgcgctgtttgattttctgtcttcgcgatagtttgctcagaatgatggtttcctgcttcatccatgtcactacaaaggacatgaactcatcctttttatggctgcatagtattccatggtgtatatgtgccacattttcttaatctagtctatcattgatggacatttgggttggttccaattctttgctattgtgaatagtgccacaataaacatacatgtgcatgtgtctttatagtagcgtgatttataatccgttgggcatatacccagtaatgggatggctgggtcaaatggtatttctagttctagatccttcaggaattgccacactgtcttccacaatggttgaactagtttacagtcccaccaacagtgtaaaagtgttcctgtttctccacatcctctccagcacctgttgtttcctgactttttaatgattgccattctaactggtgtgagatggtatctcattgtggttttgatttgcatttctctgatggccagtgatgatgagcattttttcatgtgtctgttggctgcataaatgtcttcttttgagaa

SEQ ID NO: 5624 - DNA, 15644 bp, Homo sapiens
  misc_feature (1)...(15644): n = A,T,C or G, or insertion/deletion polymorphism (see Tables 1-2)
aggtgtgaagtgggaaatcaggggtctcacagccttcagagctgagccccaaacagagatttacccacatatttattacagtcattagcattgtttctataaatattaaattagttaaaatatcccttatgggaaacgaagggatgggccgaattaaaggaataggttgggctagttaactgcagcaggaacatgcccttaagacacagatcactcatgctattgtttgtggcttaagaatgcctttaagtggttttccaccctgggcgggccaggtgtyccttgccctcattcccgtaaacccacaaccttccagcttgggtgctagggccattatgaacatgttatggtgctgcagaaattttgtttatggccagtctcggggccagtttatgaccagattttgggggacttgctcccaacagtctccttctggaggatgactgggtagcagcccagggtagttttacagttttgtgttttacaccagtgctgggccccctggtagttacttgattataattccttaaacagagttttccaaattaaaatatacctgttttttatagaaatgaaaaagaaaagaatttcaaagttcattgcaaagattcttaacaagaactacttacattggaagaaaaccacagagaattgtaaggagctatgtgacagagaggaccaggatgccatgaaaacggccttggctacatataggtcattcgatccttggctcactggcatctctctagattttcaataatacaatgttcaatatgctgtgcaaggtaatttcatcttgcaaagattctatgttacattttaccacacatacaactgaattaaacttttacagaattggaaatgcacatcactgatcaaaataaatgaaacatgaaaagagtaggaaggaatacccagtgatggaatagcaaatatgaatggaaacagaataggactgctaaaaagaaaaaaaattcagaagcacataatagcagtgctatttagaatcatagtggtgtccaaatcacttctatcacatctcattcaataccacaacaaaagatgttaagtgtgttatagaatgcccatcggatagccagtttttgaaaataacttgtctctcaattcgagctaaccatttcgggctacagcatcaagccaaaattattggcatcatgctaagctagatgtgttaactgaagtatgagattctcatttttgtaaatgaaaagcaatcagattaggcaatttttttctgcacagcaaaagaaactatcatcaatcagagtgaacagacatgctacagaatgggagaaaaattttgccatctgttcatctgacaaaagtctagtattcagaatccacaaagaacttaagcaaatttacatgaaaaaaaacttcattaaatagtggacaaagaacatgaacagacacttctaaagaagacatacatgtggccaacaaaaatatgaaaaagaaagctcccatcactgatcattagagaaatgcaaatcaaaacgacaaatgagataccattttatgccagtcagaatggcaattattaaatagtcaagaaacaacagatgctggcaaggttgcagagaaataggaatgcttttacactgttggtggaaaagtaaatggttaatccattgtggaagacagtgacagtgtggcgattcctcaaagatttagaaccagaaataccatttgacccagcaatcccattgcagggtatatacccaaaggaatataaatcattctattataaagacatatgcatgtttacattcatggcagcactattcacaatagcaaagacatggaatcaacccaaatgcccatcaatgatggtctggataaagaaaatatggtacatatacaccatggaatattatgcagccataaaaaggaaggagatcaagtcctttgcagggatatggatgaagctggaagccattatcctcagcaaactcacacaggaacagaaaaccaaacaccacatgttctcatatataactgggaactgagcaatgagaacacatggacacagggagaggaacaacacacactggggcctgttgggggagggtggtgatgggaggatcattagcaaaaatagctaatgcatgccagggttaatacctaggtgatgagttgacaggtgcagcaaaccaacatggcacacatttatgtaacaaacctgcacatcctacacacatgtaccctggaacttaaaaaaaaattaaattaaaagacaagcttaaagagttaatgaaaactaattagatacaagaagactttgattttcagaaacctgaaacaatagttataattttgcttttaacatatattcaaatcctttgatactgttcctttctagaggtgcagcttaattccctctcttgagtgtggcttggacttaatgaggcacttctgaaatggcctggttctgtgctcccacccaaatctcatcttgaattgttatgcaaattgtaatccctacctattgggggagggacctcatgggagktgattggataatgggggcggtgcccccatgctgttctcctgatgctgagggaattctcatgagatctgatggttttataaggggcttttccctgcttcattgtgcatttctctctcctgtcaccacgtgaagaaggacgggtttgcttccacttctgccatgactgtaagtttcctggggcagccgcctcagtcatgcagaactgtgagtcaattaaacctctttcctttataaattacccagtctcaggtatttctttatggcagtgtgagaatggactaatacttctaacttatagaatagtgccaacataacagtttgtgactctgggtgtagaacataaaactaactgcggcttccaccttctctctctctctgaatctgggatcatgagctctgggggaagccagccactgtgccataagcagccctgcaggaaggtccacatgactgagaactgaggccttctgggaacagacaacaaggaaccaggccttttccaacagccatgtgactgatccatgtttcttgtgaattcccagccccagagaagccctcagatgctgcagcccctggctgacaactggagtgcaaccttgtgagcggccctgagcaggaagcactcagggaaacctctcctggattcctgacgattggaaactgtgggagatgagaaacatttgttgtttcgagctaagttttacgtaatttgttatgcaacagtaaataatatattttcacaagagaggatgtattattacacatcaaattgcatttgctctaaatgtgtcatcatcatcattattatttttgagacagggtcttgctctgtcacccaggctggaatgcagtggcatgatcaccatgcactgcagtgtcgaactcctggggtcaagggactctctgacctcagcctcctgagtagctgcgactaccatcatgaactaccatgcctggctaattttctaattttttgtatagatggaggttttgcccaggctgatcttgaacttctggagtcaacaaatctccattcctctgccttccacagtgctaggatgacagacgtgagccaccacacctggcctaaattaattataagatattaaacatgtaacttagttttaaaaagtaaggacaatttccatggctgaagaggatgtattttatgaccattcacaatgatcacgttacttgaacttcactttccaactgtgtcccaattaaacacaaaaggaagatccaacccttgctaggctgattctatgatggcctcaacaagcagctcctggtcagtcaccttcctccagttattcaaccaactctaatgtaggtgctgctgtgaagggatttagcagatataattaagggtctcaattagttgactttatgctgggtttatcctgcttggactgtcctaatcaggtgagcccttgaaaggactgggttcttcatgagcacagagacttacagtgtgagagggactcagcatgaggggtttcctccaccaggggctttgaaaaggaaggggctatgggccgggcgtggtggctcacgcctgtaatcccgacactttgggaggccgaggcgggcggatcatgaggtcaggaggtcgagacaatcctggctaacaaggtgaaaccctgtgtctactaagaaaaaaaaaaaaaaattggcagagcgtagtggtgggcgcctgtagtcccagctacttgggactgagacaggagaatggtgtgaacccaggaggcagagcttctagtgagcagagatcattgggccactgtaccccagcctgggctacagagccagactcggtctcaaaaaaaaaaaaaaaaaaaaaaaaaattaaggggctgtgtaggaaagaacgctggtgagcaccaggaattgagcccctcccagttctctacattgacagctagccagaaacaggaacctcagtcttacaactgcaagaaactgcgttctgccacctctgtataaacctgaaggaggattcaaaatgaaaacacagcttttggaagcccagaacagagattctatccacatcttgcccagatttctgaccaaggaattataagcagataaatgggtgttgttttgccaggcgtggtagtgtgcaaatgaactgatgaattgatatacacactagttgcataaaataaaatctttctgaactttttccgtgttttacagtttataattatctgtgatgcaatttaatacactcatatttcattcattaagtcaacaaaaattaacttagtccctacaatgaaccaggtatcccctcatatgctcaagtgcctgaaactccagaagcttcacaagaccgaggtggagacactggagtgttttaagtggagaaatgacactctgactcacaggagcaggaccactgtgaaaagaacagttacgtagcaggtcatgggacagtgctagtgtcacaattcacgagtgacagtgtggtggggactaaggggagaggagggcctgaaggatgagaaggatggagggaagggctggagaagcaggaggtgaggaaaaggagcagaggaaagaatttgaaagcagcagaattcttaggtttaaatacattgttttatggattttaatacatccatctacagagcctagcagggtgtccttggcagttgtcttttaatacctcatgtgggtctgcctaaaacctaattttttatgttaatcaggtttaaaaattactaagtgttcctataaaatatacacaacacttagaagtggatacttcctaaaaacaggcagtgcatgagcagtagtgaagggcattgtgactgcattgaacagttgcaaatttgaggtgaataaagcttgtaatggcttctggttgcaacatataggaacacagtcgctactttgtattgaggagatgtcctggactcacacagaaactcagagctatggaatgatggtaaatttaaaatactacaagcaggagtcacagatacattgtctgggaaaatgcaacttagtagctttgtgagtcctgttgtaaggcttttggacacatttatacatcaaggggccaaagtcacattttttacctattagattcctgatcattcaggggttaccaagattctgctacccactgtagttaataaacaaagagcaaattggtctctattctgtctcatgcactcaggcgcaactcttcccgattaaaaacaaaaacaacaacaacaaaaatctacacctccattcccagagcaagcttactctctggcaccaaactccatgggatgatttttcttctagaagagtccaggtggacaggtaaggagtgggagtcagggagtccagttcagggacagagattacgggatraaaagtgaaaggagagggacggggcccatgccgagggtttctcccttgtttctcagacagctcttgggccaagactcagggagacattgagacagagmgcttggcacagragcagaggggtcagggcgaagtcccagggccccaggcgtggctctcagrgtctcaggccccgaaggcggtgtatggattggggagtcccagccttggggattccccaactccgcagtttcttttctccctctsccaacctatgtagggtccttcttcctggatactcacgacgcggacccagttctcactcccattgggtgtcgggtttccagagaagccaatcagtgtcgtcgcggtcgcggttctaaagyccgcacgcacccaccgggactcagattctccccagacgccgaggatggccrtcatgsckccccgaaccctcstcctgctactctygggggyyctggccctgacccagaccwgggcrggtgagtgcggggtcgkggggaaacsgcctctgyggggagaagcaasgggccckccyggcggggacgcaggaccsgggdagccgcgcckggasgagggtcgggtrggtctcagccactsctcgyccccaggctcycactccatgaggtatttcwhcacmtccrtgtcccggcccggcmgyggrgagccccgcttcatcgcmgtgggctacgtggacgacwcgcagttcgtgcrgttygacagcgacgccgcgagccagargatggagccgcgggcaccgtggatagagcaggagrrkcckgagtattgggacsrgvasacasggaawrtsaaggcccaskcacagaytsaccgaghgracctgsggaccctgcgcggctactacaaccagagcgaggmcggtgagtgaccccggcccggggcgcaggtcacgacctctcatcccccacggacgggccrggtcgcccacagtctccgggtccgagatccaccccgaagccgcgggaccccgagacccttgccccgggagaggcccaggcgcctttacccggtttcattttcagtttaggccaaaaatccccccgggttggtcggggccggacggggctcgggggactgggctgaccgtggggtcggggccaggttctcacaccrtccagakratgtwtggctgcgacgtggggycggackggcgcytcctccgcgggtaccrscagkacgcytacgacggcaaggattacatcgccytgaamgaggacctgcgctcttggaccgcggcggacatggcrgctcagaycaccmagcrcaagtgggagrcggyccrtshggcggagcagttgagagyctacctggakggcacgtgcgtggagtggctccgcagatacctggagaacgggaaggagacgctgcagcgcacgggtaccrggggccacggggcgcctccctgatcgcctgtagatctcccgggctggcctcccacaaggaggggagacaattgggaccaacactagaatatcrccctccctctggtcctgagggagaggaatcctcctgggtttccagatcctgtaccagagagtgactctgaggttccgccctgctctctgacacaattaagggataaaatctctgaaggartgacgggaagacgatccctcgaatactgatgagtggttccctttgacacacacmggcagcagccttgggcccgtgacttttcctctcaggccttgttctctgcttcacactcaatgtgtgtgggggtctgagtccagcacttctgagtcyytcagcctccactcaggtcaggaccagaagtcgctgttccctcttcagggactagaattttccacggaatagragattatcccaggtgcctgtgtccaggctggtgtctgggttctgtgctcycttccccatcccrggtgtcctgtccattctcaagatagccacatgtgtgctggaggagtgtcccatgacagatgcaaaatgcctgaatgwtctgactcttcctgacagacgcccccaaracrcatatgacycaccacscyrtctctgaccatgargccacyctgagrtgctgggccctgrgcttctaccctgcggagatcacactgacctggcagcgggatggggaggaccagacccaggacacggagctygtggagaccaggcctgcaggggatggraccttccagaagtgggygkctgtggtggtrccttctggavaggagmagagatacacctgccatgtgcagcatgagggtytgcccaagcccctcaccctgagatggggtaaggagggagacgggggtgtcatgtcttttagggaaagcaggagcctctctgacctttagcagggtcagggcccctcaccttcccctcttttcccagagcygtcttcccagcccaccrtccccatcgtgggcatcattgctggcctrgttctctttggagctrtgwtcrctggagctgtggtcgctgctgtgaggtggaggaggaagagctcaggtggggaagggatgaagggtgggtctgagatttcttgtctcactgagggttccaagacccaggtagaagtgtgccctgcctcgttactgggaagcaccayccacaattatgggcctacccagcctgggccctgtgtgccagcacttactcttttgtaaagcacctgttaaaatgaaggacagatttatcaccttgattacrgcggtgatgggacctgatcccagcagtcacaagtcacaggggaaggtccctgaggaccttcaggagggcggttggtccaggacccacacctgctttcttcatgtttcctgatcccgccctgggtctgcagtcacacatttctggaaacttctctgaggtccaagacttggaggttcctctaggaccttaaggccctgrctcctttctggtatctcacaggacattttcttcycacagatagaaaaggagggagctactctcaggctgcaagtaagtatgaaggaggctgatgcctgaggtccttgggatattgtgtttgggagcccrtgggggagcycacccaccycacaattcctcctctagccacatcttctgtgggatctgaccaggttctgtttttgtyctaccccaggcagtgacagtgcccagggctctgatrtgtcyctcacagcttgtaaaggtgagagcttggagggcctgatgtgtgttgggtgttgggcggaacagtggacacagctgtgctatggggtttctttgcattggatgtattgagcatgcgatgggctgtttaargtgtgacycctcactgtgayagataygaatttgttcatgaatatttttttctatagtgtgagacagctgccttgtgtgggactgagaggcaagakttgttcctgcccttccctttgtgrcttgaagwaccctgactttgtttctgcaaaggcacctgcatgtgtctgtgttcntgtaggcataatgtgaggaggtggggagascacccmaccccsatgtccaccatgaccctcttcccacgctgacctgtgctccctcyccaatcatctttcctgttscagagaggtggggctgaggtgtctccatctctgyctcaacttcatggtgcactgagctgtaacttyttccttccctattaaaattagaacctkagtataaatttmctttctcaaattcttgccatgagaggttgatgagttaattaaaggagaagattcctaaaatttgagagacaaaatwaatggaasrcatgagaaccttccagagtccacgtgttgcttatgctgatttgttgcaggggaggagagtagatggggctgtgcccagtttctgttcyggccaccatgggctttatgtggtcactgcttggctgggtcatctttgctgctccattgtccttggcccttcagtagaaccttgtcccaccaagacctgtgatcacagggagttggatgtcacctagggtggtccctgcatacaaatctccttgtggtatcaagagacaaattttcagacctgtccaggtcttgccttcctcccagggctttttcctcaattgtattttcgatttttctccaatctttttaaaggaaccagattgtgacatttgcagagaggaggggtcccatagtttctcatcatgattaactttctgttggaactcctcttctgccctcctactcttcttcctgctctgagttgtagtaatcctagtgctggctccaatccaaactcatagatttataaagcagagtctaatttagattcatatgtggttggaaaattgtacccataaggctagggttattgttcctgaagagaaatatatggttttgtgctgaagtgtgcaggagggttggtgtgggaggagggaggacacacaagcagccctggtgagaaaagcactggcggcatggatgtccatgtgaacttatgttctttagctgccacaaaacagcatttgccctgtggctacattaataaaggtatgggctttagaatagggaggtgctctacagtgatcattcattcaactgacatttgttgtctgctagggatatgactgcttttgcatttagaaagcatccttaaagtaaaaacagaaaaatttctggggttatggtgcatacgttctagatgcaggcttgtccaacccgcggctcgtgggctgcatgtggcccaggacaattttgaatgtgaggacttttttgcttatctgtggtgmacctgagtcctggagtgagtgcacccacctccctcagggtcaggagtgaatgctttaggaaccctccttttcagtgacctgcaaaagataragggcacatttactgtgataacccagagtatcagccaagggggcttgaccttcaaggagttgtggggaaggttaataaagggtggtgtcccagggtcagaaaagatgggcagacagcaagggcactgcttgatatctatgataagcatgtggaattgaggagcaagcttcagattcagaatccagtgactaaggacatatctatatccctaagagaaagaaccttgggacacgatgatggttacatgctgggacaattccatcagcccttctgcaaaggagcctatagccatttaatcaggagatgggataagtattaacattgggtgtgagctgacattgctgcccagattcccacagcaccattatgtcccccatcacactggggcttacagaggccagggaataaacctagacacattatgccccatggtggaatcaccagttccataaatcctgtcctggttatctccccattctctgagtgcataattggccttgatgcactggcaactggagtcaccccacactgtgtccctagtctggagagtaagggatctcattgtgctgaagcccaaagggaaacatccctcatccaagccaaaccagaagcaatattgtgccccagggtgggtcttgtggagggtactgcaggtattataggggtggcactgccattacagacctgaacgatgyggggtgktgttgggattgcctgttatctccatataactcagcaatctgtacctgcagaagcctgatatggctaaagaatgaatggaattactccagacttgaccaagtaggagtcctgattgcagctgccatgctggctggatatcactgcctggggagattaataaggcctcaggcacatggcaagcagctgtggatttggtgagtgcattccctcccatttcatttagaagatggatatggaatgattcacattcacatgggatttataatacatttattgatagcttgcatcagggctaccttaactcctcaaccttctataaatatcaccttaagagacctggacaaatcagacatcccacagaatactaaatctcttcatttcattggcaatatcacataaattgggaaggatgaacaacagcaggaaagtacgctgaattccctggcaaaacatgtgcactacagaaggtgaagataaaacttacagagcttcaagagtggccactgcagtgaagtgttatgggtccagtggttaggggcatgcagagctcccccccgccacacacacacacaaagtaaaagacaaacttgcatcttgcatcctcaccagaaggaaggaagcacactacttgatgagcctctctgggttctggcaacaccacattccacatctaagtttattgctttggctgacactctgggtgatataggaggaggccagctttgagtggggcctggactggaaaggacactgcagcagacccaggctgtggtgcagtcagtcaccatccctcagacccctggtgctggaggtggcggtctggggaaagaagcaggatggagctgaaccaagcatcagtgggaaagtcagaatgcagggcctgggatcaggagtaaggccatggagtccacagcagagaaacatgctccatgttagaagcaacttttagcatgttactggccctgataagatagaatgcttgagcataggacaccaagcaaccatgtgattccaagtgcccgtgtgtattggcttctatgtgacccatagagtcattcactggacaggcccagcggcatctatcatgagacgaaaacggtccatgtcggttgagcctcaattccatgttaacacccacagaaaacacccagtcctgatgtggccctgaataaccaaacaaattgaagacaaattgaagttagccagtctgcatcatggatcagcccaggcctgataggaaggacccgtgagtggagcaaccacagtggcagggatgaagctacaaatgagtccagcagcactgtctctccactaccaaggcccacccagctactgcttcctctgaatactctgctcgtgagcattgcagaccaatgataggcaccaatagggcaccatttcttaaagtaactgactagcccctaagtgacaagttgaatagcttgaacaccatccatcctggaaggggcagaagtttatcctcacagggataggctcacagggatgcgatgtggtgtggttttcctctctgctctcagaccctcagtcaacaacactattggcattcctgatccactggctcagaatttcagtacattatctgcctgggggacacacctgttggggaaggggatgaagtgtgggccctgaccatgggatcccctggtcgtatcaccacctgcgcctctcaagtgctgccaggcacacagagtcatggacaggactctacaggcacaactcagtaccagcttggatgaaaccctctgaggaatgggtgccatctttcaggatgtgatgcatgtattgaatcaaagacgtctctaaggcactgttttcagaaggaagaatacgcgggtccaaaaaccaagaagtcaaagcaggtgtgtctcattccttatattcacccccagggtgatttacttataagtaaataaataaatacataacatgaatacttaaataaatttatttatgcatgtatgtatgtatgtatgtattttattcattatattcacccccagggtgattttgctcttcttacttccaaaatctggactctgcagggtaggaggtcctggtttcccaaagagggcaccctggcaaggagacaaatgagagtccatggaactacacattgtggttgcacccagggatatttgaatagtatgtgcccagagacaagcaggtgagaagaggaggaggcagggctgctatcacacaatgagggcaggagaagtgtgtgtggaaaccaggaatccacttggggacgtcctggtttcccttgtccgttgtgtgagcagaatcatccagcaacccagcctgagagggtttgatattcaagagcccagaaccctcaggaaggaaggattgagtgatactcctaggtaatgtcccacgtctctgcttctgtgctctgacatcctcagcaggattagtgcagaagccctgcttccatgagttgttcccagccagtgaccggtcacagcaagcacactaaggcaggccattactgggagacatgggactcctctgatggccaaatgtggctccaggactcctccatgcccttcctcaactctccttagactgcctctgctctaggatgcgtcgaacagaccttgtctccttctgtccagcacttggggtcacacttgcatcattgtctgccgccttttccagggatttctggctcgcgtctcatattcccttacaggtgtgtcccctcataagatgccgtagactttaagctcatcttggcatctgctccttggaggacttggactaaaaagcattgccatgtgcacaccaataactcttacttattccaacctgtaaaatccatctctttatccaacttctgccacccccataaaatctattttgygcgcgttygtagtatctctttgaattaacagatatttgttgtattaagccactaaattttgaggtagtttgtgacacagcagttaataactattaaggctttcttaagtttctgttattccatggatgttatctacatcttttaatttcctgcattttaataatattagccacacttgctgtttctaatcctttcctcctattcttttttgaaaatgttcattttgtctttctctgtccttccatctttctttcctcctttcctccctcagagctttctccctccctccactttttcacaaactctatgtggttaggctaaaaagaagcattatttgaatcttatgcttaaagtataatgccataatttacaggataaaagtaaagaaaaggaaggtattaatggaatatgaaaaaatgcctagggtgattctgtagccaagacaatggttttttaacatgtaatctccaccttcaactgaatgttttcagaacacatgagcaacataagttctttcccattcttggtacaagcacttgggaaatcaaattagccttatcttgtatgattaatgtccatacactgtataatcccaccatctgctcctgatcatacactctggggatatctttggctatgtgtcccagagacgtgtacaccaatgtttatggcaaaaaaactggaaacaatcacatatgcatcaatgggaattaacaaaattctgatataattacgaaaagtaaaattttagcagtaaaaatgattgaacagcaccctcccacatcagagataactctcctacacataacatgcatcacagaagaatacatatagtgtgagttctctgtacagcgaagttaaaaaaacaggtcagactgtgatttgggtatatatatttattgtaaaaatctttagagacagtgcaaaggactagtaaatacaagactcaagatagaggttccttttggtggataggattgggcaacagtctagggtggcttcataggttctgtttcttatgccaggagaggatgtccaggtaattagttacttgatcataaatctttatttatttatttattcatttatttttgagatggagtctcactcttgttgcccaagcgggagtgcaatggtgtgatctcgtctcactgcaacctccgcctcccatgttcaagcgattctcctacctcagcctctgagtagctaggattacaggcacctgccatgatgcccggctaatttttgtatttttcgtacagactgtgcttcaccatgttggccaggctggtctccaactcctgatctcaggtgatccacccacttcggcctcccaaaatgctgggattagaagcatgag

SEQ ID NO: 5625 - DNA, 16977 bp, Homo sapiens
gagcggctcaagtcccgcattgccgagatccatgagagccgcacgaagctggagcagcagctgcgggcccaggcctcggacaacagagagatcgacaagcgcatgaacagcctcaagccggacctcatgcagctgcgcaagatccgagaccagtacctcgtgtaagtggcggctccatacttccctgcggctccctggcgactgctgcggcacatggagatctctctaggagtctcagtctctctctctccaccaagtggcccttcctgggccccgagaccccttaaactcggttcctcccgggccccttgaaagttttcccataggtcagcctcagcttagtcagaggtgtgtgcaatgggagtgtcactcctatcccattccattttgtggaaagttggaagccttccacaaaaattcctgctgggctgggcgcaatggctcacacctgtaatcccagcactttgggaggctgaggcgggcagatggatcacttgaggccaggagttcaagaccagcctggccaacatggtgaaaccccgtctctactaaaaataaaaaatacaaaacccggccaggcatggtggtgggcgcctgtaatcccagttactcaagaggctgaggcaggagaatcacttgaacggggaggtggagtttgcagtgagcagagattatgccaatgcagttcagcctgggcaacagagcaacactctgcctcaaaaaagaaaagaaaaaaaaaatcgcccgctgtgcaacctaccatgctgggtggctgcggcagccctgtcctgggttcaaatcagttcaaatcctgcccccacccaccaacctcctgaagacctcagccagagcctccacctccctcttgggcctcagggagggcactgtcgcgtgccaggtgctgtgctaagcaccgtgctcgttatgagttcatttggtccttttcaagccctttgtaaagtttgccctttacagctggggagactgaggcacagaaccgacagctgccctgtgcaaaggccagcagtgctggagtgagcctctggtgatgatgaggggcctgggctggcatcttcttgggggactccataggcgttaacagaaacaaaaaaatgaggggtgtgggtcagggttccccagcagagctgggcgagccaccctgggttcaggctgccctgagccaggtcagctctgccctcttgtggcaaccggagatattgtacccagaaccctctctcctcagccagaccctgcctcccaccggacaggcccactgtgggctcagcacccacacaactgcacaagcccacctttcctgttccttctcaggtggctcacccagaaaggcgcccggcagaagaaaatcaacgagtggctggggattaaaaatgagactgaggagtgagtgaccgtctggagggaggcagggagggcttcccagaggagggggccatttggggtgggtttcgaagaatgagtaggagttcaccagggaggaaaagttgtccaggcagctggggagcctcggaggctggcaggtgagtgaccagggccctccccgccaccgccccccaccccagccagtacgcactcatggaggacgaggacgatctcccgcaccacgaggaacgcacttggtacgtgggcaagatcaaccgcacgcaggcagaggagatgctgagyggcaagcgggatggcaccttcctcatccgcgagagcagccagcggggctgctacgcctgctccgtggtgtgagtggaccgcagcggtggggattcccgcgtccctcccagagctctcattgaatgcctgccgcgtgccaggccttgggaaggagtccctggtggggtcatccgggacrggggagcacgcggccctggaacggggaaagcttggcggggaggccagccttccgactccccctctcgtctgcccccacagagtggacggcgacaccaagcactgcgtcatctaccgcacggccaccggcttcggcttcgcggagccctacaacctgtacgggtcgctgaaggagctggtgctgcactaccagcacgcctcgctggtgcagcacaacgacgcgctcaccgtcaccctggcgcacccagtgcgcgccccgggccccggcccgccgcctgccgcccgctgagcaccgaggacccgccccaagcagagccgcccctgggcccgtctgcgccggaggctgcggcggcgggagccacggaccagaccagccacatccaggggtcctcatttctccggctctggctcttgtttggggttctctcaccctctttctctttccttccctcccccattctccagatctccctctgtctccttttctctgtctttcttggcccctgtctctctccatgttgggggtcctaactcccccaccccatatctacgtgtcctccgggcattgccctctccatggctctggtcaccctgaccctctgccctgcccaccgcaggtcccccggggtcccggaagccccttctggctgcacctgccatgtttacagagggcccctgggctgcgcggccccagcctgggcaccctgatttttaagccatagacctggggtcagggcaggaaggaacttcactctgctgcttccgagaacctcggccgtgacattcggggccgggcgggacccgccccacagactccaacttcccctccwaaccccgaagtgaaacccgccaccgggttacccccacaagggggccgctgcgagaagttcacccacccccgaaaaaataattaaactcgcaggccaggcacggtggctcatgcctgtaatcccagcactttgggaggccaagacgggcggatcttttgaggtcgggagttggaggccagcctggccaaaatggcaaaaccccgcatctactaaaatacaaaaattagccgggcgtggtggcggccgcctgtaatcccagctacttgggaggctgaggcgtgagaatctcttgaacccaggagatggaggttgcagtgagcagagatcgtgccactgcactccagcctgggtaacagagggagactcctccgtctcaaaaaaataaataaataaacttgtgagctggccccaacccctcctaggaatcacagctccccgtactggtgccgccgcagtggccaagttgcgacactgcccacggcccctccctctgatgcagattcagggcttctcttcgatcatgttgggttttgattctgtttttccttgactgcaaaaccctctttcctctcctcttttgggacaagagccctggttttctacgctgcccttggccaccacactgcctgccccacgagctgggaggcaggttttgtacggtacgttgttattgatatgatataaaacatcaaacgtcgtgggtgattctgttgtcagtgactgggcttcagtaccacctctgcgtgtcggggaccctggtgtctacgggggtcacagcaggtcggacccgtgggtttaactccaagcccctctgagacccgacaacccctccctcccccagtttagctgctcaagcctggagaggttgaggcagtgcccaaggtcatacaggagagagattcgaatcctgagctcccgactgctcaggggaccccagaccccatccagcccctcaagtgcttccaagctgcttcccccgcccaccgcccccaaatttgaatcctgtcgcaaccatcagctgtgtccttgggaaagttgtatcccctccctgatccacagcttcctcattcattgccaagtggcgtcaaaagtcaaaaccctcccatgccacagggaggagtctcccgtgtctttgatgttctcaagtcgtcggcacctccagccagcattggaggctcttctctgacctctcctcacccactcccatgcacagcccgccgggtcccaggagacgctgagcaaaagccctgtggggttttttgtgtttctttttaaagagtcaaggtctctcactctgtcacccaggctggagtgcagttgtgcgaacacagctcgcggctcacagcctcaagctcctggttcccagcctcaagcagtcctctcatctcagcctttagagtcactggattacgggtgtgtgtcaccatgtccagctaattatttttaaatttttttagaaacaagatcttgccgagtgcagtggctcacacctgtaattccagcacttggggaagccaaggcaggcagatcacttgaggtcaggagtttgagaccagcctggccaacatggtaaaacctggtctccactaaaaatacaaaaaaaaattagccagacatggtggcgcatgcctgtaatcccagctacttgggaggctgagataggaagatcagatgaacctgggaggtcaacgctgcaccaagccaagatcgtgccactgttctccagcctgggtgacagagtgagactctgtctcaagaaaaaaaaaaaaaaaaagggtcttgcccttttccaggtgggtctcaaactcctggcctctagtgatcctcccacctcagcctccctgagtcgcgtaagccaccacgcgtggcctcatggcgtctttgacttggactcctgtttaccaccctccccatcacacccagaatccacacccccactgygacgtcattgtcccttcagccctccccaaccctggggcctcactgtccttgtctgttttgtacagccacctctcaaggcccaacaaggctgaacctggggcaagtgcagaaagaaacctccactctgacccagtctactgctgggaccttgggacaggacctgcctcccttagcctcagagccccctagccttgccaggcactgtccctgccatgtgtcctgtctggagataacccataaataactccagcccagattgtgcctctcactgcataggtgctcacaggagaaaggttgccatctttatgatcccagctatgctgagctgggggtggaagagaatatcccgtgtgrtctctaaaaacactcaaccactggctgtgtgtccttggcaaaatagccttccctctctgatcagccatttatttgttaccagctggagtcagtagcacctacccccagccccaactggatgcttctgagggttcaatgataaaatgggttgtaggcccactctatgcctggcaccaagccagagagcaatacattgtagggttacatttatgatttcttccaatagggctggtgcctggtaactactggaaaaattgtagcaattatatttatggttatttcttcaatcccacccggcatagggtaagcaccaaagttggggtggtgagtcttggggagcctttgccaacggtttggtcgtctgagggatgggctcggggaccatccagccactgggacttcagagaagctccggctcccaaaccagctactgtgtgtgtggccagggtcttccccacaactagaggggggcacagctggggactcaggtatatcttccagctgggtgtgggacattttcttccctaggatccgatgtgtcttgccctgaatgtaaggcctggcagggttggaatgtctcagttattcccccaacactccagcctccatctgggccttttttccaggctattctctctgccttcactgttggggccactgtcctgtgtaggcaccaaggcctgaccatgccatccagaagccccagcctgggacaactctcccccacctgcctctgagccctccatggtgactcttgttccccaaaccttatccttctccccattacacagaagggaaagctgaggctctgtcactcaaatccaaagccaggtggactccaagccaccccacccctatcccagacagcacaggctgcctctctcccccatgggcgtcccttgaaggccaggttgccccccaccccccacaagccttgaacgatgaaaagaaggaaggccagttctcttcaccccaagccagaagtggggctgggtgggtaccctagagaaatgacacgccactccctgcgccagcttctgctttccggcgtggctgtggtcaagcctgagtcagtcccacgggaccacggtgaggggtctggagcgtcggggtcaggagtttgaggggggaagggttgaggggcaggatgtgggggttgggtgtgagggaggtcacgggcgagactggagggaggagacctggccacacaggccttgcccactctcgggggcctgaatatttcagttactcccccaaaaccccggcctccatcccatccccagcctccatccgacgtcacccctgttaggtcacaggcccactctgagagtgggtctcgggcctcaagtcccctagccgcccctagaaggtctaggggtgcgtggagacaccaccrttcctctcagcctgtgtctgtctcaaaggccccacctcacctcccctaaaggtagtcttgcgccaggrctcacgtgcctgggcagggctgattgccaaggggcccaatggcctcgtgactggggacccagcacctggcaggggtgggggtgggacactcagaggaaggagtggaggagggagagacgctggcccgggacccgaggggcgtgggcatcgggaggcgggyccgggttaggggcgggaccgccgcctggttaaaggcgcttatttcccaggcagccgctgcagtcgccacacctttgcccctgctgckatgaccctgtcgccacttctgctgttcctgccaccgctgctgctgctgctggacgtccccacggcggcggtgcaggcgtcccctctgcaagcgttagacttctttgggaatgggccaccagttaactacaaggtagggacggcgacagggcgggcaggctggagggaacaggcgccctgtcggggcacgcggctccttctttctccccagacttcacaggggaagaccagggccccgaggggacgctgtccctgccgggttcctggaaaaaccctgttcagttcccggcgctgcggccacactccctccgtgccgtttcgctttcgcatcccgcatctgagaggcgcagctgcctccacccgcctagtcccgcccaagggttcaatgagcgcctactgtgtacttttggggcaggagctggggtctccttttgtggcccagggcacaagttcagcagctggccaagggccgccggcatgcattcttgctgctacccttgatgcattcattccagccagggcagggctcgcgtgtctttgggacctattaggcagatgccctagaggctgagcgacttgctcaccgctccagcgacatgggccacccgccacccctcagctgaagccggaagtcagcacctattaggtgccgcctctattcagtcggacttggaaagggttcacgtggatcccttgctcagctcagaggcaaggtctccaggtgaagtgacaagaaatgagcatgggccaaggccggaggcggtggctcatgcctgtaatcccaacactttggaagtctgaggcaggcagatcacgaggtcaggagttcgagaccattctggcctacatggagaaaccctgtctctactaaaaatacaaaaattagctgggtgtggtggcatgtgcctataatcccagctactcagraggctgaggcaggacaattgcttgaaccagggagtcgggtgttgcagtgagccgagatcgtgccgcagcacaccagcctagcgacagtgagactccatctcaaaaaaaaaaaaaaaagtctcaaagtcaagattccacctggcaagttctggaaggcgtgcaagatgaattgcstatcacagccccctttctacaagactaccaagtggggttgagagaagtggggaactgcccagggctacacctgcctcccacgccttcctaatccacagacaggcaatctatacctgcgggggcccctgaagaagtccaatgcaccgcttgtcaatgtgaccctctactatgaagcactgtgcggtggctgccragccttcctgatccgggagctcttcccaacatggctgttggtcatggagatcctcaatgtcacsctggtgccctacggaaacgcacaggtgtgtgggcgctggggaaactgaggcacgtgggcaggggagcaggggacccagcctaccagcaggctctcaccctgctgccttgcaggaacaaaatgtcagtggcaggtgggagttcaagtgccagcatggagaagaggagtgcaaattcaacaaggtggaggtgagcggccccagggccccacactggggtgggggaaaactgtcccacgtacaggaggcaaatacgaggatgccagctctgtcttctgcctcgtgtgctcccatttaatcacatctttattccctatctcctgggtgggtactggtgattattacgagagggtgtcagggtaccctaggccctcttcatgccctctcctgccccctctccaaaccccaggcctgcgtgttggatgaacttgacatggagctagccttcctgaccatkgtctgcatggaagagtttgaggacatggagagaagtctgccactagtgagtgacgcccctcactccacccaaggagggggacawgggtggtaaccttccctgcatccaggcagacccaaattcaagtcctagccctgaccactgctgtctgtgcagcccaggaaaacaactacccttctttattttatttatttttttattttttcttgagacagagtctcgctctgtygcccaggctggaatgcagtggcgcaatcccagctcactgcaacctccacctccagggttcaagtgattctccagcctcagcctcctgagtagctgggattacagttgtgtgccaccatgcccagctaatttttgtgtttttagtagagacagggtttcaccatgttggtcaggcttgtcttgaactcctgaccttgtgatccgcctgccttggcctcccaaagtgctgggattacaggcgtgagccaccgcacccagccctttttttttttttttttttttttttttttttgagacagggttttgctctgtcgcccaggctggagtgcagtggtgcaatcttggctgactgcaaccactgtctcctcagtttaagtgatcctcctgcctcagcttccccagtagctgggactacaggtgtgcaccaccatgcccggctaatttttgtatttttagtagagacagtgttcaccatgttggccaggctggtctcaaactcctgacctcaagttatccgcctgtcccagcctcccaaaggattacaggtgtaagccaccacgcccggccccagcctcccctcttgaagcctccatctctgaatcaggggaatgaatgcaggtctcttaggagcatgagtgatcacagaggacttactggaggaggcatttctgagctgggcatggaaggatgagcaggaatgtgcagagacacagatgatgggatgtggagatgataggacagaccccacctacttccccgggggattgtgaagaatgactcccagagaagtgactcattggctccaatcatttattcattcatcaaacatccgggtcacccaagaggcctcacytagtgacaccctagtcctgcagggttagatcagggctgagagagtggcaaggagagggcactgaggagacactgtggaaggaggatgaagggtgttcctggcagagggatcagcctgtgtggaggtcctgagtaaagtgagatactatgggggtcagaggcagtgggtctggtcttagggatgaaaccaagggagctaggaggcaggagcagcccaagccctgccttaggggcctccactcaagcatgtattgagcacctgctgtttgtgggctttgtcgcatcactgtgaagccaactgtaccctcttctcagtgacgaaacaggcttggctcagggctggtgggygggaccgttgagataacggggaggaagctgaggcaaccccctgctccccacccacccagtgcctgcagctctacgccccagggctgtcgccagacactatcatggagtgtgcartgggggaccgcggcatgcagctcatgcacgccaacgcccagcggacagatgctctccagccaccrcacgagtatgtgccctgggtcaccgtcaatggggtaagaatctttttagccctcagcttgacactcatagtcccatggagtcagggatggacaagacagagggaccagagataaaggaacccaggcggaggttgcagtgagctgagatcatgccactgcactccagcctgggcaacaagagcaaaacttgatagctttgcatagggaaagagggcattgatgctggggttttgaaaggtgagtaggagtccakcaggcaaaaaaagtatgtattaattcgaagtattaaacatccctagccacccccattgggaaagatgtgccactgatttgcgaggcgggaggcgggggccagacttgggaatatgtgcagccctttctgggctggaaccagggtgcatgggttggggtagctgctgggaatatgcgacccctgtcttgctttgtgcagaaacccttggaagatcagasycagctccttacccttgtctgccagttgtaccaggtaagctgggaggggagcagtgggattcaggtggtgggggtagggtctccttccaggaccccaactcrtggccttcacctccagggcaagaagccggatgtctgcccttcctcaaccagctccctcaggagtgtttgcttcaagtgatggccggtgagctgcggagagctcatggaaggckagtgggaacccggctgcctgcctttttttctgatccagaccctcggcacctgctrcttaccaactgraaaattttatgcatcccatgaagcccagatacacaaaattccmccccatgatcaagaatcctgctccactaagaayggtgctaaagtaaaactagtttaataagcccttctggatggtgtaattmatttgataagtcagccattcccccttccccaggcctggcaaaacccgctctctactaaaaatacaaaaattagccaggcgcggtggcgggcgcctgtaatcccagctacttgggaggctgaggcaggagaattgcttgaacccggcaggcagaggttgcagtgagccgaaatcgcgccactgtgctccagcctgggcgacaagagcaaaattccatctcaaaattttaaaaaagtgactggttgtggccgggtgaggtggctcacgtctataattcctgcactttgggaggtcaaggtaggaggattgcttgaggacaggagtttgacaccagctttggcatgaaagcaagaccctgtctttacaaaacatgaaaataaaaagaattagcaggacatggcagcgagcaactgtggtactcgggaggctgaggcaggaggatcacttgagcacaggaggtcaaggctgcagtgagccataattacaccactgcactgcagcctgggccagagagcaagactctgcctcttttttttttttttttttttttttttttgagacggagtttcgctcttgttgcccaggctgaagggaaacgcgtgatctcggttcaccacaacctctgcctcttcagttcaagcgattctcctgcctcagcctcctgagtagctgggattacagacacatgccaccacgcccagctaattttgtgtttttagtagagacagggttcttccatgttggtcaggctagtctcgaactcctgacctcatgatccatctgtctcggcctcccaaagtgctgggattacaggcgaaagccaccacacccagccaagactctgccttttaaaagaaaaagaagggaaagaacatgttcagtgttgtattttttcctactgatggactggtcaaatcatagatgtatatattcttccttcgaggaagtgaggcttaattccactccctacaaatatctttgtttctctttattttgagatggagtctagctgtgttgcccaggctggtctcaaactcgtgggctcaagcgatccttcttgaggatcctgaagtgctgcgattatagacgtgagccagcgtgccgggccctacaaccaccttgacagtgaactagattgagtaacttgattccaaagagtagaacaggaaaagtgaaaaagaataccccggctgtgcgcggtggctcaaacctgtaatcacagcactttgggaggctgaggtgggtggatcacttgaggtcaggagttcaagaccagcctggccaacatggcgaaaccctgtctctactaaaaatacaaaaattaggctggatgcggtgtctcacacctgtaatcccagcactttgggaggcccaggcaggcagatcacctaaggtcagaagtttgagaccagcctggcaaacatggcaaaaccctgtctctactaaaaaatacaaaagttggtcaggygcggtggctcacgcctgtaatctcagcactttgggaggccgaggcgggtggatcacaaggtcaggagatcaagtccatcctggctaacacggtgaaaccccgtctctactaaaaatacaaaaaactagctgggcgtggtggcaggcacctgtagtcccagctactcgggaggctgaggcaggaaaatggcgtgaacctgggaggcggagcttgcagtgagccaagatcatgccactgtactccagcctgggcgacagagcaagactctgtctcaaaaaaaaaaatttaaaaaatacaaaagttagccaggcgtggtggtgcacgcctgtaatcccagctactccagaggctgagatgggagaatggcttgaacccgggaggcaggggttgcagtgagccgagatcacgccactgctctccagcctgggcaacagagagagaccccatctcaaaataaataaataaataaatacaaatcatcaagtagcaaaggtggcatgttttgaggtggcacgtcctgaacttcctcattccctggctgaattggtggtggagagaaattcagggtagaagttctgaagtaacacatctacagaaggggtagaaaaagacagattagaacaaatagaaaggaataaatataagcacactatgccagatattgtcgaatcagtatctttgtcctgagaataggttagcttggttacacacttgtatctcattttattttatttatttatttattttttgagacggagtttcgctcttgttacccgggctggagtgcaatggcatgatcgtggtcttggctcaccacaacctccacctctggagttcgagcgattctcttgcctcagcctcccaagtagctggaattacaggcatgcgccaccacacccagctaattttgtatttttttttttttttttgagacggagttttgctcttgttgaccaggctggagtgcaatggcatgatctcggctcactgcaacctccgcctcccaggttcaagcaattctcctgcctcagcctcccgagtagctgggattacaggcatgcaccatcatgcccggctaatttgttgtatttttagtagagacggggtttctccaagtcgaggctggtctcgaactcctgacctcaggtgatccgcccgcctcggcctcccaaagtgctgggattacaggcgtgagccaccgcgcccagcaattttgtatttttagtagagacggggtttcaccatgttggccaggatcgtctccaactcccgacctcaagtgatctgcctacctcggcctcccaaagtgctgggattacaagtatgagccactgcacccagccttgtgtctcattttagaaggtggtggcttaggagggagttgggaacctatctaagttaggtctctaaatggtgtgagcaatcaggcatttaatgagcatttcttctttctctctctctctgtctccccaccctcactttccttccttccctttttttttttttttttttttttttttgagacagagtctcgctttgtcacccatgccggaaagcagtggtgcaatctcagctcactgcagcctccaccttctgggctcaaccagagtagctgggactaaaggcatatgccaccatgcctggctaatttttttttttcccgtttgagacggagtctcactctgtcgcccagcctggagtgcagtggcacattctgagctcactgcaacctccacctcccaggttcaagagagtctcctgcctcagcctcccgagtagctgggactacaagcgggtgctaccacacctggctatttttttttttttagtagagatggggtttcatcgtgttagccaggatggtctcgatcccctgacctcatgatccacccgcctcagcctcctaaagtgctgggattacaggcgcaagccaccgcgcccagccacacctgactaatttttgtattggtagtggagacggggtttcgccatgttgctcaaactggtctcaaagtcctggactcgagcgatctgtccgccttggcctcccaaagtgctgggattacaggcgtgagccactgcgcccagctcttcctttcctactctacaggatctggctctgttgcccaggctggagtgcagtggcacaatcatagctcactgcagccatgacctcctggactcaagcaatcctcctgcctcagcctcttaagtcgctgggactacaggctggagtgcagtggcgcgatcttggctcactgcaacctccacctcccaggttcaagtgattctcttgcctcagcctcccaagtagctgggattacaggcacatgccaccacacccaagtgatttttatatttttagtagagacagggtttcaccatttggaccaggctggtcttgaactcctgacctcgtgatccacccgcctcagcctctcaaagtgctgggattacaggcatgagccactgcgccccaccccgaagttcacatttacaaacagattttgaaaacaatatttaagcaggcatactataaaacataattattgttgaaaagcttatttacaagctttcatctcactttcatttaacttacttgtgttcaacaattatgcttaattactcatgaacatttcataaaacattgaaaaaataatcatcatcttaagttacttttcttgttgacaaatcaagtatcaaaaatcaaagaagcaaagaacctaaaaaaataaatatatgggacgcagcaccatggctcacacctgtaatcccagcactttgggaggccacggtgggaggatcactggagaccaggagttcaagaccagcctggccaacacagtgagatcccatctctataaaaaatacaaaaattggccaggcgtggtggctcgtgcctgtaatcccagcactttgggaggctgaggcgggcagatcacctgaggtcgggagttcaagaccagcctgaccaacatggagaaaccccatctccattaaaaatacattagctgggtgtggtggtggtagctctaatcccagctactcgggaggctgaggcagcagaatcgcttgaacctgggaggcagaggttgcggttagccgaaatcacaccattgcacttgagcctgggcaacaagagcaaaactcaatctcaaaaaaaaaaaaaaatagccaggyctggtggctcacacctgtaatcctagctactcgggaggctgaggcatgagaatcacttgaacctgggaggctgcagtgagctgagatcatgccactgcactccagcctgggcgacagagcaagaccttatctcaaaaaataaccatccaaggaaccaaaaaaaattaaaaacccacatatgggtctctcctttactttttaaaattaattttattgtcaggcttgacatccattaagcaaatcacctttttttttttttttttcagacagggtctcactctgtcacccagactggagtgcagtgaggtgacatcacagctcactgcaacctctgcctccagggctcaagcgatcctcccaccccagcctcccgagtgtctggaactacaggcacaagccacaacactcagctaattttctatatttttagtagagacagcttttcactatgttacccaggctggtctcaaactcctggactcaagcaatccgcctgccttggcctcccagagtgctgggattgcaggcatgagccaccgtgcccaccctcaattcacttcgtaaaaatttttttatttattttttgagacagggtcttgttctgtcacccaggctggagtgcagtaatgtgatcacagctcactgcaacctccatttccagggctcaggcgatcctccctgctcagcctcccgaatagctgggacaacaggtgcgagccacgagccagcatgcgtggtaaatttttgtattttttttttttttttttgcagagatggggttttgccatgttgcccaggctgttcttgaactcctggcttcaaatgacctacctccatcagcctcccaaagtgctgggatggatgacagatctgagccaccacctggccaagcaattcacttttattgcatgtattgttcttaggtttattttatagttttacagtttacacttttataatcttcaacatctaaagataacataagcctgtttgactagtcttaatttacataagcaaatgtggttttctaaagtcaatgaaatagagctcctttacaagttaatctttaggaattccatcaagagggagaaagtgttacatacctataacatatatatatataaacataaataggtgcagtcagaaatcttatagctttcattttaaaattatagctgtgagacaggtgtgataatacaaaactcactagtttttaaaaaaatggtggagccgggcacagtggctcacgcctgtaatcctagcactttgagaggccgaggcaggcagatcatttgaggccagggagttcaagaccagcctgggcaacatggagaagcc

SEQ ID NO: 5626 - DNA, 14172 bp, Homo sapiens
  misc_feature (1)...(14172): n = A,T,C or G, or insertion/deletion polymorphism (see Tables 1-2)
nnnnnnnnnnnnnnnnnnnnnnnnnnnnnnnnnnnnnnnnnnnnnnnnnnnnnnnnnnnnnnnnnnnnnnnnnnnnnnnnnnnnnnnnnnnnnnnnnnnnnnnnnnnnnnnnnnnnnnnnnnnnnnnnnnnnnnnnnnnnnnnnnnnnnnnnnnnnnnnnnnnnnnnnnnnnnnnnnnnnnnnnnnnnnnnnnnnnnnnnnnnnnnnnnnnnnnnnnnnnnnnnnnnnnnnnnnnnnnnnnnnnnnnnnnnnnnnnnnnnnnnnnnnnnnnnnnnnnnnnnnnnnnnnnnnnnnnnnnnnnnnnnnnnnnnnnnnnnnnnnnnnnnnnnnnnnnnnnnnnnnnnnnnnnnnnnnnnnnnnnnnnnnnnnnnnnnnnnnnnnnnnnnnnnnnnnnnnnnnnnnnnnnnnnnnnnnnnnnnnnnnnnnnnnnnnnnnnnnnnnnnnnnnnnnnnnnnnnnnnnnnnnnnnnnnnnnnnnnnnnnnnnnnnnnnnnnnnnnnnnnnnnnnnnnnnnnnnnnnnnnnnnnnnnnnnnnnnnnnnnnnnnnnnnnnnnnnnnnnnnnnnnnnnnnnnnnnnnnnnnnnnnnnnnnnnnnnnnnnnnnnnnnnnnnnnnnnnnnnnnnnnnnnnnnnnnnnnnnnnnnnnnnnnnnnnnnnnnnnnnnnnnnnnnnnnnnnnnnnnnnnnnnnnnnnnnnnnnnnnnnnnnnnnnnnnnnnnnnnnnnnnnnnnnnnnnnnnnnnnnnnnnnnnnnnnnnnnnnnnnnnnnnnnnnnnnnnnnnnnnnnnnnnnnnnnnaaaccccgtcttgactaaaaatacaaaaaattagctgggcattgtggcacgggcctgtagtcccagctactcaggaaggctgaggcaggagaatcgcttgaacccaggaggcggaggttgcagtaagcgaagatcacgccactgcactccagcctgggcaacagagcgagactctgtctcataaataaataaataaataaataaataaataaataaagtgctgggattacaggcatgagccaccgcgcccggctgaaagagttacgtctttgtttagttctggaaatgtctccatcttactccttccagcagtgcttctctgcttgtccattgtcgtctggaactcccactgggctgtggcctgcttccccccaagtgtgctctctgtgttgccgcagggtggtctcgtcgtcactgtctcccagtccccagtctctcttctgctgtgtctggccacttaaaagtttattccattcatttgagggattttttttccaatggctatatttttaacttgcaatatttggttttttgttttttttattttcctacaaagttgaccctggtaatagttttcatggagtgcaacatgtaactttatattagaaaatggaatgtcacatctttaccatgggacagagacacaggaagatgtcaaagtctgaaatagcaagtgaagctgaatgtagcttatgatagggagggagggctctgctggacagggacagtctctgagcaggtgaactgctgatctcacagaggtcagcaatcggcggattttcaccgtgtaagtagactgaagtcatccgtagaagcacagacgtactggactgtcacatctactagaaaataaagcatctgccacctggggggtggggagggtccagtttagcccaatgggggacaacccagcacatccacctttggaacccaccagttaaaggtattgtcagagtatcctgtttgggaagaattcccatttcaggcaccctcgatgaagagccaggccaggaacatgggatgagagagcgaaatggtggaaaaaggggagataggctaattccagaggcacctgcccagccaacactcagccctggctgcgcgcactgagtcctgtgtctgctgcaggtatcgggctttccgggatgacgatggacattattcccagacctactggaatcttcttgccatccgcctggccttcgtcattgtgtttgaggtagccgaggcacctgctggttctcccatccatggcatgaggccccgaccctgtgctttgcctaattcgagcacgtggtgaggggtcggtgccgtcacttcctgctgtgtcatcttggtcaaatcagagctcttctctgcacctgcgttttccctgcctggcctcatccctgggttgtggtgtggacattgtgggtgtctccacaggagccccagggccacgaaagctggggtggcctctgccccttctggggttccttttcctgcacagctgctttctgactccacccacagctgggagcaggtgccggagccccggcctgcctggccctgtgaaggccactctgggcgtttgggtgggcgtgagtgccttcctctgctcccagcatgtggttttctccgttggccgcctcctggacctcctggtgcctgacatcccagagtctgtggagatcaaagtgaagcgggagtactacctggctaagcaggcactggctgagaatgaggtgaactgtacagcccagtctcggccctccccccagccctctccctatccttgtcagtggctgctctacctccggacactgagtcacatccctcttcctcttgctgcccttttttggggacaggttctttttggaacgaacggaacaaaggatgagcagcccgagggctcagaggcaagtctgggagcagccaggcccctgccccgtgcactccctgaggtcacagggccctgcccagccgcccactgtgcctcgtggccatggcctgctcctggccctagtctgacttgtccctgcccccaaccctctccccagctcagctcccactggacacccttcacggttcccaaggccagccagctgcagcagtgacgcctggaaggacatctggtggtccttaggggagtggcccctcctgagccctgcgagcagcgtccttttcctcttccctcaggcagcggctgtgtgaaccgctggctgctgttgtgcctcatctctgggcacattgcctgcttccccccagcgccggcttctctcctcagagcgcctgtcactccatccccggcagggagggaccgtcagctcacaaggccctctttgtttcctgctcccagacataagcccaaggggcccctgcacccaagggaccctgtccctcggtggcctccccaggcccctggacacgacagttctcctcaggcaggtgggctttgtggtcctcgccgcccctggccacatcgccctctcctcttacacctggtgaccttcgaatgtttcagagcgcagggccgttctccctcgtgtcctctggacccacccgccccttcctgccctgtttgcgcagggacatcacccacatgccccagctctcggaccctgcagctctgtgtcccaggccacagcaaaggtctgttgaacccctccctccattcccagttatctgggtcctctggattcttctgtttcttgaatcaggctctgctttccccctagccactacaggcagcctctgacagtgccgctttacttgcattctgcagcaattacatgtgtccttttgatccttgcccaacttccctccctctcccagctcctggcccctggcccagggcccctcttgctgtttttacctctgttccttggggcctagtacccagcaagcacccaaatgggggaggttttgggatgagaggaggaaacgtgtatacctgtaacatctggtggctcttcccccagaagtttgtgttcatacataattgttttccacgctggatcataatgtgacgtgcagttctgccctgtgctggggagccacatgaagcttcccctggctaacttgctaccccgcagcaatcccagtgtggccgtctgcttgctaaaaaatggatctgtgctcatctgtattgatgtccttggagttctacaagtggaacttaagtgtcaaaaagaatatgtggtttttagctgagcgtggtggctcacacctgtaatcccaggactttgggaggctgaggcaggaggattacaaggtcaggagttcgggactagcctgtccaacatggtgaaaccctgtctttactaaaaatgcaaaaattattctgggtgtggtggcgggcatctgtaatcccagctatttgggaggctgaggcaggagaatcgtttgaacccgggaggcggaggttgtagtgagctgagatctcaacactgcactacagcctgggcgacagagcaagactccgtctcgggaacacacacacacaaaaagaatatgtggttttaatgtgctttgatgagtactgccaaacttactccacagaaaaggcctctttctgaacatcctcgcctgcgttctatttcacccaccgtgatgcctggcctgagggcggcgtgcttgcttgtagcatttcttgaggatttgctacttgttcacctgcctcttaggagcactgtgccctgcctccatggaagggctcttccggcagggatgcaggctcacagcgccctggggctggacaccaccggccggagcatggcggacagcacacacggcccggggcgggaaccttggaaactttacacagatggggagctcagccattccacgtgtgctttcgctcagcacaatgcttactacaaacccacgtgtacttccttccagctggttgctttttattgttgctgtcttaaactccaaagttttaaggtgaatttattgaaacgtacgaaaatgctcagttcatacaggcttccaggtgaacaaactgttgtaaccagcacgtgggtaaaaggcaagttccacatcacccgacgtggaagctccccgatgcccacgtgcgccctaccctgtgaccctctcccatccagggccctgatgcccacatgcgccctaccctgcctgtgaccctttcccatccagagtagccaccaccttagccaccaagcagagatggaactggggactttgcatttggcgtctgccgtgggacattgcgcgagctccatccatgccgagcatccatctcagcccctcctggctgctgggctgcttcgtgtttggcttagggtcattttgcagttgtgtgctttactgtgggttgcatatttagggcccaacagaactgctgggtcagggataaacatgttcggcatttttttttttttgagatggagtctcgctctgtcacccaggctggagtgcagtggtacgatctcggctcactgcaagctctgcctcccgggttcacgccattctcctgcctcagcctcccgagtagctgggactacaggcgcccgccaccacacccagctaattttttgcatttttaatagagacggggtttcaccgtgttagccaggatggtcttgatctcctgacctcgtgatccgcccacctcggcttcccaaagtgctgggattacaggcgtgagccaccgtacccggccaacatgtttggctttaagaggaactgccatacccgtcttcccaggtggggaccagcccagtcagcagcaggaacacctattccctcttgactcttcccgttatctcctgccactcaggtgactggggtggctcctcccactcaacgcccctccctcctcctcctccagccgaggcctccgcccgcaccccccaccacccaactcagctcgtcataactcacaggccgggtccagggtgccaggaatgccactgaggctggcagagtcctaaaagggagtggcaggtgctgctccacaaggacggttgtccaccctcaatgagggctgcagggcaactgctgactgtctggcagccagaggacagggacaggcagccaccctcttgccatgaccacacctgggtctccctcaatgtggctcccgaggggccgttgaacacagtgttgagaactgctgagaaaatcacaccaaagacgaactacccacagatgccagtcaccactccagggtgacgagaaagagaacacacaggcggcagcgtgacaaaatgagtcccagcatgctacatctggtttcgggttttattttagaatttataaaattccagtgtcatccatattcatgagcctttacacatgtttgcatataatctccaaattccaaagttaaggccaagggatggattgtagctatggaaacagatgatatggaagacatccaacaaggaggaaaagcacacgcacgcctcacccctgcctcatctctgcccagggctgtcctgacagcacagacgcttcagggagacaggcctggggacagtcatgtcatcacccttgcaacaaccacccaaaggaaaagagagcgctgaacagtttaggaaagggctcgcgtctaagacatcaagcgacatacagagatgtgcaaaacttggtgagaattaaaattgacctttgggagagggtaggggcaggatgttttatgacactgtagaaaagacaggaggaaccygctgcgatggagattgsggggagctggaagcaagcagccaacaggacagagttccagaactcatgcagatggggaagaggtgacagcccttccccactggcctcccccgtggaggtggagtagacagatcccgggaaaggcaggaaaagggccttgctttctttccctgtttcctaagccgtggtcacccyagcctatgaagctggaagctatattccttccaatcccaatttaccattcctgtaaacaggcccattcagggctgcctgagcaaatggggacttgccgaggcagctgcaactagacttgggctaagccgtctgggtctactcaagaattcgmgtctgaagatgaccaagcttgagttattcaactgagagtgaggtgtcaaggcggaagcgactgtccccagggaagggctgtgagatggatgggcgtgagtcagcttttccaaaactcaagtacctgggacaggacaactcrctagcagctcagtcacctccgtggcggacacagataaggatgttaagaccagaaaaccagagactagggccccgtcctcagccctcacagcatgacacagatgcctccctcggagagcagggtctctcggcatccagcggcgtggtctgcattctgctctacctcatgctctaggccccatgccatcgtctcggccctagaccrtgaaaactgccagtcacccgggacctgctcctaggggctggcctgcacagccggatggcctgtgggcggggtggaagtgcccactcccactccagatgggcctgctggccactgacccacctgtgctgagggagagcgccagcctccagcttaggtacacggcgcccacccccagctccacgggaaacccataaccaccagaaacatctcaatcaagagacgggtgtgtggggtggcactaactgcacagagaccactccacgccggctgaggtagaaagaaggcaactgaacacacagcagctagggcaggggcagggaggggctgcaggtggtgtgaagaagagcccagctgtcatctaaggcaaactgcccccactgaggacaagcgtaaggccctacctcccccaacctgtgcgcatctcaatcacagcagacactgtgacggccacaggggacccagatggtgcctaccaccttgcctccaggctccactcaccagacctcaggctgagggtctggcagtggaggtaggggcagggacccttggtgctttcagaccccacggcaggtaaaatcaggactgcctgagaacccgtcaccctctgcctctcaggtcaccccccagctccaggaacctgcctcctgctgtccattgccaggtcttccttgcaccctgacacctgtgctgaggcgctctggcagctggaggaggctgattgcactccacaaacaggactgtctggaccaagggaaactggcaggagggaggtgggaaaggaagagggcaaacgtttggcttttataaagtcaaggacgtttatttcctgaggtcatgacacaggaagtggaatcctagccacggctgcggagctctcgtgatgaaggccagagtgctgactgacatgccgggtggaccaggagctggagtctgttatcttagcacgaatgctcatgaccttggtttagtgttaaacagtggagcaggtcctgagcgggcacggccaggcctggaggagcggccgcacacacagccaggcgctaggctccctgcgggacctcgggaagggggaagagcgtcaacaatttacggagggtccagccgctgggtcagattgagacaaaccattgtgtggttgggtttgggtcagcaggctggagagggttctgttctttttgatcattatcgtttggggccccaagggagggtcttgggagccacctgagccccaaagctgggaaattcctcagagctgctcatgtcaggagcctgtgcagagagaggacacggcttcaggaggggatgctccccaactcgcaagcagcttccgacgcagttgccaccctcaggacaccaagcccgcctgcccgcccaccctccctgggacccaggagggcagaagcccgcatctgaccttctcactgctgctggcggtccagggtgcgtcccgcaccacaaagcctctggaaggtgccttggcctcttcgtgtgctgggggtttcatgtatacctgcagcgcctcactgtccaccacgtcagctagctgcaggcagaagacaggaagacagggtcagtctgcccagcacccccagcatcccgcccgcctgctcacccctgcacctcgcctgcctctggaaacacaagtgccaccttgtcccctgaagctcctggctgggcctcaggccggtggacgtgccagggcgcctcagggctccaaggcccacagagactcacgtattcctcctccagattgaggatgtggtcgatggcttcctccacattctctgggagccccgtcacagtgacgcagttggggtctggggctccgctctgtgggaagcgaatgtccacctggaaggggtgtacaacgtcagatgaggggactccaagcgaggaaaagggttaaaattatgtgtcaatttctagtgaagcattttctgagttagcaaacgttttaaaatctggtttcagagttgttctgaagtcagtcagcctcatcaccacaccaagttaggtgtatctcaggagcaccttgttcccagcagacagagggccgcagcacgtactgtgcgctcttgcatgaaattcccacccacagaggacgagctcgccaggcagctgtcaaggagatgccctcctaatggccaccgtggcagtgcagcctcacacaggccgtcgcctgcactgacccgtggtgtccatgaggacagttccactgccagccctggggttgtggcctcatcatcttgaggggaaggccatgccctgctctttcttctggccagccaggtgcccccggtgagagaggattctcacccactgtgcttccagccggctcaccttgaattcgtccatgattttgcgaatggctttgccgcgggcaccaatgatgcgggcgtgaacgcggtggtccagcgggacgtcctcagaaaccatctgctcaagttcacccacaattctcagtatagcatccctggcagcttctgtgttcttttcgtaccctgtgatggtaatttggtcctggggctaaaaaaggagaatgtagtcagaaaaggggatgccttactgggattcccgtcaggggcaagagccggcccccactgctgaggaaaacagctcaggagagaagatggaaagcaacgtcacggctgatttaaaacaagaggttaacaatgtccactcagggccgggcacggtggctcacgcctgtaatcccagcactttgggaggccgaggcaggcggatcacctgaggtccggaattcgtgaccagcctgaccaacatggagaaaccccgcctctactaaaaatacaatattagccgggcgtggtggtgcacgcctgtaatcccagctactcccggggctgaggcacgagaattgcttgaacccgggaggcggaggttgctgtgagccgagattgcgccactgcactccagcctgggcaacagagcaaaactccatctcaaaaaaaaaaaaacaaaaaaaaaacaccccacaaaaaacctatgtccactcagcttccatctcttcccaaactctacccaaaagacagtgaattacagaacgaaaaaggacatttgtcctcaaagacaaaggagagacactaacaggcaagaattctggactcaaggacagcggggcaaagacaaagccccaagcccctcagcttcctgcttctttgcccacgtgggccacagtctggaggcatctttgtgctggaggctggaggctggctggcattcctcagcgagcccctccctcactcagagatcccacctgctcaggccttccttgggccacacaaatggacaggagacaccataccagacttgggatagcagacaagcagaccaagcagacagttcagggcatagagaaggaaacgtggtaacaaaacacctgtagcccacaatcggcgaaaacaacatgtccacaacacaaaaaccaccatgcaacaggactagaggacggggacaaatcacaaccatcacgcaacaggactagaggacagggacaaatcacaacacggaaccatcatcacgcaacaggactagaggacagggacaaatgcctggaaaggaaatgagcagaaagacctaacctagagacaacagagcagcagcccaagaagcttctgtccagattgaagcaaaatgccagagtgggaggcagcagccccacccaccgtggcccagcagagctgacagcctcaggcaccacccgcgtgctgccaggtacagaacctcaagatcggaagcacagctcacaggaaaaagctgcctgtgaagaaatgactgctccaccccacttggctcatggtgtattagatggaatagtctaattgctaaacaatgactttttttttttttttttaaagacagagtctcactctgtcgcccaggctggagtgcaatggcatgatctcagctcactgcagcctccgcctcctgcgttcaagcgattctcacgtctcagtctcccgagtagctgggattacaggtgcacgcgaccacgcctggctaattttcatatttttagtagagacaggctttcgccatgttggtcaggttggccttgaactcctgacctcaggggatccacccgcctcggcctccaaaagtgttgggattacaggcgtgagccactggtgactcacctataatgacttttaagattgataattatatagaatagtagagggaaataaaaggcaataagggtgaggggcttaaaagagctaaactcttgggctgggagcggtggctcacagctgtagtcccagctacttgggaggttgaggcacgagaatcacttcaacccgggaggcagaggttacagtgagccgagatcgcgccactgcactccacctggggcaacaagacaaagactatctctctcaaaaaaaagaactaaactctcaagatcaagactaaaaattaaaaaatgtatgtggggagggaagaggacgtgggagctggaggaggcagggtgcaggagggccctcctggcctggctggtgtgtgtgtgactcaaagatccaaaagggaacaagaagctggggaggaagaaggggaaggggaaggggaagcagcggaaaaccctgggcggcacatccacagtgggagcgaggggcgtggaggggctctgctgccagggggtttgctgtttctggaaaccagcacaactgtggccaccaaggcttgctagtctcccactgtgggcaaagctgtgctggacacgcctaggaagcagacaccccagcaggatgccagagccaggaaagaccaagcctgggaagtgtgtgcaagagggggtgttgggtgaggctgccctgcatgccaggtggcagggcccagagaggggatggggctgcctttcattttgttctgagtgaagcaggaggccatgagggccagtggcaggggggtggcactgcaatttggaggaagtaacaacaagagtttactaaggaccatctggcaagcacaacggtgtttgcagctggggctgcagagaaatgtccacctgaccccaagaggcccaggtgacaggtgaatgagagcccttgggagcctcagagaggcccgggtgacaggtgaatgagctacacctggaggcgccactgatcaaggacccagctggagctcctgctcattttctggaaggagacgcaggagaaaatgctccaggccccagatgatacatagtgccagagacctcacccatctggcaagtaccgagacacagcccaaacctcaagccagaattaggtcctgagagacttgccactctcaacttggccctcgaacccccatctaggcacatctggttactgctcccaagtcacaggaaaggtcaacaagcacctctgcccccgacacgctccaaccgaggctctcacctggttcccatcgtccttatcaggaaactggatgttcacgtcatgctccaaccggatttgggtaattactgccccctttctcccgataatcttgggatggtatttggggtctacagtgacactcagcttaaaactccttaaagcctacaaatgaaaggagcaagaatgaggcaaagattgagctgatccaccctgtgactccattccccttccaccctggtcataggacactggagatgctgcagtgttctgtaacccgtggtccggaatggtccgccatctctctggtccgacctctgccaccttccattatctgctaataatgagaaccagggaacttggctgctccacaaggaggtctataaatccttcaaaagagggcttgggaccacttgcgaggatcgtgctcaggaactgacagagctaggcagtgagtcacgagcttggggccccgctctcctcatttgtcaaacagggatctgatggatacgcacagaaatgctctggatctttttaggactggggcagatgcagaccaagaagagggggcagccacagcccctgaacacccatggccaaaggctacaggtatgacctggctgcaggagacaacccagagtccacgcaggggtacactgacaccatgtgaggttcacgagctccaccccattcaccagactcaacgtgctcacgggaggagtggaaagccaacccccttagcaaaccagcaccccagcacagtctgctccaagttccagaacccctgctcctgtctgcagcactctgctcacacaatcctccaaatgtcagccctgccagaggctgggcgtctgcagcgctccgctcatacaatccttcaaacgtcagccttgccagaggttgggggggtttcatccctgcttaccaggaagtcattcgccctttgaccaccctgtgctagaggttagtgggggtccccgatgctcgtcctcactgcatagcacatgcttgggggcctctcgcaaccttgacctttcttgtaggtctgaggtaccactctgatttggttttgagagaaactgcaaatttacacggaagtccaactttgtcacttttttatgaaaaagagaaaggtgccatgctcttggctagttccacagcaagacccctggatgctgactgcgtcctggcactgcctgcatctcacctccagccagatgtcgctgggatgctgggatcctgaagaacttccctagattctgacatgtgcccaaagctgagcaccatggctctgggcagtgccccggccacctcctgctcacccggtcctcctgctcggcctgtagctccttcacacgctccagcagtccagccttggcccggtccaaatttgcagcgaggcccgtgatggcgatgatgtcagactgcagctcaggtgccgggacatgtatgttcacctacgtgaagagggggctgacttgacgttcaggaccccagagaacaggaaagagtccattggccctgggacccagaagtggtgagagggaaggccacccgccgtgaagggaagtcagtgcccagtccgagcaggaggaggcagagtcaacaggaagttgagaaaggacactggcactcgg

SEQ ID NO: 5627 - DNA, 97223 bp, Homo sapiens
  misc_feature (1)...(97223): n = A,T,C or G, or insertion/deletion polymorphism (see Tables 1-2)
aatttactgatcaaaatacctttatgagaagtacagaatccggttgagaagtgtggtaccccagacaagtagagagctgagaaaagctgcactgagatggatcctacattcctgggtctgggagtgggcctttcccagagataccatcctccagcagtaagagacctccaatagtcgggtctcagacaggttccagctaagagtaaaatcccagatcaatggtgaaaaggagtttaagaatggatgctgaagccaggcatggtggcatgtgtctgtagtcccagctacttgggaagttgacaggggaaaatagtttaagcccaggaggttgaggctgcagtgagctatgatcataccactgcactccagactgggcaacagagcaaaactctgtctcaaaaagaaaaacgaagcctgtgcctagtcaacattgaagcaagaatgcagaagttgcacagggtgagatagggatgagcagggtggaggggtggtaaacacaaaggaattgcaataagaaatcaaacaactatctgattttttaaaattatgttgagatatttggggaaaatgatagatgcatagaaaactaatcaaacgaaaaataattccaagataaaagtatataaaagtaacattataaaataataaacgcatatagaatttttattaaaaaatcaaatgattgtgagtctatttctggttctctattctgctccatggatctgtttgtcaattctcatgctagcaccacatagtcttgattactgtcacttacaagtcttgaaatcaagtagcataaatcctccagcattgattcatttatttttctttttgagacagggttgcactctgttacccaggctggagtgcagtggcatgatcatgcagtgatcaggttcactgcagcctcaacctcctgagctcaagcaatcctcccaccttagtctcctgagtagctgggcctacagatgcatgccaccacagcactgggatttttaaaaactctccaggtgattctaatgtgagccaaattttctagactcagatttctctgtcactatcttcaggcctatacagttaactggttagtatactagatcctacttctttattgtttctgaatcctcttcctctccagctccatcactcatgcattaaggacttcaccaatttctcaactggctctacactacttctagaaaaaaaattctaagtccttactgtggctaaaatcacgctttgtgattaggctttctgatacttcatccaacactctcccctcaaagtaccttaaacttcagctatgataccatatttgatgttcttcacatgttttaaacttctcatgcctccaatgcctttcctgccatccagcctaaaacaccctttccttttgttattggttgtcattttcttcctctcattcaacatttagcctggcatcatctgctgctctctgtcttgaccaccttgtctggaagaggtatccttcccatgttcccatgcccttctgcacatgccttcatcacaggtgttaaggaactgactgtattgtcattgtctgtctcttgttgagcacccagctaacctgaaagcttcttgaaggctgagactgtgtgtttccgtctcttatccctagtgcctagcaatgtacttgcttatacgaggtacctaatatttttattaagtgaatgaaatctgggcttggatctgcaccattatttgggacagattctttaatctctcagaacattctattttcttatacacactggaaataacacccatgacaaaaggtagacttaagtgagctgatactgtaaataaagtccactgcgtgggcctgggacatggtatgcgctcaataaatactggtccttttccctctctccgcctgccatcagacctttccgggatacccttcctacgcacacttccttaactgaccactaggtggtgctagcctctggcttgacattcagttccagagctacccaattaacgccccagcccaggccctgctatactcagaaaaggcgggtattttgtaatttgctgagcgacccgaaaaaagagatgccctttacccacactagcttctttgccctcatcaccattccaggtatcaatcatgaatttcagagaattcctccatgattccctactattatggttataatctcaacccaaggatttgaagatgcctcttaagaacagatgtggggaggaagagaaggcactgaggcagagaggattaaacaatgaatgctataagagaaatagagggaagaagatgcttgaagtcacatcctgttccaggaaaggcaactctagtcctaacattcctttcaccaatcaagagcctctcacgctgggtggaaacgaagaagaaaaagacatggtccctgccctcaaggagtatatagtctagtggtggatacagagcccacaaaataaagtgctaaactctggatactgaagctttcctgaatacaagtttggaacaggagagataggcagagcgagaataacaggagggcttttctgaggagggtagaggagcaggggaactgtatcattaatggctcagatagaaatatgcattctcagcagggtgaggtggctcacacctgtaatcmcagcactttgggaggccaaggtgcatggatcacctgaggtcaggagtttaagaccagcctggccaacatggagaaatcccatctctactaaaaacacaaaaatgagccaggcatggtggtgggtgcctgtaatctcaactattcgggaggctgaggcaggagaatcgcttgaacctgggaggtggaggttgcagtgagctgagatcacaccactgcactccagcctgggcaacaagagtgcaactccatctcaaaaaaaaaaaagaaagaaagaaagaaagaaagacataaatatgcattctctcaccttacagacataccctcagcagttcacctgctggaaataacccaagtgcccaacaatcccaacaaactgtggaacatccaagcaaggagattccaagtagccaagatcaaagggtgagctaaatgcgttcatacggtatggaaagggatcaagctaagttaattgaaaaaaaggcaagttacagaacactatatatcatatgagtttctttatagttttaaaggatattcacttatatttgtatgttactgttttatttatttatttatttgagacagggtctccctctgttgctcaggctggagtgcagtggcacgatctcggctcaccacaacctccacctcctgggttcaagcgattctcgtgcctcagcctccccagtagctgggattacaggtatgcgtcacgatacgtggctcatttttgtatttttagtagatatggggttccgccatgttggccagtgtggtctcgaactcctgaaaagtgatcctcccaccttcgtctcccaaagtgttgggattacaggcatgagccaccacgcctggcctgtatgttactgttttaaaaactctcctggccgggcacggtggctcacgcctgtaatcccagcactttgggaggctgaggaggccagatcacgtggtcagaagttcgagaccagcctagccaacatcgtgaaaccccatctctaccaaaaatacaaaaaaaattagctgggtatagtggcgtgtgcctgtaatcccagctacttgggaggtcaaggcagaagaatcgccgaacccgggaggcagaggttgtagtgagccgagattaggccactgcactccaacctgggcaacggggcaagactccgtcttgggcgggggggaaacctctgctggtaggggagacctgaagaactgttagtagaagttactctgagggtgcagctgaaaaatgggggtgtggagagcatcaagtttccttttactttttaccttcctgtactttttttaaccactaggtattatcttttctttctttcttttttttttaacaatataaagttaataaaaatacacattcacattcaggagacagcaggggatgggaggttgcaagtgagaagtgcatgctgactgaggccaggttttggaaagccatgactgaagaggagttcacatttgactggtctatagacacccactagaggttccccagcaaggaagagacaccgggaaagcagtttttggaagattcacctgacagatgggtagggggagggaggaaagccccttcaagccctcaggctacatgtggttgctccagataccgttttcctctcaaagctgtcaagctgtctaaagtctgtttcgacctgatttcacttggatcccaatactgggaggggccctgggaggaacctcgtaggcatttggtgagtccgcatagtgcgtctcacattgtgttgggccatgggagctggataaaaggagaaataagaccccgttcctgcctggagcaactctctggcagtggaaatggaggaaatctgagatatacttcagaggaaaaaaatgacaagcctggagcacaggctggcaagattggatataggaaggaaaggcccccttgagttggcataaagtctgaggtttctagcccaggagactaaaggcaggtggccaccgcgctgagcaaagccggctggaagaagctaaaggttgagctcactgtcattaggaggcaagtccttcgtgctgctcctgtttctgccaaggacagactggagtggggacttttccgtaactagaacgtaaaagggggaacagtccctcctctccagcgtcaatttttggcagccgacgtcgtctgccccgctccttgaactctgacatgcagacacctagaaagtcagacactaaggtaacagccataaaacgccgyccagaagggggcagtgaccaaaagcacgttcactggcccctgggaaccgcctggcgcctgccttctgcaaagtatcattcccgtgtgggctgagcctggggacaaaggtccggcgctcagcagacacctccttggaacccgaggcctggaaacgaaggtccagagtccctcatcttattccaaatcctggcgctcggaatctaaaaccctaacttgatggcaagccagtcagaaggtattaaaaaaaaaaaaaaaaaaaaaaacagaaaaataaatgagccccgacttcttgggcgaaagggggtggcctttcctcaaccccacccgctggtgactcacctccctccaaaccagggcctgcccctcccgcgcctagggctgggcgagcagggcgggcgggtactaaggtgggctccatccccgagccccacgcgggcggacaagctccggcgtgtcccctcgggtgtccctgtttactccgagcccgggagcgaggtgggggcgggtcctcgcggtccctccccaaccccgccccctccttcgcaggccccaatcccagtccggtcttccaaagtctccaaatcaaagctcagcctttccctgcaccttccccgcggactggcggtccctgtccccaccccgggcagaggaggcaccttcagggttcccctagaaaatcgagcctcggcccagaccactgagtcccggacgcccccggagggagcctgaaatcctagagtatgacactgagtttcaaaggggagccgctcagctctccgcccactgcccaatcccaccctcgaccccttctgctctctggagcaccagggaggagggcccagccaggggagagggcgccccaggccccaaactagccagcgagtccccgggaccctcactcttggaccgctttccagaactccgaaccctgtcgcgggtccgcgtcgccctcccccgggcagcgcgtcaaatcggcgcatgcgcactcactggattgccgcgtagctctttctccccccacccaccaaccttttttctttccccgccccttccctccctccctcctcaacccgtcccctccctctcccccatcagcccccccctcggcacttcagtccggggaacagcggtgcgagctccaggcccatgcactgaggaggcggaaacaaggggagcccccagagctccatcaagccccctccaaaggctcccctacccggtccacgccccccaccccccctccccgcctcctcccaattgtgcatttttgcagccggaggcggctccgagatggggctgtgagcttcgcccggggagggggaaagagcagcgaggagtgaagcgggggggtggggtgaagggtttggatttcggggcagggggcgcacccccgtcagcaggccctccccaaggggctcggaactctacctcttcacccacgcccctggtgcgctttgccgaaggaaagaataagaacagagaaggaggagggggaaaggaggaaaagggggaccccccaactggggggggtgaaggagagaagtagcaggaccagaggggaaggggctgctgcttgcatcagcccacaccatgctgaccccgccgttgctcctgctgctgcccctgctctcagctctggtcgcggcggctatcgacggtgagtgagattccgcgtcccccttggacccctgggggcaccctctccccagcccccactcctgcatacggatggggaagggagacgcgggagggggtgccttttgttatcccagtccagctgacacagcagcggcccgactgggggcggggatggggtccgatttgggggatgggggccctgggcaaatgatgcttccggggccccccagcacaaacaaagaccagaggcctgggtagagagaagagggctccccatttttctgatcctggggaggagaggccttcttttcctatctctgttcggggagggcctccgcctcccctacatcctcacaaccccccaccccccatctgaattgtgaaggaatccggatttgcaatgttcggctgcaaaagggggtgggggtggggggggtggcttttgcactggcctctgtagctcgaaaggggagccaggccaggggtaccctgccgggcagagggcaggcaggcccgggaaggctgtgggtggggagagggagggccccctgcttgggcgtggaatcgaccccagagccccggctggaggcctgggtgctgaagtaggctcttccccctctcagggcctctgtcagtagcctggggtagggctgtgttggggggcagagagggggagctcgccatactatgtgactttgaattttccttcttaattcctgggagctttgagatgaaaaaacgtcagatgtcatcactggggaaggggactggagaatggcctggaatgctggggtaggagggtgggggaggctgccttcttcctgacttctggcttcatcacagtttggattggaaggagagttggaggttggatggggattatggctgtgcccccacactcctttagtaaatctgtttattccctgcacccctccaagcccaaaaccccatacacacacactttgtatattgcagagttaggcttaggctagaactgcatccttttggggaaatggggtgcctctcttccctttttttgtcagctgtttttttctcctacttgtgagtcactggttcaagtcttgcccaagctttaagcattaagctggggtcatggggttgggctgggctaggtccctgatttgagaaggggtgggatctcatcccctcctgtcatcttagccctctcatccaaagacaaaactgggctggataccatcatacaccccctcctctgtcttgccagattgggattgggaaagtttttctctgaaaccagattatctccctccctctccctaacttgcttcaattgggggaggagacttacagggtcaggaagcagctgtgtccccaaaaaacatatttagtgtccctcagttgtgccatcttggggactctctaccccccacccccaccccaccaattagctgccccggaggaggagaggggcttttcctgaatatcctccagatgccgcacagccggcttctgcctataactcctgtcattatcatgtgtttttctcttgttctcagccctgtgaggtgagaagggaaatcgaggcagggagattggggttgcagccgcttctgggaggaatagaaaaaaaatttgagagagagagagacccatcaggagccccttgaaggagggtggctagagttaggcagaagcaagagggtttctgtggagagcagggaaggtcaggaagggaccccagatagcatcactcccagggctctaaaggagttctatttgccacaccaagttagtggaagagagagactggacatgttctccttaactatctccctaccctttcttaaaatgttcacccacgccccctctgtatctccagctcagatcaaactatccaaagccccaggagaggacccctccccaaacacacaccaatatttctgccttgggagtgggaatataaataatcagctccaccccactcttgggtacagggtggtgagaaaggggaattgcatagaaatgtaagttcaactctatccagaggcagcctaggggatcccttatccctaacccctgccctcttgcctcagggtccatcaacattgaactttcttgtttactttccagagaatggagatgacccagctcacctgacttagtatgttaccttcctcctgctatcacagccttgctgctttctctccagggcagcaatcctaggggctttcccacctcttctgctttctcttctatgcctgaaactgcctctggggtcccctgccctwtggggagtaacgtcactccccactagcgacaaaattgagtgtacctgctgctggagaggttgcagaaagatggggtggagaatgggactattgagggccctgctgagattggggaacattttctagtggggagggcacccccagacaaatacagctcacagaataaggctgacttcctccctccctttttcctgaccttcctccacacacccccttgagccggcatattaccagttactagagtaggtacagtggaagtgagttatgaagctggggtgttagcttcctggatccctgagagaaagttctaaactcctttctccctgatcagactcacatcctaaacgtctccctttgcctcgttgtcttttaaagcaagaatgtgtaagaaattcattttggggttggagggatattttgatgtttagggctgcttcactagacatctttttcttctgatcttgttctctctcctctcttcattttctcaaccacccttccaccactgagcctcccaaaggatgacagcccaggtcctggccagagtcagttcctgtccagatgcccccattcttcaaaaccccttccttaccttttgggaagcccttccttactcaagtctatctctctttcctcctgctgcagtgtgagcccttgcacatcagaacccccaagcctaggtttattcccrcccagtactctcttctcagggtcctcctcactcctcagactctttacctttcaggtcctccagctctgcgtgtgggctcattgctcttggggcatctgggtgcagctgaatggtactgcaggaaggcccctgacttggtagtgctgggtatgagcgatagagaacctgcctccctcttctgtcccagatttcagcctggttagcaggatcctgcattgtttggagaaggaagcagttggctttggagtgtttccggtgcaatggcctcaggcaccaatataaaccctccctgggaaagaggtgaggggtatatgtggagagttgtccctcttgctcccctaggggagatgaaagcctctccctctcccaccaggccttagcttccctggctgaagagctccattttcctccctcctttctaccctcctgactccaggggtggtagtggtccctattctgggtctcccttgagtcaggcactgcctagggccgagactctgtctctccaagataggacagatcttgctcccaccctactctaggctcagcggggtagtcattctctgggttcatcccaggacaactgtgtcatccccttggcaatctctggactgagcccccttcctggcttttctggctgtctgtctgtctttctgtctgtctgtcattagtgtgcgctgtcttggctttttagaacctctctgtctctcaccctctcagttcatctcttactgccgaacctttgtgacattctctgccctgctttctgcgtctctgtcacttgtcttatttttctctgcctgtctccatttacccccatccaggcctcttggtatcccaaaagcttcttgggagcaagagtctctctgggctttcccactcaccccctrgctccctcccctctgttttggctatttttcccccttcctggccagacccagtgtccagttcagcaccaaaagtttcctctccactttcctccgacttcctctttcttcttccccctccactaatttggggaatgggttttggagagaatgtttctggaagaaaggaacttgataccctttgtgggctaagagggagaaaggaggtatttcagaaggaaggagggaggttagacttctggcagaacttcctcctgaccaggagcctaagaactggagaaagatgtaaggagtgagtcaagaacttggagcttttactctggtgagcataagctgtgtgtgtggctggggtggggggagaaggagaggaggcttagaaatgcctggtgagtgatatggtgacctctggaggccttctgggggtctggcttttatttgtggggaaaggaaaagctggtgggggaggtcacgggtcaggctaatgtcctgctgcatcaatattgactcagaatggaagcggagacccttcccctcccctggctgtccaagccaccctgtctgtctgtctgtccaggccgcaaagcagaggcccagactcaggaatgacaaaaatgtgtctgagcctcaggaaagagccacygggcaacacccaaaatacaaaaaattcagtgaaaacctctcggtttgggtttgggaggcccttgctgccccacccccataaggtcgaaaattcagattcctgcaggctctgtccccgcgccgcccccccaccccaccccccgcaccttgagcatcctcctcccactctgttcccttagctatatcatgtggttccctttagagaacccccctctcacctagctcagaggggagcctatctctccttctgctgtgtccactcttaaaaagggccccaagagtccctgtcatgcttttgcagtccctgagtctccttgtcctttaagaagcacctctaaggtcttagctctcttccttgctctcgctccctcaagggggtatcaaaggatgggttcccctcctctggagaagactccttcagggttggacttcgctgtcaccctctctggccaggcattctcaccccacttccccacccccaaggtcccagaatgggacacagaatgacagccaagggtcaagcagggcagtggggtctgtgttgtgtctggacgcacacccaactctacacctsctgccctggctccagcttggtggccctggggaccgtggctgggctgggtgcctgggtttgggggggtggggcagggtgttggccaagttagcatggcagtcacattcatcttcaggcaaagccgagaacagacggcccctgtgtcctggtgttcttcctccaaactcgctctctctccttcctctctagatctctccttcttcttctcctgcctgtcttccccttcttctgtcccattcttgctcctctctgtctcccctatgcccttccctcctctctgaggagccctgaaggccaccccttaaaatcctctccccactgccagggccagagaacgacarcgttctccctgcaatttcccttccttgttttttgtttttgttttgttttgtttttgagacacagtctcactccatcacccagactgaaatgcaatggcgtgatctctgctcactgcgacctccgcctcctgctaatttttgtatttttagtagagacagggtttcaccatgttgcccaggctggtctcaaactcttgacctcaagtgatccgcccatctccgcctccacctcccaaagtgctggtactacagacgggagccactgcgcccatctggtttcctttctttctttcttttttttttcttttgagatggaatctcgctctgttgcccaggctggagtgcagtggcgcgatctcagttcactgcaagctccgcctcccctggttcacgccattctcctgcctcagcctcctgagtagctgggactacaggcgcctgccaccacgcccagctaatttttcatatttttagtagagacrgggtttcaccgcgttagccaggatggtctcgatctcctgacatcatgatctgcctgcttcggcctcccaaagtactgggattacaggcatgagccaccatgcccggcctggtttcctttcttaacccggctgcatcccatgacctatgaggaaaccacctgctcagttaccagtcaccctgtgcctcagctcccccatgtgtgagaggggggccgcaagggcacccacctcacagggttatagtatctaagtgagttaatagtcaccgtatttccaatcagtggctggtggttagcaaggtgaaaaaggttagctcccatcggtcagggagacctccgggttctctcatgcgggccaggaggcggggaaggccttagttgcttttgaccttagggcaatgttgttctctcatctaaactgcaggccacaaaggtgggttttctgggtgctggattcagacacagaaggctctgctgaggggagtggggttggctttccctctaagcagattataagggtcctaccccgctcccaactcagctctctcccagctctgagtgaggcttcccttggctgtgtagactgtcccaaagtagtttatttgtttctttctkccctctccccctgaaggaaatcaaagacaggcctcagccttctcgctccagattcctgggcccttcaacaccagccctgacaggaagttctttcacgtatctctctgcaatccttgtgctggccaggccctcgggagatgtggccccctcccccggtgctgctgtgggataggggcctgggccctcctcttcctttcacttgtcccatcccccatcccctccctgcaagagcacatctggtttgtgaatctctctcattccagcttttggagtttgccagctgctgtttcctctgtggagttcaggccaaaaatgggggtgggggacagcgggggggactcagtgagggctaaaggagggggcaccatggctgggatgtggaatggaggggaggttaggtgaccacccggtgacctcaggccgtggctgtgcgctctgcccctgggaggagcagggcatggaccaagtcccaggtgggtggcacgggggtctgtttctgggctccaaacatctcatctgcctctgagtcccattccagcccccctcttccccctcagccggccacggctggtcaggggaagcggacggttctccggcatgctaactaggctggcgggctgtgtttcccgggaagacctcacagctggcccagtggggcaatgaactcagcattatccacctcctcaaggggcctttattccaggctcagggtgggggccaggggagggaggctgaagggggagcctggctaggccatccttgatgtgtttcctgaactcggtcattttggccaggggcctgagtgccgtctcccctgccagcggtgggggttaggagggaagacatctcagtgaggctcccatcagactccctccctcctaagagccccccccccccgccattttccttatacttctgtctctgccctgcatttgcattagttgggtacagctgtcttctcaggcgactctggctcctgcagggcagagggtcatctcaccctccttggcaccctgatgcctagtgcagtgcctggcatagagctggmcttcagtgtgtgccagcagaatagaaatgtgatggcacagtctgaggaaaagccacgaaaggccaggagactgggagctcagccttgggtgggggagaaggggtgggtgactgttcctcctgtggaggatgtggtgatagaggttgggaggagtgggaattcggaggactggtgtggatttcactggttcagagcttggagtcagcttagctggttttgtcacttgccagctatttgaccctggccaagtcacctggctcaatttcttcatctgtgaaatggtggtattagttgtccctatttgtcatactgtggagggaattaaataygatgatacatggaaaaaactgctttaccacagttcctggcacatactgagcccacaataagagttagttgtcagccgggtgcggtggctcacgcctgtaatcccagcactttgggaggctgagatggatgtatcagatgaggtygggagttcgagaccagcctgaccaacatggagaaaccccgtctctactaaaaatacaaaattagccatgcgtggtggcgcatgcctgtaatcccagctactctggaggctgaggcagaagaatcacttgaacccgggaggcaggggttgcagtgagccaagatcgtgccattgcactccagcctgggcaacaagagcaaaactctgtctcaaaaaaaaaaaaaaaacaacagagttagttgtcaccattcttaattcctccttgggggatgagggaagagaatggggtaggagtggaagaagcctgattggggtgggagggtagggccaagaggtcctgaatatagtagctaactagttggactggactgaaaccagttcctagagttcatttcagccatccccctgcctctgctccccaattctgatatcttgaaaatctttaggtgcttcttaactctaaggatgtctactgaaagtctccctgaggtctaaccaagggaggctgtgtctttagagaatggagaggacaaggcaggtggatcacctgaggtcaggagtttgagaccagcatggccaacatggtgaaaccccgtctctactaaaaatacaaaaactagctggacatggtgatgcatgtctgtagttccagccactggggaggccgaggcaggagaatcgcctgggcccaggaggtggaggttgcggtgagctgagattgtgccactgcactccagcctgggggacagagtgagaccttgtctcaaaaaaaaaaaaaatagggaatggaaatggaagcaaggctctctaccctgcccrttcctgcccagccttgccctcctgtgcctctgctaataccatctccaactactactgtgtgtgccaagggcatccctccccactgctcccatctgggggcctagtgattaggggttgggaaggatggggtgatgggtcaggggaccaggagtgtcccagaaggcagggaagcagagaggttagataagaccagctcggggcctctagtagtaggagttagaggaagacaaagagaaaacatgtcaaggcctaaatgcaccccccttcaccatcactctgtcatcaaagccagggggtgctggtgtctgatgagagtaaccaagaatagcaaaggctttgaccctgactcccaggaacaggcagcctagaggacttggaggggtgcagtaaaatgtgcttctggatcctccccacccccaccgcagatacacagtgtctaggaactacccaaagccaccccctgacacccccaggcacatagaccatggctgagggtctgggccagatggagactgatgctagggaaggaagagcagtactaggggactttgggttcacagagttggcctccatccttcatttatatccccttttctttccttgccctagcccctaagacttgcagccccaagcagtttgcctgcagagatcaaataacctgtatctcaaagggctggcggtgcgacggtgagagggactgcccagacggatctgacgaggcccctgagatttgtaagtaccttttctggattcttctccccaaacccttaacttatccctcttcctttggcagatgtttgggaggaggacagctgatccctagcctgatgtggaccttgctcagtgattgtatttgtccatgacacagctaaaactgtcctttacaccccttcaaaatgcttggcatggtgcctgttgggcttagaaatggcacctcagatttctccctcaagtgctgcaccccaagacagtgttctctgggctgacagctttgctagaagatggcccggcctccctttccttccagctcttcccttattccacctctcagcctccctgacccttgatgattggccccaggtcttgtcsgatcctcasatcttyctctgtsctttgsctcccaggccagaggccactggcacttgctcagccccataccagaagccccacccctgtgctcttcccgctacccccgccttcccctgcccccagtaagtggtgtaatcrgaggcagctgttttaactgggagaaaggtccccgcccagcttttgccctgccaagggaagtggagaacttgttggtgggaccccagagtcctgggtagctggcacagtcctggtggctccacytttagcctctcccctgcttggttaatctgggccagggtcaaagcgcccctgcattcctaggtccgtctctgttctctctcttgggctttatcctgctccagtcccatctggtgtcctgtccccacacccccacccgtaattatcaggggtaattttagggctggaaagggagccactagtgggctctgcctcacccctacactctgccctggagggtgggggccaggggtattcagcaagtatatctacggcatggtgcttcagcctggagtctcttcttgtctggtgccacctgcacccccacacttttgaccctgatgcttgggcgttagaagtaaagaaagccatgcagaagggtcagatctgcctctttttgttcattcttccttcaatttgctgtaaacctcaccttatatgcattaccactctgttcacactcataccccccggactcataacatcacacacagacccacctggcactgatgagcccacctcccacccaaaggcacaaacacattctcacagtaacacagagtcacactcaaatgtggatgcagaaacacactctatactcagagagatgtccccagacacacataccaacatagagacacacacacacaaacccagattgattcacatggaaactcactgaggccagatacaccagcatacagaaagacacacagatacactctcactacctaccgctgcatgctatacagccacaccatcagttgtgtaagcagactcccatccaggcacacatgggtcatagacactgtcactcacacaccgtgtccaggcttgggggccaatagacagtggtctctctatctcatccatcctcttgagcaacaaaggaagttgcagagatgatatgaccagttggccacaacctttttttttttctttttttgaaaggtgggatctcactatgttgccttggctgatctcaaactcctgacctcaagtgatcctcctgacacagcttcccagagttctgggactataggcgtgagccaccatgcctggccagaccacaacctttgattcttcccaaatccttctatcaggcttgttgctgtggggttggaagtctagaatagtgctgtccaatagaaatgtattgcaagccacatgtgctattttgaaattttcgagtagccacttaaaaaaggtaaaaatgaacagatgaaatgaatttgaatattttatccaatggatccaaaatattatcactttagtacagtgtattcatataaaacctttagagatcttttgcatttttctgacattaagtcatcaaaatccagtgtacattttatacttacagtttgaacttgccgcctttcaagtgcttgatagccacatgtgactgggctacgtattgggcagtgaaggtctagaagatttggcaccactcttggccctgggttctgcaacctgggagctatgggaaggagtttttctttatcattggartttctctgccatggaccctgcttccctcagctcatcaaaacctttttttttgtttgtttgttttgagacagatctcgctctgtcgcccacgctggagtgcagtggtgcaatctcagctcactgcaacttctgcctcctgggttcaagcgattctcctgcctcagcctcccgagtagctgggactacaggtgcatgccaccatgcctggctaattttttgcatttttagtagagacggggtttcaccatgttggccaggctcatcttgaactcctgacctcaagtgatctgcccgcctcagcctcccaaagtgctaggattataggtgtgagccatcactcccggcatcatcaaaaccttttactgacctcagtcgtcatcaaaaaccaggctgtcttcagcctgtctcctgagcatagaatgttgaggcactggggtccatrggaatggggcatttggagggtggactctactgaaggcctagtttctacctccacctgtttgcctacaggtgtgtggctactgtggggaatattgtaaaagagttccaggtggaagagtctaactagcccygaggcctcctgagatctgaaaccccagttttatctcccctcatccccagtgaacagctgaccagagagccaccatagccagcttgttcatgcccacccttctgtctgccctcaggtccacagagtaaggcccagcgatgccagccaaacgagcataactgcctgggtactgagctgtgtgttcccatgtcccgcctctgcaatggggtccaggactgcatggayggctcagatgaggggccccactgccgaggtaaggacttttccactctctactctcccgtctggatgcagcatattatcagcccaccttccgaggactgtcctggcaccttcagtggggatgaggccttgtcctggtcccctgcctagatttaccttcagagagcagatgaaattgatgtgccccttgggcctggagcttggtcagacagccctgtgggcctcagccgtgggctgtagcctgggcacttccctctggctatgtgttcttggactagtcactacctctctccaggtggcagtttttcttctgtaagatgagagatcagtgttttcatacttttttaaaaatagtatgatcctttcttcaaaaggttttctgcatgaaacctgagtgtgaacacagggaggagcagaggtgctgtgactaaagcttagccatctagtttagtccacctgccgcccctacgggtgccctagaaggcatcccccaggagctgcagatctttgaggggccctaaatctgccttggtccctccctctctgacagtctagactgtctgaggtggttgataggaaagccatccaggccgaggtgggaacattaggatgacaagtcagactgcttccagcctgtggctcaggtcaccagctctacagtctttcccccaaagggccctgtgggccatggagagtccggtcacagcgtgagcatttaagagtcgtgtccggggaggcagagcctcaagcctgcgtgttagggaatagtggcttctcccttctcttttcttcggggtctgggcccggagcaagaggccagctttgagaggccatgagcgtagccctaggggaggggctgtgcttgggtgtgggggcagtgtcctgtgctgtgtgcctgagaaaacatctgtctgtgggaggagactcatctggatcctgttcactaggagcagggaggatggagcaaaggagtttgtggaagatttttctccctttctttggttgattttgcatgttttcatctgaagctcctgggacgggatgcagaatgcgggcctgggggctgacttaaatgaccacgcgcaccccttcctctcgtgtggtgtgtgttcaagcttacttccttttgagtacctttacagtctctaaaacaacagagaacttcaaaaacctcaggtctgaatttccttctctgatattacagaaatcggcctcctcattccctcaccctatatccagaaaagttactcttttctaggttttccagagcaaatgatattttccccctctgtggagaaaggctgggcaggcagcatgaatggctctcgggtggaagtggggaggagaaagaatcgctggggcctggccccccatcccaactcttcctggcaggcttagtgcctctaaacgtcttagcatcttgggcggctctctctcctaggtgggggtggagtgggaagccagggtgtgaggccgctggacaaaggggtctttgtggccaggctgcctggccccacgcaaggccattaactgggtcgctggtctgggggggcaactgctctcccacctctcccccctcctgtctcattcccttctgtctcccctgtggaagtgggtcagtggcaggagaaagattagaaaagaatccagaggggaccagttttgctcctccttcctgtcctctacctgggccttaggccttctctctgaggcctctagggctccggggatgggttagacaggtgcttccaggccagagctgggatcctgtggggacagacacgattccatgcccacttttcagccccagctgaagccaacattgtaatccccaggcagtgtagatgagaggcatatcaaagggataagactcaccatcccctcttcctgttgaccccaacaaagtgccagaacccctctccatggggacagaggtagcccagaacatccagaacagagacatgtgggttctaagccatcactggctgtgtgaccttgggcttgtcttatagcctctctgggcttcagtttcttcacttgtgaaatatggtagatgcttcctaaggcccttctgtctctgacactgcagcccttagaagtggtttctgaaggttgactgggtttaggggaaggttgtggcctgcgtggagctgccagatctggcggcctgaatatgtgtctctcctgcccccacacagagctccaaggcaactgctctcgcctgggctgccagcaccattgtgtccccacactcgatgggcccacctgctactgcaacagcagctttcagcttcaggcagatggcaagacctgcaaaggtatgtgagtgcatgtgcctgtgtgcatgtgtgtgtgccagtagccagttgaggtgggcagggaggggcagagaggggtagggggcctggctggaataagaaactagaaggaaggtgcaagagagggggtgccaccaccccagggcatgactgtgagccctaaccatttgcttccactagacttctaaaaattcaccttaaaattatagtttatatgtaaatttttctgttgtaaaaaattagagcattaacagataaaaccaaagtcccctttgacaaatccccctcaattccggtccccttcccatctccctggagttcaactctattatcagtttgctctctctctttcaggcccttttttgtgcatttgtctctgggtattcacagaaaatctaattggaagtactgctcaagagtactgcgtgctcttttttacataaacaatagtatactgtgtatattattttcaatgtttttcactcatcagtatgttccacaatttttttttctgtgttaatatgtaaagatctacatcattcttttagaaaccactatgacgtatgacttttaccacagtttacttggtcacctccctgttgatgagtgagatgttcccaatttttcactgctacaagcaatgcaaacttttctgttttaaatttgcctccctcgggtctttgtgcaaatgccaccttctcagtgaagccgtcccccgacccctctaaaactgcatccctgccatctgcattctctatccctgttctcttttcattgcactagcacctctaatgtatactttatttactttgtttcatatgttattatagtaactatatttcatttattatctgaatataagtttcatgaggacagcaatgtgggtctattttaaagttcactgatgcacccctggcacctgacccatagtagggactcaataaatcttccctgcgtggatgagtgatatgtacacgagtgtttctctagagtggattccaagactggacttgctgggtgttaaggtttgcacatttcatgctgtaatagattctgccgaactgtccttcaaggtagctgtaaggatggacatgttgatcatgtctgatgatcacccacttcgttgcccttgtcacactggaaatgaccacattcttgccctttcctcggcagattttgatgagtgctcagtgtacggcacctgcagccagctatgcaccracacagacggctccttcatatgtggctgtgttgaaggatacctcctgcagccggataaccgctcctgcaaggccaagaacggtgggtggggttgcctctggccacagtgctaactaagccccctcaatgctgttccctggtgggtggtggcctgagaggtggtcctagagccctggctgcacggactcttctcttccccattcccagagccagtagaccggccccctgtgctgttgatagccaactcccagaacatcttggccacgtacctgagtggggyccaggtgtctaccatcacacctacgagcacgcggcagaccacagccatggacttcagctatgccaacgagaccgtatgctgggtgcatgttggggacagtgctgctcagacrcagctcaagtgtgcccgcatgcctggcctaaagggcttcgtggatgagcacaccatcaacatctccctcagtctgcaccgtgagtcacctgctctcagcttggagggctggggagggtaggggagacagggaaggtggaccctatcttgaacagaggccgggagttacacaggatggtcctgtctggggcaggagaagcaggaggctggatacaatggtgtgtgtttgaggcaggggcagagccaccggcacgctccctcccagctctctgagcaagtgtctggatggcccctgcatttctggccaagggctgagggggcagtgaatggtcaatctccagagaccagggactgtcccttctctgagaggggagtgttgactagactgcagagggactttccggtgcagtgggagccaaggctagggaaagaaggagcggaagcctgaggtgccctgttaggctgcagctgagggtaaaggagctggggcccagctgctctgtctccatgggccatcgtttccctcggggaccattgccaatggactctctgctgccatcgggggagggcagtactgaggttatttctctgtggctttgtggcagtgaatgaggctgggagaggagcgtgagccacatgagattttagaatatcctggatgcttccattcaggcttctccctaggctacacttttgctatcctagttgtggaagaaggggtgtcacagaaaggggcacgagcatagctgggtgtagacccactgccgggaacagccctgcccatctcagaggctgttacaccagcaaccttaaaagtcaacatctggcagcatcacatttccaaagaaatgcaccacagggctgagaggaagaatctggcctgtggttgatctgaccccctaagggagattaacttgatctgtaactgtttagtaaaccagaattcccatctctgccttggtttcctaatctgcataatgggtttgagcttgtctgtctagatcagattaactggagtgaaagccagtggtaaaggacagcacactttgaagttgaggattgtgaaccttgggcctctctagaagatcttcaagtttctttatttggttcttgtgatgaaaagaaagatcccaggaggttacaagggattcattctgggagagagaaaggcccctccccgggatggtggcgagcaggggttcctctgagagccctcactctccgtggcctcagcgtaaggttcacatttctgcctttggctcctccagagcatccctgatagcgtccttgggctgctgctgtccacagctcacctgtgatcagacatgtgtcctccttggggtgctgagctgggggctgtcaagcctggttggctgagctcttaacgagtgggcgactcagggaaccccatggctgatggggtgggattggtgctagaccctcttgtgcagctgccctccccctgttccttgtccactgacctactcaacaggcctgtctgggcagacagcttgtcagtttcctccccagccctgcatcttgccatacagtgggcttstgggtaggtggctatggggtgtcctggaggtaaccttctcaacttctactctggcctcatctccttatctgacttcctccccaggagaagctggtasccctcccttggcaaacagatttgccttgcctcccagtctgctaaactcactgggcctctcaggggcagagtccaggaggctagaagagtccaaggggaaatgcttgtggggtaaatgagtgggtttctctcatcccagcttctgtcccttcctccctgccctccccctgctccacgtccctgccgcctgaatgtctggctgtcaccctgaggatggttgttttgctctctcccacaaactaattatgggtcccaaactgaggacgtcagtgtctctcccctagcccctcccccagtttctgggtcatccccctccccaggagatgctgactggcctgccctggtgtgtagggtggctggtcccaggcactcacctgcacagtggctgctggcctgtaattagctccccaaggaggaygaagaagaaaggctgcagctttcccctgctttcactctgccctccagggcagccctccctgcaagccttccattctgtgctgtgactgtgacctctgttggacccctggggctgagcctcatgcagcaggggtgcacacagagggaggagtctgacaattgaggggtgttcgagccagcgaggccagcccgctggtgcaggcagaagggggagcctgccccagagaaaactctggaagcagaaatagaatagaaagaaggaaggaggccaggaaatgagcctggttcacatgtgtcctgggccatgtgagtcagacctgttgtggagtcctgagagcccccgagggcccccctgaggccctgcagtgtgtgaacattcctcttcaatgccccagggctgctgaccctcctgcctcaggcccagtgttatccccctggattgggtgggtcatctcttttcctcccacctgagattacctccccctcccctctgccgctggcccagtggtttggggaggtctatgaggctcgaattccaagaccagagaactccatggtgagagccggaagagaaggcaagacccttggccagtaccaagagcagccctggctttcactactgctttctcaaaggggctatgcattgatttgattttagatggtacctggacaagctttttttttttttttttaactgttatagttacgtttttatttgatatgcattaggaaactcctgtaactagcacatcaaatctgttacttcagcaattgtttagcatgcagcgaaataagaaaagtaagttaattgaaataactggtaataaacagtagcgcaagctgtacataagcatggtagacattttgaaagtgatacacaaaagactaaagttctgaaaattgaggcccagagggatcaacaggcctgatagtcccttagtcaggaaccaggcctgcgcactctcacccccacctctgaccagtctctcagctccagaggcctatggagcctgtaacccagctttgtccagcctcctgccaggctgcccctgggcaggcctggtggtgcagtctaccgaccccagcccagccctgcatttcctaagctgagctcctctgatctgtattcccttcaccttggaggatgccaccactgtagaaagaatgaggcagactgcaagattggggtcctgggaacatgggtgtgtatggtgaggggaggttctgaggttgtaaatagaggccttgaaggaaatcgggtttgctgaagtcactcaggagtttggactgtgtgtgaaaggatggtctgaaggggctctcagaggtctcagggttcccctccctgcaccatgctgcatggggaagaaggaggtggctggggagctcagcaaagggcccctaggctgcaggcagcaaggttgcgaaatgggtcccaggtccagctggccaacttcacttttcccttcctctccctttcttttatttatttatttttttagtgtgtgtgttttcgaaatcacaacaggaaatggggtagtgatttgtctagaggggaggcaaagaaggggcagacagcagtccctctgagtctaatgaactggctgctgctgctggaaggggtgctacctccccactgtgctgggcacccctggaccctctcagcctcccaccctgcctacaaagcacttccagacttcacatgtgaaagctaaccatgcccatccttggcctttctgacccatgggatgccaggctgtttggggaggggtgcctggacacacacagatacccacatactcacacagaacctcatccacgcccaagcatggtctagcaacacacacagattcccccacacaggcacatgcctgcccaccttccggtctgtgccattgagcagtatcgtctcgatgcggtcgtagaaggcatccacccagtagaggcgcccagccgggatgtccaggcttagcccattgggccaaagcactgtcttggaggtgacaaagatgtctcggtgtgagccatccatccacgccctctccagccgcccacgccgactgtccttggggtcctcctcccagtctgtccagtacatccacctgtgggcagcgactggtcagcatcacctgggnnnnnnnnnnnnnnnnnnnngggtgtaaaggacagttttagcaccccactctttggccttaggccccctgcatcctggcacttttgcttcccattcctgttctgagtttcctaatcatttaacagctcactcttgctcctcctctctcctggcccgggccagccctgtgtctcccggcccagatccagccctgtcctctcctcccccgctgtctccttgaaattgcctctccacccagactgctcccagcactccccttgctgttttcaagccaaaggaagtaacttaagcaagagagatgtgttttagagcccggcaaggatttctcaatagagggaagaccctaagatgggctgagtggaatccaggcatcatccctgggatctaggtcgaaatgcctcttggggacctaagccaggcaggggaaggtagcaggacataaccacaggctggaatcacaggcaggagcaggaagagagcccaggagaacgaggtgacacaacacggctaagctccagactggctggtggaaggaagagctgaagtcgggacccagcaggaaacaaggagcatgaggccacatcgtttagcagagcttctgccaggctcgccaggaggtctccttcccaccttcgaagtcctcagactctccgccatctctcccaggcccaggcgagatccctgagtaggattactagacagactgtcctctcccactgtcttggagtgtcccaaggccagagaggcaggatcctggcagtagaagagagggggaaaatgatgtcccagctctagaacaacagactcagtcttcaataaatatttgttcaatggatcaatacatgtgtgtcagacgcctgagacaaagacaaaaggcagcgctctccttacagtatttgcagtcaggtgaagaggccatgatcaaagaagctccagaggcctatggagcctgtaacaggaaaacttccttctttttttttttttttttttttgagatggagtctcactctgtcgcccaggctggagtgcagtgatgcaatcttggctcactgcaagctctgcctcccgggttcacgccattcttctgcctcaggctcccgagtagctaggactacaggtgcccgccaccacgcctggctaattttttgtgtttttagtagagacagagttttaccatgttagccaggatggtctcgatctcctggcctcatgatccacctgcttcagcctcccagagtgctgggattacaggcgtgagccactgagcctggccttgaaaacttccttctaatagggcaagcttccttctgggagcctgagccgagtcttgacgagtagtaggtgttagccccaaatggcccacctggagggcccacctagagtcaggaggccacagggctctggctggaggcacagagggcgacttggtggaaaaggtgggaaaggatgggttcagggaggggaggacatggtgggaaccgcagcccccatgtggggagtgtttatcatgcaccaggcctcatgctaagtgcagttagtgtaccatccagttttacaaatgaggaaacagagactcagaggcattaagtaacttgctcatagcctcagttggaaggtgacagaaccagaattcaaactcaggctgtcagtgtctagggcccagttggacccagggcagagcagaatgatatgaggagaggtggggaggttcctggaacaagggccagaatctagtgtgctccctggggatgtggatagaggtccagggacctctttggatgtgtatacactcttgggtgtgtagatgtgttgggtgacattttctcaggacataaaggcttcttccttccttccgatttccttattttagagcaggtgactagaatcctgcagctgaagctagagtctttttgggcatggggtgggtcccatgtgtttgggaaagcagccaccatgtatggaaatgcctcttgaacaatgggaatgatggagaagttgagaaaagctggagttgtagtgagtgcagatgctgagcagtgggatggggtgccaggacaccaggtctattctggggcctggaactgaaagtcctctgtgccataatgggcagctgtggtctctcgtctgactcctgcacctcttccctgcttcctagcctccctcttcatgctggaatcccctgcccctctgcccctagaccacccccaactccttccacaacacagcctccctctctcccctttggtttatttgagattctcctgtcctcaggattttcggcctttggccagagcctcttcagaaggtgcgctcaggtggttggcccttagaaggctgggcgacaaggggacggctcccctcagggttggtggagccagaatgctcaggatctctgggctgaagcccaggactccacctggaccccaattcataagacagagaggggtggcccagatactgcctatagggcagccctggaggcaaggttcctcctctccctttgagcccatctctctacactggccttggagtggtggccaagtgtatgtgtgtgtgtgtgattgtgcgtgcatttgtgtgtgcatacgtgcgtatgtgcgtgtgtgtgtggtggggcaggcagaggaatctgaactttaggagagagaaaaataatgtggtgcagggggttggataacaaaggatttttgcttgcaactaatagtctccagctgcaaaaataccaaaggggaggccaggcaggccgaggactccagttcttgccaactcctcaccggcctgctgagtggggccctgcctggcctttggggaggtggaagggagaccggccaagggtaaatatctgagagcagggatgatctctctgccttccttcccggaattgggagggaatccaggccacatcctgaggctgggggggctgattgtggagctgcacctgggatagcggcatcagatctctgcaggtttcttccttctctctcttgccaagagaagggtggatagggggagcaggggcagggtattgccagccctagggctgggcagtgactcagggaagcctcaggaagtcggagagaaggccggccgtagctgcgccagctggtgctgggaaaacagctttcactgatgaagttcatacacatgccagcagcccccagacccctgccgtgcccaccaagtaaagggcacgcagccctgtttgacttccagccaccctgctggctgccaggggatgcaggcaggtccctgctttgagacttcgatttcctttggaggcagcccagcagcattcatttgaatctgttttctctgtggttacagcgtgtggggcaaagaatttggttgccttacccctgcactaggccctcttcctacagggccttggcctcctcaagctactcttccccctctctccaatcttgtgaggatgggacagtactgggggcccagaggaaagagtggctgggcttggggatgcatgaatacttacgggggtaatacctcgtctctgtggccttgttctccaggcattgggatgggatttagcagagaggacctgaagaagaaactagtttgatgaagccctcagttggctccttcccttcctgtcctgtgactctgagtcagtgtcagggcccagccaagttccttgagagcggcgttcctgttctttttgcccccaccccaccctcacccactgttagggagcagcccctgaatccctgtggggaggagggggaattagggaggggtcaagcagaacagcaagtcattatacctgtagctgtgtgggggcagaagaatccctactgggttgagtatgggtaatggaggatgagtttcagcccaaagcaggtagcccaaagatttctttacttgttggggaaactgttggagatggagttccaggcaggggtcccagaaagtcactgccttaggagtttcccagtttgcaagargcaccatctctgatggtggtagttgaagggggtagtgagtagatggaaggaagccagtggtcctggagaggaggagcccagaggaggccagcatgtgtccctgtccccagacttcctgcctccttgacttccggccacccttgccctgcctctctttcctttggctcttcttggcttcttccatctcctccagaaccatgcctgaaactgagtctaggcagctgggctccatctccttcccccactcccatcatccttaagccccatctctttctgagccatgcctcagtttgccctgaggattctttcatggccctcctcctagactctctctcctccagccctatgacttattccccacctcttctgaccctccccaggacatgaggacattgagcaataaggacattgcaggaacaggggactggggctgagtagaggaagtttggcccatgtcactggtgcccaaccttttgcccccatggatcttccctttggcatctctgtagagttcatattttgaaatacttttctcccaaactgggtttattagcgtgtaccctgcttttccactttaaaaatttatgccatatgtccagcttccagtcagtgcttctggttagcatgagataactagatttactgtagatggtagataaaagtccagtgaaaagcaaagatgtgtaatgttttggtagcctcagtgctcttatcccaagtaaaagcaaagttaaaaaaaaaaaaaaactggactgagctagtggacctgtgctctctaccttttggtgccccaagaagatggtcccttttcaaggatgggctagaattgggaagtctgtcagtcaaccagccagccagcatttacgcaagccctcctgtatatccactctgagctaagcatgggggtgttgggtgggagggcgtccagagaaggtgggcttccaggtgtgggttctcaccagcaaagggtgggcatctctgcaagagggcctaccccaccccatggctctttcattcgtactctccagacgtggaacagatggccatcgactggctgacaggcaacttctactttgtggatgacatcgatgataggatctttgtctgcaacagaaatggggacacatgtgtcacattgctagacctggaactctacaaccccaagggcattgccctggaccctgccatggggtgagagtggcaggcggggttctggccctggaaggtgggaggctgaggctacagtggtaaggagggtgcccaatgtccagaccccatttaacatgcatcttcccacaggaaggtgtttttcactgactatgggcagatcccaaaggtggaacgctgtgacatggatgggcagaaccgcaccaagctcgtcgacagcaagattgtgtttccycatggcatcacgctggacctggtcagccgccttgtctactgggcagatgcctatctggactatattgaagtggtggactatgagggcaagggccgccagacyatcatccagggcatcctggtgagggagctactgtctgaggttttgtgggggaaccatgatccagggccttctggtgaggggggaagcctctgtaggggaaccgttctctgagtctcctggtaaagagcgtggatgccccaggcctctagtgggagtggggtgggcttgaatactgcagagaaaggacaagatacgggttccactgtgatgggaacagtcattttagaaacaccacttctgtttacttcctgtttctcatttgacccttataataacccctagctgatgaacagggaggtggttcagttccctttcagcagatgaaaaagcaggatcaaagaggttaggtgatttgcctgtgtttacaaagccgggtgatagcactggaacttgttctagaagccttgctggctcagaggtggcatctccattgtgggataattagtgtgagcaaccagcccagtttgcctaggactgtcccagttttagccctgaaagtctggtaagccagcaaacccttacctttgtcttaggcaaactaggacagttggccaccgcagataagctatgtgggtagtcaggggtgttacaggacttgcttggggcaagtgtgtcctcttagccctcataacagactaagaatgtcctctgtggacagagtttagagcccatctctaattcagtctaaaatcactaaagtgtctaacgagtgcctaattctgtgaaggacagggtttctgccctcaaggggtctgagtagagtgggtgagataagtccacaaatcactgtgccagacacggatagatagcagtgtcacggaggatgtatagaaggagaaaacatctctggttagaagattccataaattctttaaagacatgctctgtagaggatgagtgggatcttggtaagcaaaaatcttcagaataggttagtccagccagaggagacaggagtaaagcattgagttaaaaaatggtggggccaggcacggtagcccacacctgtaatcccagcactttgggaggctgaggcaggagaagtgcttgagcctcggaggtcgagaccagcctgagcaacatagggaaaccccatctctacacaaaatttgttttaattagccaggtgtggtggtatgttcctgtagtcccaactactcaggaggctgaagcaggagggccgcttaagcccaggaggtggagactgcagtgagccgtgatcgtgccattgcacttcagcctgggtgacagagtgaggtcccgtctcaaaataaataaataaaaattaaaaactacaggatgaattggggaatgcaggtcatgaagtctggaggaagctgaggggatctccaggacagagggaggaacccctgtcatctcatgctgtccattcttgcctgcccgtctcagattgagcacctgtacggcctgactgtgtttgagaattatctctatgccaccaactcggacaatgccaatgcccagcagaagacgagtgtgatccgtgtgaaccgctttaacagcaccgagtaccaggttgtcacccgggtggacaagggtggtgccctccacatctaccaccagaggcgtcagccccgaggtgagcagggctccatggcccctccaaagctggctttaccccatgatggctctgggaccttgggatcacagcccctctctgggccctcctgtggggaccctggcttctttcatgtcatgaccgattctcctagccagccactcgggctacctgccctggcccctcagcttcccctgccagcccccatccacccactcagcctccagatcccactctgtccctcccattccccttgccagtctggagcagtagcacctggccatgggcaaccctggaactctcttccctgactactgaagcccccactccaagagtttgaaggctgggttgttggggggcagagggtttccacccctgtggcttccaaatcctaaaatgggatagcaagcacaaagaccacagcagcagggggtgtggtcagattcaggaagccttctcaaggcctggcacaggggctctgaggggtcctaacagctcttcaccctgcccccagtgaggagccatgcctgtgaaaacgaccagtatgggaagccgggtggctgctctgacatctgcctgctggccaacagccacaaggcgcggacctgccgctgccgttccggcttcagcctgggcagtgacgggaagtcatgcaagagtgagtgacagggaagggggtgtgtgcccattgggaggctgcgggaggrttcctcaggtgtcccccacagcccrgctgcctctgtctgacatgcagggagatgaaggaagtgtcccagagtgtacctgctagtgagggcagagatgggacttgaatccatattcgaaaaaagtgcttttctcactcacccaccggactctgcagaaaactaaactgattcattcagcaagtgtctagtgagcagtgagcactcactacatgtttggcactgttctggtcatcaggattaagcagcgaacgagatagatgttgtccctggcctcatggagcttatagtctagttggggaaacaaataaatgtaactttaggtggtaataagtggttatgaagaaaataaaacagagaatagtcaggcgtggtggcttatgcctgtaatctcagcactttgggaggccgaggcaggcagatcacttgaggtgaggcgttccacaccaggctggccaacatggtgaaaccccgtctctactgaaaatacaaaaattagctgggtgtgatggtgcgtgcctataatcccagctattggggaggctgagacaggagaatcacttgaacctgggaggtggaggttgcagtgagctgagatggcgctaccacactccagcctggatgacagagcgagacttcatctcaaaaaattaaaaataaatgaataaataaagcagagaatagagttaatgaggagagcaagggcctctctgaggatgtggtgtttgagccaagctctctgtgaaatgaagagggcaaccatgtaactccctgagggaggagcatgtccggcagaggaaatcaacagtgcaaaggccctgaggccagtgtgagtgtggcaagccagaggaacagcacgaaggccagcggggctgagtggtgtgagggcagagaaggaggcaggggttggattttattatatctgggataggaagctcatagtgacttttgagaatggaagtgacatgattggattcacatttgtataaaagtcacgctgctactgggtgggggatgggcagtagggaagtagccagaagactttcagtgtagtgggcaagaagtgatgtggtttacactaggatggcagcagaggaagtggtaaacagtgatgtgactccaacatattttgaaggtactccttttataccactgatttcatgactgatcagtgggcacttagctgaaaacctgctattcttccctcatttcctacccttggagtgcagaggtcagaccccagggtattgcggccaggacccatygtcctgtatgttagcgtgtgcgtggtctgtccatctgacccagagcctcgcatccctaacgtctcctgacccatcacagctagggcattgcagccccttggccgcagcccctgggtggggatgatggtcatgtgtgtgtctgactgtaccctggcttgtgcctgctctagagccggagcatgagctgttcctcgtgtatggcaagggccggccaggcatcatccggggcatggatatgggggccaaggtcccggatgagcacatgatccccattgaaaacctcatgaacccccgagccctggacttccacgctgagaccggcttcatctactttgccgacaccaccagctacctcattggccgccagaagattgatggcactgagcgggagaccatcctgaaggacggtatgggctcctagggatgtggcccatggggatggaagggggctggggcccaggcatctgtttctcggtgccctctcagcaggatggtcccctgctgactggctggctgcactggttggcatggagatgaggggatagacagattgacccctgtgtgacccccttcttggctgagccaaagaggcagggttaggatgggttaggcagcatgggccgtccttgccagccyttgggaaaactcagggtctgtctgcattggcttagagccctggagctgcacacagcacacagccaggggacaactgaggtcttgaattggagacaggcctgccagatcaaaacagggcacacccacatgtatgtgcgcacacagggtctgtgcagctgaccttgcagtcgccaaaaactgcatgctaatgtgtcctgagaaaattgtgttttgtgagttgcatccaggtcttccctctgagctgcttgggcaggttcacagtgcattgtctttttaatgtctatgtgaaggattctgagctgtacgagttctgccccaaatctgcacttgggcctcaggatcaggccgcctccccatcaatctggtggatgccagttataacctttgccctgcaccccatccacactgtagttcagagaaaatcaacagtcagcaatcatatcacaagactttggggaaatcaaaagtaactcatcaggaaaagattaggggtccctataccaagggaactgctatttaaaggacacttggagtgaaggctttggctaagtgaaaaatcacttcctaatttattcattttgttagttcaggatttttaggcctaggatatgatgtcacacttgtgcccagagccacatgcccgttgtttcagctctccatgcaggcacgggccagatgccctcacacgagagcccacatcagccatgtagtttaccatctgccacgtgtggttttgagaggctagccctgatacaaatggcagcacacagggctttcccctattccttttccagcctcctgtccctacccccacccatctgtctagggccccagagggtccctgcacccctctgtagcccagactgctcaaaggtacctgagtccgggagggccagaggcaggcagctttgaacttcctttgaagctgttcatcactggtccctcttcccccaacaggcatccacaatgtggagggtgtggccgtggactggatgggagacaatctgtactggacggacgatgggcccaaaaagacaatcagcgtggccaggctggagaaagctgctcagacccgcaagactttaatcgagggcaaaatgacacaccccagggctattgtggtggatccactcaatgggtgagtcctcccaggccttggggtgggaggagctgggagtstgtgggcctcagataactggaggatgaaatggacagggaagcaggggaaggcaggtgaggcgggatactttagcaggaatgagagtctgcaaggggagaaggagtccctgtcttcagggaaatgggagtgattccttaaacatagaagaaatctgatcctgtcactcccagttcagggccttccaccagctccccttaccctgagaatgaggcccacgttcttgtcaggcctgcacagccccacagtgtctgcctggcccttgtctgacctcatctgcatcccgcttcccacacttgaagttctgtccccactgcctgctgtctgtttctcaaacaagcaccccggctcctcctgcctcagggcttttgctcttggagttcctcagcctggaactcccagatatttgccggactggcttcttctctacatcaagtctcactcatgccacctcctcatggtggccttctccatcactcccctgacacccccacctgcagcccggtcactctccaccccatcaccctgctttatttccctcctggcctttatcgctctccatgtaaccttgattgacctgtttcttgtgggatgggagctccgtgggagcagggaccttggctgccttggtctccactgcatccatgaatgccaaaactgtgcccaacttacaggcactcaacaaatatttgttgaatggagtgaatgaatgaaatgtgtggtccagtgatgagcaggacaggagacccctgtgaggagctctgggacagcactcatggattgggatcacaggggaggctgttgatggcgggggtgcccaggtgatgctgaccagtcgctgcccacaggtggatgtactggacagactgggaggaggaccccaaggacagtcggcgtgggcggctggagagggcgtggatggatggctcacaccgagacatctttgtcacctccaagacagtgctttggcccaatgggctaagcctggacatcccggctgggcgcctctactgggtggatgccttctacgaccgcatcgagacgatactgctcaatggcacagaccggaaggtgggcaggcatgtgcctgtgtgggggaatctgtgtgtgttgctagaccatgcttgggcgtggatgaggttctgtgtgagtatgtgggtatctgtgtgtgtccaggcctgtgtgcctctatagatgtgtgcatctatttttctgtgcatctatagatgtgtacatctgtgagcttgcatgtcttatgtattgtgttgtttgtttgaggattgcctccatttgcgtctctttgtgtctattcgtgttgtctgtgaagttgactgtccatgtgccagtctctgcatacacaccatgtgcgcctcctcatgtgtgtgcatagatacacggcatgccttggtgtgtgtctgcactctctgcaagtgtgagggcctagggacggcatatctctacacttggtcatttgggttgtcatgtgcttcacgagtcatgtacgtgttctagtatataaggcccttcatgatatggcccctgaccccctctctggtctcttttctccccacttccttcatcccaacactctttgaacaagcagcactagacagcttgctcctcccagcacacgtcacagagcatctgccctctgtgccattactcatgcagttcattccacatggaatgttcaccccagctcctcttcccctggcagactgctcaggggctacctcccctaggatgtcatctccagacccctcttcacactggatcacccgtatgtgccctatctgagacagtgggaagctcaagggcagagatcgtgtcgttttcacctcttactacctactacagctcagcccctaacagatcctggtaaatgttgaagaaatgaatggatgaatactgcccgtctgctcattagtgtgtgtgtgtgcgcgcacgcatatgagtgtgtgtgtgtgtgtgtgcacgtatgtgtgcgtgtgtgtgtttggggactatgaatgaataggaatgagcccaggagaggaccatatggacaacctcaccatcagcatccttgctggatcactcgatcacccgctggcttcaggatctaccatcccactgtgtgcaaaactatcactctctggggctcccaggctaatgggggaaacaaagcaaaacccatgcccaggacatagacaaatgaatgtacaaaacagtgatctcacaggcctccctcaattttcttccaactccttagtaacatcctctccatccctagattgtgtatgaaggtcctgagctgaaccacgcctttggcctgtgtcaccatggcaactacctcttctggactgagtatcggagtggcagtgtctaccgcttggaacggggtrtaggaggcscaccccccactgtgacccttctgcgcagtgagcggccccccatctttgagatccgaatgtatgatgcccagcagcagcaaggtacctccttggggctgggggcagcgtgggacctggaaggggtggtgggacttaggcattgatttgagacttccctgggagtgaaggcacttcccagggatcctaggctctgacttttgaggatcctgagaagagaactcccccaacacaatctgattctctgttccccatttcccttcctgccccatgtctgtgtctcctgttcttcaacatgatcttcttcctctccatatttcctctttctgtccccacatcttaatgtgtctcctcccctatcccttctctgacctctcctcacctcttcctccctttgcctttccccatggcccttccccacagttggcaccaacaaatgccgggtgaacaatggcggctgcagcagcctgtgcttggccacccctgggagccgccagtgcgcctgtgctgaggaccaggtgttggacgcagacggcgtcacttgcttgggtatgaggtgcctggctgggtgggagtgggaagcagaccccatcaggaggatgccgaagagtgrggaggggaggatccagggtcccagtcagagattaaggaggcaatgaggggcccttagggggccaacaggaagcaagggagggggagagcaaaggctctgggggctaggagggagtttagggaagatgggaggctgggagggacttgtgaggggatggcaattaggggaaactgagtgaagaatggacagctatggatggaaggaggaaattatccttcacttcttttaaatgtatttctccattactaaagtaaaataataaatagttccaaatattggaaattactttgggaggccaaggcaggctgatcacttgaggtcaagagtttaagaccagcctggtcaacaaggcaaaaccccatctctactaaaaatacaaaaattagccaagcgtggtggcaggtgcctgtaatcctagctactcgggaggctgaggcaggagaatcacttgaagcccggaggcaaaggttgcagtgggccgaaatcatgccactgcactccagcctaggcgacagatggagactctgtctcaaaaaaaaaaaaaattaacattaaaaaatacatataatatatatgttggaaattagagaggagaaaaaagcccaaatcccaccagtgagcaccatatattgttagcattgtggtaaagtgaacaccattcttttttcctcaggggggttataattgttttttacatagctgtaatcatctgtttataaaatgtcttctgcccttttcggttcaagtgtcacagcattttctgtgttgttattgcatgattttaacaagccttgttttttattcaaaatgggttgtgttcattgtaaaacggagtaagtaaggccgggcacagtggctcacacctgtaatcccagcactttgggagcccaaggcgggtgaatcacttgaggtcaggagttcgagaccagcctggccaacatggtgaaaccccgtttctactaaaaacacaaaaattagccaggcatggtgtcacacgcctgtagtcccagctatttgggaggctgaggcaggagaatcgcttgaacctgggaagcggaggttgcagtgagccgagattgtgccactgcactccagcctggcgacagagcaagacatcatctcaaaaagcaaaacaaaacaatgaaataagtaaacagtatagaaaaacacaaaggagaaagcccaaatcatcccagattccaccacctgtagataaccactgttaccatttgggggaaccacctcccaaatgtttccctatgatttactttcacataaatggagtcgtgctgcacatactgttctgtttcctgcttttgtcacttgacagtatgtaacgagtacataagcagcatttttaatggctaaaatatatttcatttgataaatttcacgtaatttactcaaccgtttctctactgttggatgtttaggttgtttccagttttttgatataatcacaacccatgtttgttgagcatggactgtgtgctcagcactgtcatggacatttcccttgcagtaatttgtttacccctaaaaacatcctggtgggaaaagtggttttattatccccattttacagatgaaaaaactgaggcccaaagttagagcaggatttaaacccatgaagtttgacccagagcctgttttgtaatcatgcctctgctatttgtcacatcatcatgcctgcccatattctggatggtttccttaggatagaatcccggaagtgaaaatgggtcagtgcagccatagtgtacacctaggagggagtggctggggtcaggagagggcgttggctgagagggttaaggaatggaggggccaaggtaatgggaggatcatccacatggaagttgaagtcaccaagaactgaaccaggagtgattttggagaaagtgctggtgagccaggagctaaaaacccttacagatgacagggtgcagcctgggagccttccagaagtagaggttggtacagaagcatgatgtaaggggaagaacagtccagggaacagcagtgaggagcaaggaggacacataccagcctccaggtccatggtccatgggatacgggaggggaaatcgccacccatggggccatgggaagtttcagagattagagaggggtgggagatgagtcagaccaggcaagcgcccagctgtgaggtctggagaccgggctcacacaggagcctgcacttgtggaggttaccaaggcacagacaaaggacgtcgtgatttagctgctaatgggccaagacagatagtgatggtgaggcatacgttctggggacaggatgggtggagcctgcgcggatgtggtgccatcttcacttctgctggtgggaccgatgaaactgtgaaataaaaagtccagggaccggggcagggccctggggttcccggagatgacttccaaggggaagttcatggagaagtcagggaaggagtggggagagcctgttcggtggtgacagaggtatagaggccatgggctctcttggacaccatttgattctcaggtcacactgaagtacagtaagcattaagtagagtaaacatcactattgttgcttgggaaagaattgcagtttccatccagataatttgtttcatgaggaaktttgtactagaaaaaattactttgtattattaaaaaatagtaaaacaaacaaaaatggtgcaaagggcttagtacttgtcccacgaccggggtctgactttccccctcacgatcctgtggtgcccacagcgaacccatcctacgtgcctccaccccagtgccagccaggcgagtttgcctgtgccaacagccgctgcatccaggagcgctggaagtgtgacggagacaacgattgcctggacaacagtgatgaggccccagccctctgccgtgagtcacacgccctgccccaccctgttggatggcaggcctgcagggcagctcggctctggcagtgcctatactggagcrggcaggaagctgggggcacccaacttctcgctgacccctgactcattccctccccagatcagcacacctgcccctcggaccgattcaagtgcgagaacaaccggtgcatccccaaccgctggctctgcgacggggacaatgactgtgggaacagtgaagatgagtccaatgccacttgttcaggtgtggagcggggctcagatcacacgaggcacccctcagtcaaggaggcaggggagacgagggggccaggttcagtggctcatgcctataatctcagcactttgggaggccaaggtgagaggatcacttgagcccaggagctcaagaccagcctggccaacatagtgagacctcccactctttacaaaaaaaatttaaaaaaactgccgggcgtggtggcgtgcacctctagtcccagctacttgagaggctgaggtgggaggatcacttgagcctgggaggttgaggctgcagtgagccatggtcatgccactgctctccagcctagacaacagagcgagacctgtctctaaaaataaaatgaaaggagcaaaagaatttagggcagaggggatggagccctgagcaggagtggggtctgctatccccttcccagcctgggaaactgagagggctgagcttgcaggggacagagcatagctctagactggagaggaggaacaaggcagggtagatctcctcctgggaggatrccagagaccccttgagagaaagagtaaagcatccagtgagaccagagagatggttttgaattctctaagagaaatggttttggatccttggaaataagggacaccaaaggcagagaataatagggaagaagaggcagtgaagagagggtcaggacaatgagtactcacacccatccctgccccccagcccgcacctgcccccccaaccagttctcctgtgccagtggccgctgcatccccatctcctggacgtgtgatctggatgacgactgtggggaccgctctgatgagtctgcttcgtgtggtaagagggatgggcagagggagtcaggctggscctgggggaggggcatcctgagagcatgccagttgggggtgccggagacacctgcaacccagcacttgggtggccttgagtgagttaatctcggtggcctctgtgagaggagagccccatcatcacagcattgtgtctcagcaaactcatgcaggaaaagcactcagcacaggtcctgtgtctgctgactcatggggatgagtgagtggagtttccagccgaggcactgctgcggggccttccccacccttcctgactgggctaagggctgctggttatgggagggccgctgcactcacctgcccagtactgtgatgctgtgtaatcgtgaaggccctactcagctactctttcttcctcacagcctatcccacctgcttccccctgactcagtttacctgcaacaatggcagatgtatcaacatcaactggagatgcgacaatggtaagagcttgctctcctcacctgctgattcctaagacagctagaggctacagccaggccctccagggaagkcaaagggcttcagaatccagcagggcctccctccaggacactgaatccctgctgggttgcctgggagaaaayaggagaagtcagaaatgcctggagggagccacgatggaccaaggggagaccatcaccttttagtgtcattcctaccccaggcagggcctgagctgcccaccctctagtagggctcggaggccagggagagatgagtgagatgggccagagaggcagagcaaggagaaaccggtgcctgactcctttctccttgcaaacccccatttcctggagtccttggtgcacccctcaggctctgggcttcaggctcagaagcccacctggcagatagccatggaccaggtgatgtcagccttgagccaccagggctagtatgtgtgtaaatgtgcgggcaggtgactgccgtgtgtggtgtctcagggctctgttctgtctgtgttgtgttgtgacgtgctgccccagtggttcctgtcccagctgatgtgtgagcggatgtgttgggtcagtgccacgttgcccctcactttttctgtgtctcgcatgccaatggttgccccggcggtttctgtgtttcagagaaggattgtggggacggctctgacgaacagacctgtcctgagcctgccggtcagtgcatagaagcacatgcaccatcacccagagctcagctggccccagccccctgcaggttctccaggcccctactccagagctgctaggatatgaagaaaaagcaacagagaggagggagagcagaaaacagagggagaaagcaaatagtggtcaggaaagaagcagagacggcagagggagcctctgaggaaaggagatgacagagaggtggtgacaaaaagcccaagatgcaaggggaggagagagttagagaagcaaatccagttggaaaagaggcaggaacataacccaaaccccagtctccaccacatgtcccataaatacagagggtcaagtcaagcagcccccacccaatgctgagaaagcaggagcttccttcagccagcctcagcgagcttggtccagaagtggcccccactcttgccagccacaggcagggcccctgtaagccaggcacccagagcatggtattcagcagtgccagcctcagggcaggcctgtaaagcttgtctcaagccggccacgcctgcaccccacctacctctctccctccaaaactagagaaacccctgcctttcccccaaaagcaagcagacccctgttcccacacctgccagaaaggggaaatgaaatgtttaatgttccctgcacccagcctttctgagcttcagtgaggggccctccaggagccttctcctcctcctcatcctgaccacgtgggccatggtgcatgctgcagtctatgcagtttctgtgtcttttctgtttgttattttcccagtgggggggttagggtgggctgagggtgggttctgggcagggggcccaagctgggatcacagagaaggctgctccaccaactcccgctttgcctctccccttcttcccccaccgccagacaatgactgtggggacaacagtgacgaagccggctgcagccactcctgttctagcacccagttcaagtgcaacagcgggcgttgcatccccgagcactggacctgcgatggggacaatgactgcggagactacagtgatgagacacacgccaactgcaccaaccagggtgggcaccaggggcccgtggggtggggatgagatcgagccccctgcatcagacacccagcctatccatctgtctttcagacccacggtgtgtcggccaccatctgggagccagaggtagcctaggcatggctcttgtccttcaggagctcccggtcctgtgggagagggaggttgccgaaaaatcattgccacacgctgttaatatcatgcgctttgcagttggtggccttgggtttgagctccagctctgcagcttattatctgggtggccttgagcaagttacttaatctccatgggcctctgtgagtttcgtctgcaaagtggggtaataatagcaccaacatcacagcgctgatgtgggagtttagtgagatcacgcacgaaaagtgctcagcacacggcctgtgtttggtaaatagtagcttgagaaaaggatgctgcaggcagggatgaatgagcctgaagagacagaggagagagggcctggctccacaaggctcccagtgccctggcctctggggcccagcctcgggggcggtggggacctagttttctggagggatgggccctctcaaggaatgctggcttcctagctctggaagatgtgcagatttttatgtgaaaactaccaaatttttaacactacagtattagtttctctcgtctcacagttctggaggctggaagtcccagacccaactgttggcagggtgggttccttctgaggccgtgtgggagattctgtcccaggcctctccccagcctccgcggtttgctggcaatctttgcagctccttggcttgtcgaagcttgacccgatctctgccttcatcttcacacggtgtcctccctgtgggcatgtctgtcaccagatccccatttcccctttctgtgaggacacctgtcatattggattaggatacacccttatgacctcatcttaagttgaccatctgcaaagacactatttccaaataaagtcatattcacaggtattatgggataggactaatatctttttagggaacacaattcaagccataccaactggcagttgattttagaagttttaaaaggctgggtgcaggccaggcatggtggctcatgcctataatcccagcactctgggagggtgaagtgggaggatcacttgaggccaggggttcaagaccaacctggttaacatagggagaacccatcttgaaaaaagaaaagaaaaaaaaaaaaggctgggtgtgttgactcacacctgtaatcctatcactttgggaggcaaggcaggaggatcacttgtttccaggagtttaagaccagcctgggcaacatagtgagacccctttctctacaaaaaataaacaaaattagctgggcatggaggcacatgcctgtagtcccagctactcagaaggctgaggtgagaggttgagcccaggaggttgaggctgcagtgagctgtgagctcgccactgcactccagcctgggtgacagaataagaccttgtctcaaaagaaaaaaaaagtttaaaaaaaactacagaccaaactcttcctgcaggcctcatctgacccatggaccactagattacagcctctgccttatagagttagggcacattcccaccctagtaggagaagactggacagcgttgagtgcccaccttgagccctgccctgagagggaggacagagaaggccacaggaagcttgggaaatagtaattgcgtctccagggctatctctgtgaaggggagggtgaggggcacaggtgatatcccttagggttctgagaaggggcctctggaggctgtgtggtgtggtgagaagagctccctgccgctcccagataagctgggcaaatttggacaagttgcttcccctgagcctgggcatcctcctttatgaaatgagctgaggtatgtgaggcctggcgtggaggagcagggtgtcactattggtagcagttgttaactatggtatgagctggatggtctgggaccattcaggaggagttgtgtttagactgcaggtaaatggacaggagggagggtcttccagtggggatggcatggtccggagaatgctgtcgtcaagacttagagggtgaaactgagcacttccgtagggtgacagtggggccaggtggagccgttcagaccgagggaaaggctcgtgcagggacagtggggaatgaggctgtcctcaaagggggcagatgatgacagcaggtgtaaatcgtgagaggcttgatttgggaggcactgggaacctttgaaggatttccaagccggaaggtgctgtgatgtaggaggtgatttcggaacacagccctagaggaagattagattgagaagaggttcaggggccccaagaaaggaaaatcagttcagagactgctgctgaaagtcccggcatgagatgagagcatcagctgggtccagggtagggaagggggaggagcggggtgtctgtggcagcatgagtgtatgagtgtggggctccaccaggcagtgctcctgctcctctcctggcctcctgagtcagatctcaggacagcagccagagtgatcctgacaacataagtcagatcatgccctggccctgccctccagcctgtactggctccctgcacccttggaacaaatgccaagcccctctgcacggcctgcagggcccccacccctacccctctgacctgcattcctgccctcccctccccctgcactctactccagctgtggcgttttcttttttctttttttttttttttgagatggagtctccctctgtcgctcaggctggagtacagtggcgtgatctcggctcactgcaagctctgcctcccgggcagctgtggcgttttcttttctttcttttttttttgagatggagtctctctgtcgcccaggctggagtgcagtggcgcaatctcagctcactgcaagctccgcctcccagttcacgccattctcctgcctcagcctcccaagtagctgggactacaggtgcctgccaccacgcctggctaattttttgtatttttagtagagacagggtttcaccatgttagccaggatggtctcgatctcccgacctcgtgatccgcccgccttggcatcccaaagtgctgggattacaggcgtgagccaccgcgcctggcctgtgtgctgttttctgaagtgctggcgtagtcctatctcggagatgagactttgcagcggctgttccccttgcctggagtgtgcctccagggatcctctgggctcactcgctcttcatgcaggcctctgctcagattccttctgcccagaggtcttccctgaccatcttacctgacagatcacccccatccctctcagcttctacccagctttatctccatagctttatcaatacctgaaattacagtctagatttatgggttatgtcttgtctctcttccccattagaacctaagctccatgagggtagggactttgtctggttcagtgctggccccaggacagcgcctggcacacaggaggcactcagtaaacatttgtggcatgaatgaatgaaatagaggctaaggaggtgggcatttgggctcaggccttagcaaattgcttctccagctgagatctccggtgtcaatggggggattagatgaggtgattgtggggcccttggaggtgtgatgcctcctgactctactactgagttggtgcttccaaggagtgtcagcaaagcttggcagactctccaggcctgcctctgctcatatccccaggctgggcttaccggggtggcagggcacagggatgaggagggctgacctgggcaacccctccctcctgaggccctccactgtccctctgcagccacgaggccccctggtggctgccacactgatgagttccagtgccggctggatggactatgcatccccctgcggtggcgctgcgatggggacactgactgcatggactccagcgatgagaagagytgtgagggagtgacccacgtctgcgatcccagtgtcaagtttggctgcaaggactcaggtgaagaggatggttggagggcgtctggaacagcacaatgtgggcakgaggagaccgtgttgagagcagagtagcggcaaaggggatggcactgtgctgtgtggagtggtgctggggacagtgcaaggcaaaaggcagtccagaggaagcttgtgtgtcatgggtgggggaaggcatgaagggccagagcctgcacagaggacctgagaagccaaaaccctaccagagttgagcttcagcacctcctgctgcagattcctgccttgtttgttgcctatgtgaatttgacccaaaaagcctcggggttcctcgtggaccccacagcgttgcaatcctgaccctattagagaagcccacagggtctggaaggaagggcagggggagccccagtccccgggcctgggccctcatagtgcacctgtccctcagctcggtgcatcagcaaagcgtgggtgtgtgatggcgacaatgactgtgaggataactcggacgaggagaactgcgagtccctggcctgcaggccaccctcgcacccttgtgccaacaacacctcagtctgcctgccccctgacaagctgtgtgatggcaacgacgactgtggcgacggctcagatgagggcgagctctgyggtgaggcctggtcccaggagaagggtagggagggtggctgggtaggagtctgggccaaggacagtctttgggggacctgagtctaggagagagcagctctggcagccgggcaggcgagcagcacccagagtggtcaccagcagcctgtgtggacctggcgctccccatggcgctgtgctgagtgagccacgccattagagcagtttatccacaaggcatccctgggggccaggtgctctgttttctccgtttgacagatgggagcactgaggcatggaggggttccatagtggtcccccagacttgggccaaggtagtacagctcctaaactgctgtggagactcagaccccttgcccacatgcataccacagagagatgcggagtgctcttgtggagacaaaggcaccagggttgactgctgatggtcagggcaggcttcctggaggatgtggggattgcatggggttcccaaggacaggcagtacttgcagagtgagtgagaaggcatgggggcaggcgcggtggctcacacctgtcattccagcactttgggaggctgaggcgggcagatcacttgagctcaggaatttgagatcagcctggccaacatggtgaaaccctgtctctgctaaaaatacaaaaattagccggacatgtctgcagtcccagctacttgggaggcagaggcaggagactcgcttgaacctgggaggcggaggttgcagtgagccaacatcctgccactgcactccagcctgggcgacagagcaagaccccatcccaaacaaacaaacaggcaaggggaggagggtgcccattcaagaccaaaagagatgaggttgggggagtccaggagtcagggaggaccatgtggtgtgacttggggatgaggagcagagcagccttatctggtcctcttagccaggcagagcccccagttccttggaagggaggagtggaagataaggccacagggactggctgggagaactgccgacaggctatcagtcaggctggcagtttccagggtgtgccagaggaccaagggtggtataggccctgctgcaccccaccccaaacccctccaaatcaggagagatcagcacaaggggactggacctaaggacctcccagggtccctcccagggaggcaaaaagctggggcccccgccctgggcccaagaaggcaggaacatatcgagaccagacagagatattgaggggtgctccctgtgggaaggggaggtatggtgccagctggtgggtgcaagggtcccaactctggtcctgagggagcccaggaagtcctgggctgaagctcagcctgaagctcagcaggaatggagacraatggggccgtgggcagggcacaaggacttggtccaggctgcccaggacttggggcccagcagggccgtggtcttgcctcctctcagcttctgaccctkggtctgttccatgcctgcccctcccctagaccagtgctctctgaataacggtggctgcagccacaactgctcagtggcacctggcgaaggcattgtgtgttcctgccctctgggcatggagctggrgcccgacaaccacacctgccagatccagagctactgtgccaagcatctcaaatgcagccaaaagtgcgaccagaacaagttcagcgtgaagtgctcctgctacgagggctgggtcctggaacctgayggcgagagctgycgcagcctgggtgagacaacagtgaggtgtggtgrggcaggccgaggcaggcctctgagctgcagtgggttgggcttggtggccaggtgccaaaggctgagttttccaccctagcccccagtgcccggaccagcagagacctgcctgcgccaggacgggtggcacacaggcagctagccccttgctgaccccatcacatccctcccatcccagaccccttcaagccgttcatcattttctccaaccgccatgaaatccggcgcatcgatcttcacaaaggagactacagcgtcctggtgcccggcctgcgcaacaccatcgccctggacttccacctcagccagagcgccctctactggaccgacgtggtggaggacaagatctaccgcgggaagctgctggacaacggaggtgaccaccgattgctgccaggcaggatgcacacaggcggagcgctcaggcgctaggggccacaggtcccatccaagtggccccaaagcagaggcttggctcccccatcccccacacttctgttmattgggttagattttgctgtgggtctccatgcctgacgccccgtaattatcgtcagcagaactgccagcctgataattaacaaaatgatcagccttacctttgaatggcctggagctctgctccccagatctagaattgcaggcttgaaagaaaaaagccacttaggagtggcgtacctgaacgctgctttctgtcccaggcagcgtggtgcaccccagacttccttcagtcacacacaatagtgagtgcccactgtacacactgggcagtgggcatgcagcagtgatcaaaacaggctgttttcagttgtgtggtcaaggaaggtcccctgagaaggtgacatctgagcaaaggcttctaagaggcacattttactagagaagtttgtattgtttgtaataatacaaacttgaatttgaaaccattacaaatgtccatcaacgaggggggaggctaagtaaactgtgatgatatccacactgtgcaacagtctctaaaacaatgaggcacacacataatgtattagcatggaaaaatctttatggcagtcacttgagctcaagcagttgaggctgccgtgagccatgatcatgccactgcatccagccttggtgacagaagaccctgtctcaaaaaaaaaaaaaaagttggggagacaataggagtcctactcttgaatatgggcacatcagaaactttggcagaagtgccagggttgagggtgggtcatcgagggctcccaggatttcacacattcatgcacagctccccaggagacgctaacctttcactgccctctcttctccagccctgactagtttcgaggtggtgattcagtatggcctggccacacccgagggcctggctgtagactggattgcaggcaacatctactgggtggagagtaacctggatcagatcgaggtggccaagctggatgggaccctccggaccaccctgctggccggtgacattgagcacccaagggcaatcgcactggatccccgggatgggtgaggaccttgcccagccttctcctggccccatggcccccctgaagtcccattcagcctggccagggacaccttactcctcagtgccatctgcctcctcccaccctctacctacgatcccaccacagtcgctccctgagggccctgactttagccctcctgacccctccccactccccaggatcctgttttggacagactgggatgccagcctgccccgcattgaggcagcctccatgagtggggctgggcgccgcaccgtgcaccgggagaccggctctgggggctggcccaaygggctcaccgtggactacctggagaagcgcatcctttggattgacgccaggtcagcaccctctgtgccctgagaaggcccaagtctgtggcaccaggacggggtggggaggaacctgtggtgatgagggtgatgagaaggaccaagggatctagaactaggaacggtggcaaaggactgggcacaggaggaggaggacggaggggcgtggggaggccagggccgaggggagggggcaggtagaggaggcggaagcagggccatcagctgtggttattcacactgtaccatcctctccactcacctgtcctctccactctgttccctctgctggggctgtgtctgcccagagggaggggaaacttctttctaattggtctgcccagggagggtgcctttttcttttctttttttttttttttttttgagacagagtctcgctccgtcgcccaggctggagtgcagtggcgcgatctcggctcactgcaggctccgccccccggggttcacgctgagggtgcctttttctgactttcatcaaagccctgagtgctgacagcagccctggggagaagtgaccgaaagattcccttggggcttgggaatcggggcctgagaggtgaaacctggacctgttgggttctcacaccttggtccttctgtctgtctgctctggccagcaaggcttaggggagggaatggtcccatgctcttcgctgggagggctgtggccagggcccagagggtgggcacctgggcagagctctgagggctgagatcccagctggcatcctcattctgctccatcatgctcttaggtcagatgccatttactcagcccgttacgacggctctggccacatggaggtgcttcggggacacgagttcctgtcgcacccrtttgcagtgacgctgtacgggggggaggtctactggactgactggcgaacaaacacactggctaaggccaacaagtggaccggccacaatgtcaccgtggtacagaggaccaacacccagccctttgacctgcaggtgtaccacccctcccgccagcccatgggtaaggggctcggggcctcgagcagccggaagggagccagcagcctctttagaagctgtagaagctcttaggagaggagagggcagtgagaacaggagcaagtctgtgctgggatggcaggggtaggccggctgttgacagaggcactgtctagcagcagagaagggtctagtagtagcggctgctggaacagggggaggagagtgggcgaggaaggggtggtccatgtagggagcagcaagtcacaggatgctctggcttcttctcttctccaccctgcccccagctcccaatccctgtgaggccaatgggggccagggcccctgctcccacctgtgtctcatcaactacaaccggaccgtgtcctgcgcctgcccccacctcatgaagctccacaaggacaacaccacctgctatggtaggagcccctccctccagagccagtgagcaactgaggctggagggaaggccgcaggccccaggatcccggttgtcagctaaggcagagtcccagtcgggagggtcccgataggagaggctccagagacagccactgtgagaaggggctgcaggtctgccaggggggctgcacccagcggggtatgtccacggagccaagggccagtagcaaacagacggatccagaagaaggcagggcctgaaaccggattggtgggaagcacagaggcagggactgccttcagtgaccagcccatgccccacagagtttaagaagttcctgctgtacgcacgtcagatggagatccgaggtgtggacctggatgctccctactacaactacatcatctccttcacggtgcccgacatcgacaacgtcacagtgctagactacgatgcccrcgagcagcgtgtgtactggtctgacgtgcggacacaggccatcaagcgggccttcatcaacggcacaggcgtggagacagtcgtctctgcaggttcttcctggccctggatgcccaccagtggacatgggcacctccacccgccccttgctcccaaccctggtctacttggtccgagtggtccttctcccagtcctgttccccctcagtgctccagcctggtttcctgatcccttttctccagaaggcacactggctcccctcctgacccactgccctgcagacacccaacaactgactccctacttgtgcccccagacttgccaaatgcccacgggctggctgtggactgggtctcccgaaacctgttctggacaagctatgacaccaataagaagcagatcaatgtggcccggctggatggctccttcaagaacgcagtggtgcagggcctggagcagccccatggccttgtcgtccaccctctgcgtgggtcagtctagggcccagggccggggagcatggggtgtggggctgggaagaagaggaccckgacctttccctcttggcaccctccccccaggaagctctactggaccgatggtgacaacatcagcatggccaacatggatggcagcaatcgcaccctgctcttcagtggccagaagggccccgtgggtacgagcttccctgcccacccccacagcccctccstaattccttgaccagcaggtgcttgcagggtccttcagttgcccctcagcctccccagagccctagcttagtgcctgttctcaccatctgctcccttccctggatccccagccctgggccagactccccggcagtgactcccccttttccaggcctggctattgacttccctgaaagcaaactctactggatcagctccgggaaccataccatcaaccgctgcaacctggatgggagtgggctggaggtcatcgatgccatgcggagccagctgggcaaggccaccgccctggccatcatgggtgagggctgctgggcgaagcagagatgacgcagagcaggccaggccagacctactgggagacaggggctggcttggggcagtctctcaccatgtggggcgggcctgatgacttagggccaatgggcccttcaggagagctgggtgtggggccttcccaagggtctcatcccctcctgctgccccaggggacaagctgtggtgggctgatcaggtgtcggaaaagatgggcacatgcagcaaggctgacggctcgggctccgtggtccttcggaacagcaccaccctggtgatgcacatgaaggtctatgacgagagcatccagctgggtaggtgcgaggccgggcggccgctgggggctcaggggcaacaggggagccgtccagagctgcaggctgcagggccatggggcaagggagtaagtgggttaggctgtacccaccacccaaaggggctccttgtttccttaccacaaaggcgccttgtaggctcccagcagccctgttcacaaggccaggggcccaggaggacagaaaacctgagagctgggtagggtggtgacccccattaggtccagggtagtcagtgaccatcctgtttctgagcagcccaagcctgaccctgaggtcccaaggagggccacctaaccctttccctctgcctcccacctgcccccagaccataagggcaccaacccctgcagtgtcaacaacggtgactgctcccagctctgcctgcccacgtcagagacgacccgctcctgcatgtgcacagccggctatagcctccggagtggccagcaggcctgcgagggtcagtgcctggctttcctcccagccttgtcccagstccccaaccctgacccctcctaccctacagccccaccttcctcttcttaccttggggacaagactacattcgtcgtgtaggggacactggactwtgaagtggctatgactctccagtgcctccagtaggattttggaaaaatagatgtcagcaggcagatcggggcagctgcatggaagaggcatgctctgagctgggttttctaggacaagtaggatttggatgcattgttcaaaggagagggaactatacacaaggcaaggtgtgtgcaggagccccagccaagagtggtgggcaaagtgtggggaagtcctggagataaggctgtgagctaggcggggctcctgtgttctgagccaggagtgcctggaaagtgatgtttggggaagatcaacctggccgcaatggtggtggggaagaaacagaggcggttaaaccagttaggaggccattaggagtaatcagagtgtgagatgatgggcctgggctgggctcagtaagggttgaagaaaagaaatgaaacccagacgcatttcacaagaacctgctaactgatttatgagcttgctgggggacagcatttcccaaaagtgcattcctaggagcctccctctttgatgtgggtagattttaccaaaagaaactctgagttgaacaaagtttaaaagtgttttgtgctgcagaacttctcagagccttgaatatgtttatgtgtgccaagaatttttcaagcgtttggggttttccaaaactcacttgaccattcatttttttttcactgagtctgagcaaccagggaccatgtggggattcactttgggatgtgctgtatcaaagggataaaggcaagggaggattctgaggtgcatgggtagtggtgcctcaagacatgggaaaactgggccaggcgcagtggctcaagcctgtaatcccagcactttgggaggctgaggccggccgatcacttgaggtcagaagtttgagactagcttggccaacatggcaaaactccgtctctactaaaaccacaaaaattagctgggcgtggtggtgggcacctgtaatcccagctactcagaagacctaggcaggagaatcacttgaaccgggaaggttcaagggttgcagtgggccaatattgtgccactgaactccagcctgggcgacagatcaggactccatctcaattaaaaaaaaaaaaaaaaaagagccaggtgcgtggctcatgcctgtgatcccagcactttgggaggctaaagagggcggattaccttgaggccggggttcaagaccagcctgaccaacacggagaaaccctgtctctactaaaaatacaaaattagccgggcatggtggtgcatgcctgtaatcccagctactcggaaggctgaggcaggagaatcacttgaacctgggacgcggaggttgtggtgagccgagatcgcgtcattgtactgcagcctggggaacaagagtgaaattccgtctcaaaaaaaacaaacaaagaaaaacaaaagaaaagaaaagaaaaagaaatgggataactgggaatgagactggcttcggagtgaccttagggggttgagtttttgatgttggagagagggtgtggcatagaccagacagagggaggacaaagaggaaactaggatcaggctgagcaccaaactggaagtctagattttggagtcacctagtcctgattgtctggtctgaactcccagactttccctaaggaacttgcaggggtgcagggttgggttgtgctgggtggaggccggcagagcacagggtgagaaatccgagtctctgctgccctctcatggtggctaggggtcctgcaggtggttccccagagctaccagccaggtgcgcttcctcccggcccatgctstggcctcaggctagggtgtgtgtgctgggtggaggatagggatgatggtggggggggatgatatcaaaggagaagcagagaacagttggagggtgacaggaaccaagtttaagggagtgttggcgatacccatgccttaagtttccttgtctttcaggcgtaggttcctttctcctgtactctgtgcatgagggaatcaggggrattcccctggatcccaatgacaagtcagatgccctggtcccagtgtccgggacctcgctggctgtcggcatcgacttccacgctggtgagccatttggtggcagagggagttgggcgtggcgtaggagctttaggggtggtgtggtgtgccctgagggtccagtgagaggctgcctgaattggcctgaggtggggcacttgctacagctgccaccctgactccacctccccttcaagcacctggcccctccggcactctctcacctctgtcttgagccttgtgagattttgacccctcaccttacccctgccttattgggcatccccatgtcacctcctccacctccagaaaatgacaccatctactgggtggacatgggcctgagcacgatcagccgggccaagcgggaccagacgtggcgtgaagacgtggtgaccaatggcattggccgtgtggagggcattgcagtggactggatcgcaggtgagcagtgggcaggtttgtggggcttgrggtgtggcagaggactgggggacgaagtgagagraggagttggcgggagcaggaagaggagctgtaggggtgcctgggagcttggagacaccaggtccacctgtcctcacctaacctccctgagccccaccaactccctccttaggcaacatctactggacagaccagggctttgatgtcatcgaggtcgcccggctcaatggctccttccgctacgtggtgatctcccagggtctagacaagccccgggccatcaccgtccacccggagaaagggtgaggagctggaaagactggccttgtcattctgcccatggcccatgctgatgaggccctgtctcctccagggtctgaggactgacccccacttccacccccaccctacaggtacttgttctggactgagtggggtcagtatccrcgtattgagcggtctcggctaratggcacggagcgtgtggtgctggtcaacgtcagcatcagctggcccaacggcatctcagtggactaccaggttcgcacgccaacttggccttggatccgatggtagacccctgacccaggctyctgttccctgtgatgagcccattctgggaggacttggagcccaggggaagtcacagggtctcccagcccagccctccacccagagtaggactcctgctaccacagagatgatgggcaggggtcgctcagaagtggggagtgggggagtggagagatgcctggaggtcaccttatcagcagggcagtgggcaggagtgtatgcaggaggcaggagtgagttaggggaggctgaactgagggcctcactctggcccaggcactccctgctgccccagacatggggctggcagygagctcagccctggaggtgaggtgggtgcctctggcctgtaggatgggaagctgtactggtgcgatgcacggacagacaagattgaacggatcracctggagacaggtgagaaccgcgaggtggttctgtccagcaacaacatggacatgttttcagtgtctgtgtttgaggatttcatctactggagtgacaggtgagggcttctgtcctggcctcctcagctgatctcttccttccctcctgcctccactgatgccctgcttgtgccctgtccttccctcaggactcatgccaacggctctatcaagcgcgggagcaaagacaatgccacagactccgtgcccctgcgaaccggcatcggcgtccagcttaaagacatcaaagtcttcaaccgggaccggcagaaaggtgaggctggggctctgggctggggtggagaggtgagggggactctggcctgggagagtgctccccagggaacccagtgtgagagggctgggagacaagttagacccatggggcaacttccgatggcccgagagacccagggatggggaggaaaggctgaggtgctctgggacagatcttggcattgggctctgggccctggagggtcattcaagctgggaataccgaggcagagggcagagctttcgccaaagcctggatgacaaaggcaccagtgagcctttcccaaggcaggccctgccctctgtaccctcccctcccccaggcaccaaygtgtgcgcggtggccaatggcgggtgccagcagctgtgcctgtaccggggccgtgggcagcgggcctgcgcctgtgcccacgggatgctggctgaagayggagcatcgtgccgygagtatgccggctacctgctctactcagagcgcaccattctcaagagtatccacctgtcggatgagcgcaacctcaatgcgcccgtgcagcccttcgaggaccctgagcacatgaagaacgtcatcgccctggcctttgactaccgggcaggcacctctccgggcacccccaatcgcatcttcttcagcgacatccactttgggaacatccaacagatcaacgacgatggctccaggaggatcaccattgtggaaagtgagcccagaccctaagtcttcccaggaagtgggwcatggggcggggagcagcacagactcttagaccccagccaggcactctaccctaggtctgaatcccagcagctacaactcagctgaatccaactgcacccccgcagttacatgactcctgatttggagtcagcgtcagcccccgacttcctcccgccactggtcctagttctgccttcagagctgcacagaacaagcgagaggtctctgtggagcccaacgctcacaaacccaggctgcagacatggggctgagctccagtcacttgggctttcaataacttgggtcagtttcctgctcttgccaagcctgagccttctcatctgcgtggatgagtgtctcatctgagacaggattcctcgagctgctgcgcaggaaggcttagctcagtgatgctggggacggagtgtgtgctctggaaagagcagttacagtgtcagggctgtcatcacaggacagcctttcagctctttgaaaactgcatcctgctacattttctcttcttcagcctggttaccaccgggtcccttgactcattcatttgctcatatattcattcagctggtccataaagacctgccaggcaccgaactaggtgctacgtatacagacctgtcctttcagccttttctgggacattttctgctgcacgtagtccagcctgcatgtctgtctaaaaatgtagcayccgaagctaaactcggtactccatgctcgtagcttgatcaggagagactggcacatcaatccccagacccctggaagggatgtcccctcacctccggctgtctgcagrccataccacagcatggccctttggcagccaccatcgcttatagccactaacactctagtcttttctcttacactgctgttcggctgtgtctctcactgtgccttggttctttaacctgagtttaagatgtctgctttataaaataatcaatccagctcagggtctttttaagtagggggctccccagtacagcccaagcaggatttgatttacagaaatctacattgcactcagctcagcagaactgcagctccaggaaagtgcaaacacaccagaaagcccgattgccctcagtgggagagggttgagaggtgaccacaggtcatttgagtgaggacagcagaggttgggggcactgagtcagaccctggtgcccccgagccctctctgctgcacctcttgcactcccataccccacacttcgccttccagccaggagagcacctgccccaggctgtcccccacggctcctgtgcaggctgccctctgggccctcctgacaaatsgctgctcctgtctcttcacagacgtgggctccgtggaaggcctggcctatcaccgtggctgggacactctctattggacaagctacacgacatccaccatcacgcgccacacagtggaccagacccgcccaggggccttcgagcgtgagaccgtcatcactatgtctggagatgaccacccacgggccttcgttttggacgagtgccagaagtgagctgctgcctggggatgggggtagcagggagaggtgggactcggggtggcagaaactccccaggcagatccaagcgggggtgcaggagaggcaggccctcacttgagctccacccttcccctgctgtgtgatctggggagaggtgcaaaagcttcctaagcttcaggttcctcttctgtgatacaagctggctaagattccagctgcctgcaccaaagggagcatcaggactgtgggggacgctctgcctttgtgattgattcattcatcagagcaccatgttggaggcacagggtagggcctctagctctgggatccaaagcttcaggcaaagaatgtttgtcgaacccttcgtacagaagcctaaggctgggcctaccaagccacctagctgggttgagaagtcatacttgtgggaagtaatggtaactggcacagggctgtatacgggtgaccacaggtgtcatgaaggcagtagattggcccagagcctggaactggaaaagacaaggaaggccagctcggacaggggaagtgctttgagcaaaagcctgaagaaaggcaaattcaaggcagggaggacagagggggacctctgcatgccatagagcataggcaggcctgagcccagccaggaagtgaggtcagggtgcggaggagttaggagcacaagccaggacaggtggcagaaagcacccgggggtgggtgctccccctggagggttcacccgcagtcagcctgctctgttctcccgcaggggcagccctcatcccggctgtttgggcctctagtgagccaccccctcgccttagggatccaggcccacatgttagcaacatttttttcccaattcagcagtgcttggaatgtttttcaaaagctttactaggaaactagtaaacacaacccaaagcagctgtatagatacgtgagtgtcccgaacccagattccccccaccagtcccccaatgtcagtcacctccaacctggctcaaggaccctctgtttcctcctgcctctgtcatctggcacatctgcagctgatgatgaaggtccagtccccccttccatgaccctcggctgcctcacctgtctggggatggcctcagagcctgtccctcatgagtctggagcttccctggagggtccagcaaggctgcctggccctcgtcccagaggacgtgaccccctggctgcccaccaagctcctttcttatgaggccaggggattccatcacgcattcagcgagtggcttttgagggcaaagaaggtgcagaggacccagtggggagcgcgaggggcgtcatgaagagcttcgtggctgtgtgctgaggactggccccacctggaagtcagggaacgtgtccttgaagaggcggcatgttagccagcgtctgaggatggcaggagtggctgggtgggagcatggtcccagtgcccaggagaaagagctgagctggcaggaggggccctccccctggccacaaggagcaggcactttcggggaatcagaaggagccagtgtggaccccagtggagagggcaggggcaagtggagactccaacaacccagcctcctcctgagccctccccgcgtcagcactggagcactgatggccctgtagagctcacagtaggatagttagaaggtccgccatgttcctggacactgagcacctaccccaggaaagnnnnnnnnnnnnnnnnnnnnnnnnnnnnnnnnnnnnnnnnnnnnnnnnnnnnnnnnnnnnnnnnnnnnnnnnnnnnnnnnnnnnnnnnnnnnnnnnnnnnnnnnnnnnnnnnnnnnnnnnnnnnnnnnnnnnnnnnnnnnnnnnnnnnnnnnnnnnnnnnnnnnnnnnnnnnnnnnnnnnnnnnnnnnnnnnnnnnnagtttgttgacgccaggaggaaaaccacttctcactgcaggtgtgagtagtttcacctgaggtgtaggagttcctggtggggactgacaggccaagtccaatcctgacaagccaggaagatgactggccactgccccaggatacccattttcccttatggaggctagaaggacacgccgcctccctcccaacttacatcccgattccagagccaccgcaaacccctgctctcctccaggatgaggcccttaagatcagagcttctcacgagctcgccgaggctcagggcagccagtgtctccagaggggcagagcagcaccattttcctacgtgagcccagcagaaggcgggatagttcaatggtgctggagacgctgggggtgggcaagaagggtgtgacctggagaggtctgaggagacaagttcacaggccagaggacagatctgtggccagaatggtgaggggcagaggtaggaggaggccagaggcactggggtgggggcgggggcaggtcctgttagggaactggagaacggagctggcttttgtgtggcttggtggtctcagactccactgtgcctaaggatcgcctaggagcaagagaatgtggagtcccctgccccgccctgggcctagctgagtgacaagctctgggaccgaggacccagggctcaccatccaatgccggtggtccaaggaccactctgtcacacccagggtagtgcatgaccagccctgaggccttccacagcccccctccagcctcagcaccaccccacaaggagcacggcataattgggggctggctgttcccattgcctcctttactgagaggaaaccagggctcagaggggcgacaggctcattcaaagtcggagccgttacgaggcagaacggtggctccaaccccaaacatgcaaaggcctcaaagtacggagaaggggactcttgagagctgcttgaggataggacccacataccccaggacctgggacacatgccacactcagctccacaagggcttcctgaatgatctggaagacagccagcctccctgcacagaagagagcagttaagaataaactcctgggaaatactcacatagtgtgtgccatctgtccttaagatggagattaacttcttccactctcacatcctgcgaggcaggtggtgctaccatccccacctcatagaggaggaaactgaggcacagggcagttgagtaagttgcctaagggcacctagctggtgggtggtggagccagggctggaaccccaggggcctgtctcacttggctgcaccggctctcttctcagcaagtagacggtcactgcccagatactgcaatgtgaatatctcacacttggccctcatcccctcacactcagccacctcgtgtgtgaactgtctgtgcaatagtggggcccttcctgggcattggggcactgctggcctctatggctctggggtggctttgccctggcaggcttcyaggttccaggtgcctacgcgtcctggcctgtgccctctgttgtggattctcaggctttgcctcctgatctctggaccctcttcccccagcctcatgttctggaccaactggaatgagcagcatcccagcatcatgcgggcggcgctctcgggagccaatgtcctgacccttatcgagaaggacatccgtacccccaatggcctggccatcgaccaccgtgccgagaagctctacttctctgacgccaccctggacaagatcgagcggtgcgagtatgacggctcccaccgctatgtgagtctgcggggtgggtgagctggcgggcggctgaggggaggccagggccagggtcagccgtcaaccaagaccgtccaggcacagacatggtgggaacagctgggaggaggtgagtgcctccaggccccagcctcggtcaaccccaccctgtccagcttgctcctcatcagctagacgagggagatagcaggatgcctctgcgggccctcattctgtagctgtcagaggccaggccaggctgtggtccggtggagactgggcaagaggcctgagcgatgctgtgacggtgatggtgctgtctccacaggtgatcctaaagtcagagcctgtccaccccttcgggctggcygtgtatggggagcacattttctggactgactgggtgcggcgggcagtgcagcgggccaacaagcacgtgggcagcaacatgaagctgctgcgcgtggacatcccccagcagcccatgggcatcatcgcygtggccaacgacaccaacagctgtgagtggggctgccgccagctgcctcaccctcctgcnnnnnnnnnnnnnnnnnnnncacaccacacatactataccacatacacatgcagtacacacaccacaccacacacacaccacatacacagataccacacacactgcagcacacacaagacacacaccacaccatgcaacacaccacacacacaccactgcaacacaccacacacacaccacatacacacaccacatacacacaccacacatgacacatacacaccacacataggacacacatacacatgccacacacctaccacccacaacacatatcacacacacaccacacagcacacacacacaccacacaccacacgtaccacaaacatgccacacacacacacacatctcacagacatactataaacaccccacaccccacacaccacaccccacacacacttgcctggtcctgctctccctgggcctccattacacagacacacacagctgtacacacctttggaaccgcaaaacccccagtgctcctgtaccccttcccaccaaggcatctacgcacacagatggactctgcacacgcctggcatctcctccacgttgcacacacacattcatgtcacacccgcccctcagggctcatmcatgccctcggtgcccctaccctcaccctggtcactctcctcacttggagccacacagacagccgagagcctgggtgcacgtgccctcagtgggcacgagtacatgccccagcgccccccaccacagacctgcagctttcccaggtgtctcccatgcgccctggggctcactactgcacccrtgatctcagggccctcagactcgaatctctcagaaacactcctcaaagcccacggtgccctgcctaaaagcacacacatcctcaacggcacacctgccgaaaaccccatgcacctggccctcccacagcagccatccccatgccctccccactggctgcaagccrctgtgcctgccgtgactgagcagaggcttgggagctccatgaagtcagtgaatgggtgggtgcactctgggtgcatgcacagcagagaacactctccagccctgcgcccaccctgtccctgctcaggtgaactctctccatgccgaatcaacaacggtggctgccaggacctgtgtctgctcactcaccagggccatgtcaactgctcatgccgagggggccgaatcctccaggatgacctcacctgccgaggtgagagaggcgggggggaggggctggcggggaacccaagcacacaccagggatggtgaccatctcccctacatgctccagcccagccccccaaagccttttgccaagaagacgctgatgatgacctcagctccccgggggaggaggcgtgggcactggggcccacagcgctggctcagaaagctccctccacctccctccccagcggtgaattcctcttgccgagcacaagatgagtttgagtgtgccaatggcgagtgcatcaacttcagcctgacctgcgacggcgtcccccactgcaaggacaagtccgatgagaagccatcctactgcagtaaggagccccctgcagcccctgcctcttccaggcccagagcccaggtcctcctcccccaggcccctgcaggatggagcaggatcaggacccagcttcctgaccatgagttttgggagctcatgaagggcagaaccactgttagcctggactgggcctttgggtttgggggtggccagctggacacgtgcatgacgtctcagggaggcagccctttccctgtgcctgtggctgacacgcagcctactcctccatttgcagactcccgccgctgcaagaagactttccggcagtgcagcaatgggcgctgtgtgtccaacatgctgtggtgcaacggggccgacgactgtggggatggctctgacgagatcccttgcaacagtgagtgaggcgcactggcataacccatctgtacctcagttcctgccccacccctccctggccaagctttgtccctgggccccgtggtgtctggttcaaggcactctgtgacaggccagggcaggtgytgtgggccaggagctctgtcctgcgtccttctggcccccacagagaaaactctggcctgacgatacggggcgggcactgttctagagacagcctgtggtgtgggcgagttccgctgccgggacgggacctgcatcgggaactccagccgctgcaaccagtttgtggattgtgaggacgcctcagatgagatgaactgcagtgagtgacgccctttgctggcacctcctgggctcctccccatygctcactgcatctcccgccttcaggccctcctgcacctgcccacattcctctctgccttccctcatccccgctgacagcctccatctccctgaggccctgtccccatcccgctcctgctcctgggctctcgtggggttccgagagggggcagtgagcagatggtgcagacagtgccccaccagaagggcaccgttcaacttttggaaacgcatgaaggctccatagggctggcagctgccccagtcgggggtgatccagggggaaccaggtatcacccnnnnnnnnnnnnnnnnnnnnnnnnnnnnnnnnnnnnnnnnnnnnnnnnnnnnnnnnnnnnnnnnnnnnnnnnnnnnnnnnnnnnnnnnnnnnnnnnnnnnnnnnnnnnnnnnnnnnnnnnnnnnnnnnnnnnnnnnnnnnnnnnnnnnnnnnnnnnnnnnnnnnnnnnnnnnnnnnnnnnnnnnnnnnnnnnnnnnnnnnnnnnnnnnnnnnnnnnnnnnnnnnnnnnnnnnnnnnnnnnnnnnnnnnnnnnnnnnnnnnnnnnnnnnnnnnnnnnnnnnnnnnnnnnnnnnnnnnnnnnnnnnnnnnnnnnnnnnnnnnnnnnnnnacttcgcctgccctagtgggcgctgcatccccatgagctggacgtgtgacaaagaggatgactgtgaacatggcgaggacgagacccactgcagtgagtgrycactgcacccactcagtgctccaagagcctgctgggccccacttcttagtcccccccagcaaatgcccccttggaaaagggcatccagagccttcaaccccctgccccacaccccaactcttgaggtcagactcagagactctgcctctagctgctgctgagcycccccacagaggggtgctgtgggcatctctcctgtccttcccatggcatcagcctccccaggtgggtgacccccacccttccccatctaactgtggcttctgactgccccagacaagttctgctcagaggcccagtttgagtgccagaaccatcgctgcatctccaagcagtggctgtgtgayggcagcgatgactgtggggatggctcagacgaggctgctcactgtggtaaggaagctgggattgggccgggggaggtgccccagggagggacagaccccacccaactccaccccacacacagacacccctgcagacgacggcgaaccatcacctccactgctagacctgatctacccgctcctaagtctctcagtggccctctctccccctacagaaggcaagacgtgyggcccctcctccttctcctgccctggcacccacgtgtgcgtccccgagcgctggctctgtgacggtgacaaagactgtgctgatggtgcagacgagagcatcgcagctggttgctgtgagtggcggggccacgtggagcgggtggacagcaaatggccacagtctcactttgcagatggggaagcckgggtgcaggagaggaaatgcctcagcgggrtccactgggggcggagccatagctgtagcccaggtgtccagactcctcatccagtgccctgcccactctaccaggagaaccacaggaggttagagtgagggacggtcggccgctggccaggcagggctgaagggctgtgtccacctctgtccacagtgtayaacagcacttgtgacgaccgtgagttcatgtgccagaaccgccagtgcatccccaagcacttcgtgtgtgaccacgaccgtgactgtgcagatggctctgatgagtcccccgagtgtggtgagccttcggcggtggtgggaaggaggccctgccctctgccgggccagggcatcagcctcacaggtccattcctcccccagagtacccgacctgyggccccagtgagttccgctgtgccaatgggcgctgtctgagctcccgccagtgggagtgtgatggcgagaatgactgccacgaccagagtgaygaggctcccaagaacccacactgcaccagccmaggtgggccccagacctggctcccctctgccccctccccagactgcctgagaccccgctgacctgccgcctccgcccctcygcagagcacaagtgcaatgcctcgtcacagttcctgtgcagcagtgggcgctgtgtggctgaggcactgctctgcaacggccaggatgactgtggcgacagctcggaygagcgtggctgccacatcaatgagtgtctcagccgcaagctcagtggctgcagccaggactgtgaggacctcaagatcggcttcaaggtatgcccagccctggggaggagcttccacaccccagacgtgccaggaacgcctttctccactgccttattcattcattcatcccctagacagtggggatacagcagtgaatgagacagaaatctgcttggttggggtctgcctctatctggcaggtagagagccagcagatttgctgacagatgagatatgcagtgtgagaggaagagaggagtgaggcatcaagtaggcaagagatacacaggtctggagttcaaggagaggcccaggctggagagggaagtctgggagttatcaccatagagatgctatttgaatctgtgagcctggatatgattcccaagggagcagtgtaggtggagaagagaggagtccaaagtctgagccccgagctgagcaacagccaggagcagggaagtgaggggaccagcagaagagcctgagaaggagcagctgctgaggcaggagaacagccacgagaagaaagcatttccatggggagggcacacgcagctctgtcaaatgacactcgggggcacacagaaggaggcctgcactgtgggccagctgggtgggctcagtacccatatgctgctgcccctagtgaggccgggtagagggaattggagtctctgagccaggtctccagggtgggaggcccagaccctgccacaygcccagcccaaggctccctgtgyctgcagtgccgctgtcgccctggcttccggctgaaggaygacggccggacgtgtgctgatgtggacgagtgcagcaccaccttcccctgcagccagcgctgcatcaacacycatggcagctataagtgtctgtgtgtggagggctatgcaccccgcggcggcgacccccacagctgcaaggctgtgactggtgagatgygcgcttggagggcatgaggtgacccaggctgtgtgggactgcccgggtggcagagctccagacaggcaggagaccagggccgctagaatgtgccaggagctgaggcaagatcctctgtctgcagacgaggaaccgtttctgatcttcgccaaccggtactacctgcgcaagctcaacctggacgggtccaactacacgttacttaagcaggtaccaaacccaggccctcctccccgctgcccatctcccagacccagcacagcctcccytgcaagtctccccgcttaggtccaaccatccctcccccagatgcaaatgtggcccctgttgccacaaccgacttctgctgtccttcactccccaaatccagggcctgaacaacgccgttgccttggattttgactaccgagagcagatgatctactggacagatgtgaccacccagggcagcatgatccgaaggatgcaccttaacgggagcaatgtgcaggtgaggcgggyggccctcggcgaccaacactggcccgcctcagatgactgttttcagatcgtctctccttcccgccccaccaacccaaattgcttccttctcactccactagtcactatatgactgcttgttctagctgctcactctcctctgggcccagacagcaaggactgggagattcctcttgcccttcccctcgctgccagcctcatgtctccttaatcatcaggaagttccctgtgaggtctggccaagcactgtgaggcttggggcgtggtcccattcacctagagccccctctcctagagcctctgctgacacctacacagtgtcaggcccaggactgggcattttacttccatggttctcccaccagagctgtcagarggagctctaccccattttacacgaggggaggctgagcctcacagaggcttgcaggtcctcccccaggtcacccagagctctccctcccctgccccttcctgcaggtcctacaccgtacaggcctcagcaaccccgatgggctggctgtggactgggtgggtggcaacctgtactggtgcgacaaaggccgggacaccatcgaggtgtccaagctcaatggggcctatcggacggtgctggtcagctctggcctccgtgagcccagggctctggtggtggatgtgcagaatgggtatgtggctgaggagggttgrgggagcccctgaaagcagcatccaagcccagcctccctgcaggccactggtgcgatgggttacgggatctcccagggctcactgcctacccatcgccaggtacctgtactggacagactggggtgaccattcactgatcggccgcatcggcatggatgggtccagccgcagcgtcatcgtggacaccaagatcacatggcccaatggcctgacgctggactatgtcactgagcgcatctactgggccgacgcccgcgaggactacattgaatttgccagcctggatggctccaatcgccacgttggtcagtgtgccagtgaggctgtccaggcacagcagactyagtggggatggaggtctgaagygacaggggatcaagttttgggggcaagagtggacataaaaagyggaggatatggcctgaggacaccactcactggggtgtggggttcagagcaccccgggggcttccccagcctggccaccacccagctcccttgggaaggaagaggagaggcccttcccttgtatacacagttctggaggactggccccaaggagggtggggnnnnnnnnnnnnnnnnnnnnnnnnnnnnnnnnnnnnnnnnnnnnnnnnnnggcaggaacttgccatgaggcagtctaggtttgaactccagctctgacacttgttagctgtgagaccatggggggtctgtaccatgaaccatctgtaactggggctgacacccacctctcagggtgrtggtagggcttgaggaggtggagtgggccggcaccctgtccgagctccggctgactggcmctgtgcctgccccttggccctgcagtgctgagccaggacatcccgcacatctttgcactgaccctgtttgaggactacgtctactggaccgactgggaaacaaagtccattaaccgagcccacaagaccacrggcaccaacaaaacgctcctcatcagcacgctgcaccggcccatggacctgcatgtcttccatgccctgcgccagccagacggtgagcaggcaaggggtgggrgcaggcgaacggtgagccaggcaccggggtccctgggagttcctgctcrtcccttctctagcattgaccaagccctcctggccagacactgggagactccaggagggtctagacaggggatggtctggctcccgggagcttcagcccggcctggatccagccctggagtctggcagcagcaagtccctgaggccagtcaagtgggggtctgggtgcccagcccccagaaggaaggcaggccggcccctgggagggaagcacagaggaggtggggagctggccttcaggcctggcctgatcctgggaccttagaatcctctcctatctccagcttcagctccctcctaaaagaggcagggttcagacccacccgcctctgtccaggatagagtgagtgaggcagcctttggtaggccagaaaatgtcaccatatttcacgacgttttctctggcagtgcccaatcacccctgcaaggtcaacaatggtggctgcagcaacctgtgcctgctgtcccccgggggagggcacaaatgtgcctgccccaccaacttctacctgggcagcgatgggcgcacctgtgtgtccaactgcacggctagccaggtgaggctgtcccccagaccccatcaccagtgcccgctccccaacccccaaatcctccttggaccccaacacctgctctgtcctartgtcctcatgcatctggttttcccacactaacacccccacatttcttgcctacctcttgtctccccacagcaatacttttacccccgtcacctcacacagacacctccacaccctaaccttgaccctccttgccatgcttcagtgctgccttccccaccctatcccacgcagccccatacctggcctttccgaactcaccatagcccaacctgccccataacaccctgacccctgcctcaacttctttgaaacatccaagcccctcaaaagaaagacttctgagtcccccagacccccaccaacccctcttgcccccacctgccctccagtttgtatgcaagaacgacaagtgcatccccttctggtggaagtgtgacaccgaggacgactgcggggaccactcagacgagcccccggactgccgtgagtgcctgctgggggtgacaggagggcccccagctgtgtcggaggcctgactcctgaggctttgaatggccactggagaggctggggctgtggtgccctgcaagtggacctggccgtgtccaccccagccgctctgactctgagcctccctctctggcagctgagttcaagtgccggcccggacagttccagtgctccacaggtatctgcacaaaccctgccttcatctgcgatggcgacaatgactgccaggacaacagtgacgaggccaactgtggtaaggcgctgcccgcccaccctccctccttccccagcatcttccctgccccaggatttggggctttcaagtgcagggaagttgcagcccacggcagcttgctctccaggctggattcctatggctcaagcctgtgtcctccctgctgagggatgggcaccctctccctgcccctgagtcctcccttcgccacgaatcacctcctcctccctccacagacatccacgtctgcttgcccagtcagttcaaatgcaccaacaccaaccgctgtattcccggcatcttccgctgcaatgggcaggacaactgcggagatggggaggatgagagggactgccgtgagtgtcagaggtggtrgtgggccggtggtgggagatgacacggaagcagggcaggcagaatctccccacagctttgagaggctctcaaataactttagtagatgggcaacacaaattatattgggtrtaacttgctttgctcataaaaatcatcatgcatgatatagagacatagagatccagaaaacaaaaagcaccaaaactggggataaactgttccttcctccgaagaagttgctggcaggaccaaggccagggcttggaagagagagaagacagtgatggtgaactggagtggcaggtgtaagggagggccctcattctcttgcccaccccacagccgaggtgacctgcgcccccaaccagttccagtgctccattaccaaacggtgcatcccccgggtctgggtctgcgaccgggacaatgactgtgtggatggcagtgatgagcccgccaactgcagtgagttgcctggcctggagcccagcttccctccccagtgtctgctgctcacaccaccccgacgtgtgaccccctcagtggctgctccctcactctccccaccctcccggcacactcctggaaggagtctcatcctcaccccatgcccacccgcttgcagcccaratgacctgtggtgtggacgagttccgctgcaaggattcgggccgctgcatcccagcgcgttggaagtgtgacggagaggatgactgtggggatggctcggatgagcccaaggaagagtgtggtgagccgagaccccactccaggaggaagacagtctacctgggtgggaggcatggcacccctggcaggtggagggctgggggccgcctgcttaccggtctcagcgtggccctgctgctgggcttcctgggcctgctgtggggytggggaaggaggcctggctggagctcacttccccacatccacccgtgccccatgtctcccagtttccctatccctgcccctgcccacgcctcatccacacatacctgtgtggagttttccctgcccaccctatgggatctgttcatctccttcccaaggcagctgcccacacacacacccccaaccatgtctcctgtccccaaacctccttatagaccccacgtctcaaaacaccgcctgggctccccgcggctgacccttcccaagctgggatgcccaccctccctgccaggccagcctgaccatgcctgcttggaccctaatgtctgccccagccctttccctgactgccctgacacttgcctcctccagatgaacgcacctgtgagccataccagttccgctgcaagaacaaccgctgcgtgcccggccgctggcagtgcgactacgacaacgattgcggtgacaactccgatgaagagagctgcagtacgtccccacccacccagccccgcatgagcccctcccaggcctggcccttgtctcgcggccctcctgccacaggccgcgccagagctggtggccacctcccagggtgggggcaggagccgccctcctcacccatcccactccatgtcgtgtatttgagtttgtgccatttcacctcatctcatgtttctctccattttcacactgtcctctcggggttgcagaggtaggtgtctctgatgtgcccgtgctcccaccatacccccacctctgtcccagagccccccatccctgtgctgtgcctctacccatcatccttgattgacctctccccaaaccctggtgcttgtctcagtggtcttgcccccgctcccctccccaaacacagtctgttctgagggcaaggccagggacctgtgtcctctctggtgtctgtcccatggggtaagtgcgagcccgcctgtgcccagctgttccataggagcagccagtgggctctgccaggactggctcggcctctgggtcagtcagctgyggccttcagagacacggggatgggccttgggctcgggactgtggcactactgaggcctggagtccttgtgcccaccctcctgggcctgtctccccctgtccttcccagcccctcggccctgctcygagagtgagttctcctgtgccaacggccgctgcatcgckgggcgctggaaatgcgatggagaccacgactgcgcggacggctcggacgaggtgggcagggagatgagaaggaagcagatggcctcagaggagttcaggcagggcttggggagtgccgagaggtgaccggctgcctgtgcccatgcccacagaaagactgcaccccccgctgtgacatggaccagttccagtgcaagagcggccactgcatccccctgcgctggcgctgtgacgcagacgccgactgcatggacggcagcgacgaggaggcctgcggcactggcggtgcgccccttggcttggtctccctgggtcctccctctgctgcccaccccgccacatggcccagtcattcactcattctttctcttctgtattcattcttcatgcaacaaatatttattaagcatttaccatgtaccaggcactgccataggtgttagggacgtagtagtaaacaagacacagggcccctgaatacacatttttgtgcgggttgtgcccagctcaatgccccctagtctaggggaccagttgagctgaaatccagcaaaccctgagggctgtgcccatctaggccccaccccacaagtccctccgagacagtctgctgccacaagaagaaaagccctgcctattttcccttcctgggggcagtgagacagtgcctgtccctcgctgacctgcctgggctctgcagtacagagggggcaggtgaagcccgggatgagaaaagactgggccttggagcggaaatcccaactgtgcgggcagatgtcttggctctgccttggtaggccaggcacagggatgggaacccggtcttccattcccagcccagtgctgttcccacgtccccgctgtggaactacacagcccagtgctgttcccacgtccccgctgtggaactacacagcacagtgccctgccacataccagagaaggagtgccctctgaactcctccagacacccctgaaaaatggcctcttctcccctaaataccagagggggcagtttggccccaccaagtagaaatttaagagacctggttccaatttggctgtgccactgcttgcctggtgacccctctgagcctggaacccccacctgtggagacaggggtctgggtgggctcatggctcattctatctcttggctccccctggcaccagtgcggacctgccccctggacgagttccagtgcaacaacaccttgtgcaagccgctggcctggaagtgcgatggcgaggatgactgtggggacaactcagatgagaaccccgaggagtgtggtgagatttggggcggggctcccaggcttcccagtggccagcaaccacccccactcccaagactaattctggctctgtgtccccctggctgctgcagcccggttcgtgtgccctcccaaccggcccttccgttgcaagaatgaccgcgtctgtctgtggatcgggcgccaatgcgatggcacggacaactgtggggatgggactgatgaagaggactgtggtgagcagggggccgacgagaggcctgcaggggaygggtagtgcacagtggggtgagtctggtcctcgtgggagctgcactggggttagggttaaccaggaggactmgcccaggaaggggaggatccattgctaggagcctgggggcttttcgttaggaaagagaagcccctggggaaggctctgggggctgcctgatgccttaggtcttggaggtggggctgggaacccaaatgtttgacctgctccccctgcaagccttgtcacttaggaattgggagccactgttatctatggggttgccgtgggaggaggaggcaggggagaatacccagggcctaaagcctctgccctcctcagagccccccacagcccacaccacccactgcaaagacaagaaggagtttctgtgccggaaccagcgctgcctctcctcctccctgcgctgcaacatgttcgatgactgcggggacggctctgacgaggaggactgcagcatcggtgaggcccggcagcggaccggacgctggtggggagtggggagagccaagccctggcctggggtggctcaagggagggcatccactctctgtcccccacagaccccaagctgaccagctgcgccaccaatgccagcatctgtggggacgaggcacgctgcgtgcgcaccgagaaagcggcctactgtgcctgccgctcgggcttccacaccgtgcccggccagcccggatgccaaggtaggaaagcggggcagagcaggggtggacaccccaactgtggactctcatgaccctccctgtaacccttagacatcaacgagtgcctgcgcttcggcacctgctcccagctctgcaacaacaccaagggcggccacctctgcagctgcgctcggaacttcatgaagacgcacaacacctgcaaggccgaaggtgccggagccaccagagggcagaaaggctgggtggggcagggcgaccaggatatcaaacggggccgacttggaatggaatgtcttcctgcggacatcttgcccagacaagaagccccagamtcatagttgcagctgcctgagcacagtsctggcccagcagtgggggcaggtcctggggctggctgactgaaggagtctggggtgtggcagtgctctgaattgcacacacacctcctcacccaccactgccaggacgagagtacactcagacacgcattgcacactcacagtcatgggggcctcacctgcacattccccacatgctttgatgcccaccttgccttccacatgcctgtacacagacattcacacacacccctggcacacacacccccaccatgcactcccatgcacaccctcgtgctccatgccaagcacacacaccccatgtgcctatgcacccccgagcatgtgccaggcagtttgtagcagagagcgtggtgatgccatccagcagccgtgaggaggtggaagtctctgggtctggaggggcagggacagctttctgactgaaaggagcgggtcacagtggatcagctcaggggaggagaggaggaggtccagaggctgaggttggagcctgcaaccctgagcagggagggtaagcagcagcttctggccggagcagatggtcctaccaggagatgggacagtgttcatgtgaaaggagctgagctgggtggggtgcacacctgcatcccacagccccagccctggcctcttgcttctccaggctctgagtaccaggtcctgtacatygctgatgacaatgagatccgcagcctgttcccyggccacccccattcggcttacgagcaggcattccagggtgacgagagtgtccgcattgatgctatggatgtccatgtcaaggctggccgtgtctattggaccaactggcacacgggcaccatctcctaccgcagcctgccacctgctgcgcctcctaccacttccaaccgccaccggcgacagattgaccggggtgtcacccacctcaacgtgagtgcccaacctggcgtggatggagtggaagagctccatagagcaggcggttcagagcaggatttgaaaagggcagtgctggctaggcgcagtggctcacgcctataatcccagcactttgggaggccaaggcgggcagatcacctgagatcaggagtttgagaccagcgtggcaacatggtgaaaccctgtctctactaaaaatacaaaaatttggctgagcgcggtggctcatgcctgtaatcccagcactttgggaggcagaggtgggtggatcacgaggtcaggagatccagaccaacctggctaacacagtgaaaccccgtctctattaaaaaatacaaaaaaattagccgggcatggtggcgggcgcctgtagtcccagctacttgggaagctggggcaggagaatggcatgaacccgggaggcggagcttgcagtgagccgagatcgcgccactgcactccagcctgggcgagagagtgagactcggtctctaaataaataaataaataaataaataaataaataaataaatagagactcggtctctaaataaataaataaataaataaaataaaataaaataaaaatacaaagattagccaggcgtggtggcgggcgcctgtaatcccagctactcaggaggctgaagcaggagaatcctttgaacccagaaggtggaagttgcagtgagccgagtgccactcggttgcagtggcaccaaggttgcagaatagcactgcactccagcctggatgatagagcgagactccgtctcaaaaaaaaaaaaagaaaaagaaaacaaaagggcagtgcgaggggcaaaggttgagagtggggcagggggcagttttaggattgtgttctgaggcatggccagcgggaagacagagcagtgggaatggtcagcagctggctgtgctgcaggcagcccagggcacagggcatgatgggcaggcagacagccctccggcaccaatcccccatccttgccacttcccactgtgtacgtcttagctacctcatttaacctctttgggtttcactttgtttatcaataaaattaggtgatcatcgccattgcacaggcttcagggagggctcaccagccacgtgtgagagctgcgagtctggcgcataagctccatgccggttgaatctctttaaagccagggtcctggctgtgagcctggggtgaygttccagcaggctggcagagtggtggcggggggataatggcaggaagacaaagcagtggcccctgaacctgtggcttccattcagatttcagggctgaagatgcccagaggcatcgccatcgactgggtggccggaaacgtgtactggaccgactcgggccgagatgtgattgaggtggcgcagatgaagggcgagaaccgcaagacgctcatctcgggcatgattgacgagccccacgccattgtggtggacccactgagggggtgggcaagggccctggggggaggcctctgggctggtggtaggaagcccccgggacagggttgggggctgcacccacatgcgtgcccttccctcccaggccagcctgaggacagagtccttttcagtcccttgggtcttctcggccacccctgcctggccctccccatgctgcctctgcccagggcccccagctgggcctgcttgggcagggatctgacctctgcttggccggctgtcatgcacagccacactctgccctggggaacagctctgccagcgtcggtggctctgaatgagcacactgtggttttagaggaaaagcccctcaacctgctcagaagcagactcccgcctgcttctctgtagaaggacagaatgccctcctcccagtccccagcagtccctgtscccagaccaagaagctggtgtcctgcctgggcctgcctcctctggccctccggcctgcccacactcaccccttctccctccccaggaccatgtactggtcagactggggcaaccaccccaagattgagacggcagcgatggatgggacgcttcgggagacactggtgcaggacaacattcagtggcccacaggtttgtggggcagggtgcaggagggacgggcrtggagggggcccggctcgcagagcccagctgctgctgaagtcacacaaaagcaagggatgggatggggcttggactggggcagggcagattgsccgtggaggcttttcccgaaagaggtgactgtgagtggcgtatgaacagggtggagctgtcccgggcatggaggcagttctttccacccsgagcctgggttggggaggccaagctctcacagtgctctctctctccccaggcctggccgtggattatcacaatgagcggctgtactgggcagacgccaagctttcagtcatcggcagcatccggctcaatggcacggaccccattgtggctgctgacagcaaacgaggtcagagcccggcataagtcgcagtccccagccctgtccccagccttgccatcctccctactgagccaaaggcctcacttcaatgcctcccatcctttgtcactgacccccagcaatgctgcagcgccttccaggcctctccagctggcctccccctgaaccagccctgcaggcctgagacccaccctgaccctctggcctacttgtccattcattggttgggttgcacggaggcagcataggtacattaggaacgtagcaaattgggggagaaggaatagaagtcagtcatgaatgaccccagaagtctgggggtgatgggaccttttgccagtagtggycacaggaggaggaaccggtgtggggagagagaatttggtctggatgtgttgagtttgaggtgtctgggaaccacaggtgccagtgtcgtggacrgcatggccagggcctgagtgcccctcaggtcccctctgactccacctcctcccccaggcctaagtcaccccttcagcatcgacgtctttgaggattacatctatggtgtcacctacatcaataatcgtgtcttcaagatccataagtttggccacagccccttggtcaacctgacagggggcctgagccacgcctctgacgtggtcctttaccatcagcacaagcagcccgaaggtgggggcagaggggagcctgggctggggaagggaggcctgtgggcattgagtctccaagctgtggccctgggacctggtggagagggggtcaccctgggctcacagggctcagagaagggtcctgctcagcatcctccccaccccacccatacctgcagtgaccaacccatgtgaccgcaagaaatgcgagtggctctgcctgctgagccccagtgggcctgtctgcacctgtcccaatgggaagcggctggacaacggcacatgcgtgcctgtgccctctccaacgccccccccagatggtatgcttatgccctcccagtcccagccatgcctcaggaccatctccttcctgtggctcctgacttcccctgaccttgttgcctgtccctctcctcctattcccctggctctgccccttgacgggcccttcctgcagctccccggcctggaacctgtaacctgcagtgcttcaacggtggcagctgtttcctcaatgcacggaggcagcccaagtgccgctgccaaccccgctacacgggtgacaagtgtgaactggaccagtgctgggagcactgtcgcaatgggggcacctgtgctgcctccccctctggtatgccccctcatcccgccacgcctgctccttgcccctgggccccagccccgccacccaccaccccacctcaggcaaatgcccagcccctgcctcgcctccagcctcctttccacaacccagcatccagtcactccagtctctgcttctcgcccaggtccccccagcccattcctctgctatagggccaggtggtctcgagggccacagtcgcgctcacacatcctctcccaccaggcatgcccacgtgccggtgccccacgggcttcacgggccccaaatgcacccagcaggtgtgtgcgggctactgtgccaacaacagcacctgcactgtcaaccagggcaaccagccccagtgccgatgcctacccggcttcctgggcgaccgctgccagtaccgtgagtgagccatccctgggccccagggcatgcgggagggtgacgggggaccccagagcatggggtgatgttcaacctgtgcctgggacccacmggggcaagttcaggaaagaaggccttatgcagctgagccaggcccragctgctggcgcttccccacaaaggtgctggcacacttcccctgaggcagtgcaccccctgcaccaagattatgcaaacagaaaagctctgttcaacctatggagagccctcatgagggtggggcttgaggcacttctctccctccccaaccacagggcagtgctctggctactgtgagaactttggcacatgccagatggctgctgatggctcccgacaatgccgctgcactgcctactttgagggatcgaggtgtgaggtgaacaagtgcagccgctgtctcgaaggggcctgtgtggtcaacaagcagagtggggatgtcacctgcaagtgagtggggccctcctccacagttccacccagcygggcccctgccctgtcctagccctgccctgcccctcccttcctcagcatcccaggcacgcctctgccagccccagccccagcctctgattccttcctgcagctgcacggatggccgggtggcccccagctgtctgacctgcgtcggccactgcagcaatggcggctcctgtaccatgaacagcaaaatgatgcctgagtgccagtgagttgggcccgggcttcacccaggcatagatcatcgctcccttccccagatttgagcaggaggaccgtcaggcctcagtgcccaccccccgccctgttttcctggcagcagtggctatggaggttatacctactcagccgtgtccctcctttctgcaggtgcccaccccacatgacagggccccggtgtgaggagcacgtcttcagccagcagcagccaggacgtaggtggcaggggttggggcaggcagggccaccgggacctagagcagggggaccgtgtgcctcctgcttccctgagccttggtgactcagtgtcccacctcttccctccagatatagcctccatcctaatccctctgctgttgctgctgctgctggttctggtggccggagtggtattctggtataagcggcgagtccaagggtgagtcacagggattctggaacattctggtcattattttgccatcctagccttcccccccaataatctctgtctccttatactcctgcctttccccagggctaagggcttccagcaccaacggatgaccaacggggccatgaacgtggagattggaaaccccacctacaagatgtacgaaggcggagagcctgatgatgtgggaggcctactggacgctgactttgccctggaccctgacaaggtgggctgggaggcgggcagggtcgagtgccaagaggccgtgggtggcctaaccaaaggtgttgggttaggtgagggacggaggtgggggtggggtaacctgggctacaggcccagctcctgagccctacctgaaccctctgtcaccctgcagcccaccaacttcaccaaccccgtgtatgccacactctacatggggggccatggcagtcgccactccctggccagcacggacgagaagcgagaactcctgggccggggccctgaggacgagataggggaccccttggcatagggccctgccccgtcggactgcccccagaaagcctcctgccccctgccggtgaagtccttcagtgagcccctccccagccagcccttccctggccccgccggatgtataaatgtaaaaatgaaggaattacattttatatgtgagcgagcaagccggcaagcgagcacagtattatttctccatcccctccctgcctgctccttggcacccccatgctgccttcagggagacaggcagggagggcttggggctgcacctcctaccctcccaccagaacgcaccccactgggagagctggtggtgcagccttcccctccctgtataagacactttgccaaggctctcccctctcgccccatccctgcttgcccgctcccacagcttcctgagggctaattctgggaagggagagttctttgctgcccctgtctggaagacgtggctctgggtgaggtaggcgggaaaggatggagtkttttagttcttgggggaggccaccccaaaccccagccccaactccaggggcacctatgagatggccatgctcaacccccctcccagacaggccctccctgtctccagggcccccaccgaggttcccagggctggagacttcctctggtaaacattcctccagcctcccctcccctggggacgccaaggaggtgggccacacccaggaagggaaagcgggcagccccgttttggggacgtgaacgttttaataatttttgctgaattcctttacaactaaataacacagatattgttataaataaaattgtaaaaaaaaaaaaaaaaaaggccaaaaaaaaaaaaagaaagaaaaaaagccgctggtgtctgcctgtgtgtgagagacgctgggagctggggctgcgctttcctgcttcggccaccagagggagacctgccccgtgctggaggcaggctggcgcgtggtttttagtgcccttctcccagggccctccccctctccatcttactgtgcccgggaagcgggtggcactggacttgacatggaagatctgcttctcctggctgtgtgaccttcagccatgacttcgagtctccagattttgtgttccctctgggtctaggacactaactcagatctgtttctctgcattcacttctaccagacaccacccccctacccaaaatgatcacccacagtgagaagccccactataagaagtgaatacactgaggctgcaaaggttttctcatccttcagggtcctcccatgcggttctctctgcctgagtctgctcttgaagcactgacgtctcactttgtggagactaatgaatcaaatgcgaagtaaaatgctgcattccagagccaggtgtctcctgcggtaaaggagagctgggaagaccagtttgccaggccctctaggcccccagcagctccagctcaccaatcatttcagtcattccagggggtaacaggaaaaaactgtcaatcaaaagtgtccaggtccatttcaacccctgcctagagggggaaacttcttgcagaaagttgcacagtttacactgcccaggactagagagggtttgagtcccagtacagcaaatatgagctcaggaagggtggctgcaaatgtctgaagatcccttacccaactcccaaccaggaagtgctgcctttcattcctcctccctcactggttcaactccaggagattcctcccaggcttccttctgccttggggaagctacaagtctaggcacctgtggaaagaggagccctccccttcccttcttagccttcagaagctctctccaacctcatcctccaagccaactctgagatcctcccctgccttcaaaagggccctggatgggcaactgcggggaaacagaatccgtggttgccgagtaggaggtctgtgtcccaatctggccaccaggtggtgtctgtacgcctggagcaccgcctatcctgaagccccacacagcccccgcctcagcactcattatgcacctgcgggggaccccagcccagtctctcgcttccttctctccggctattttgccacacccctccaccctctgccagccagctcccctccctgccccagcrcctgcctgctcccaccaccaccagccccaaccctgcccctctgccatcggtgcatctggtgccccccgggagccactgatctctgcctgtcacctcaagatcctgggcagagcgacaagggacccccgctgcagcttggaaggcatacccctccagtcagcatcccccactccgcctgtcaggacctgctaggagaaggtccaccaggaggcagtttctcaaactacccacccgggaggcaggtgggaagccctcaccttggcctgagagatgggaagaaccagggacagaggctgagaaccagggacagaagctgataccgaatgagaggcagaaacccagaggcggagagacagggggacagaggcaaagacccagagacagggcgagtagtgtgcatgtgtgtgtttgcacttgtgtttgtgcgagcgcgcacacatgtgtgtgtgtaactggagagagaacaggtggcctgagactgtagctaaaggaggagagatgcagtgggttcggcccccagaagaccaggaccctggtaatgggcttctgtcctggacagcctacgcctaggtgtgcccactgttcccacctactactgaagcagcccccgtgcctggaacgtgggctcagggttctggctcaaggccttttggccttgagcctgaacatttctgccccttcctgcctctctcctctccacccccaccccggcacccaggttcctgcctcctggcttctgcctgtctccctgggtgtctctgaatctgcctcgtcctctcagcaccggtccttttcctgactcgtgtgtgtggctgtcacgtcccatatctatctgtccatttctttgtatgtgcccccacttgtcttctgggctgccagtgacagcatacacctgtgtatgtctcagtgtgtgtgtccacctctgtgggtgtttgctctctgccaagacaaagagagggtgagcgcactgagcaactgtctgggtgtgctcgtctgggtgcaggtgtgctcacctctgttgctgtgctcctctgtgtgttggggtgccgctaggtgtgcgcctgtctctgtatttcgctctgtgtgccctgtccccgtgaaggcatctgcgtgcatccctggggtgggctctcaagggatgtgtctgtctctcagtctctttgcttgtccctatctctgtctaggtgttggtcataccacaacctcagccacagcctcagtgcatagcaacagctgacagctgaaaccacccgggcaggagagagagaggcagtggggaggagggaaccgaggaagaaacagagaagaggatgggggcagagagctggggctggggacagagacaaggacagagatagggaatggggacaaggatctagaagagctggtggtgaaagatgggacggcgggaggggaggaacagagactgcaccaagaggccaggcaggcggcgctgagagggatttcctgcccagcccccatgcagaggcgcactgggcctcgtgggggtnnnnnnnnnnnnnnnnnnnnnnnnnnnnnnnnnnnnnnnnnnnnnnnnnnnnnnnnnnnnnnnnnnnnnnnnnnnnnnnnnnnnnnnnnnnnnnnnnnnnnnnnnnnnnnnnnnnnnnnnnnnnnnnnnnnnnnnnnnnnnnnnnnnnnnnnnnnnnnnnnnnnnnnnnnnnnnnnnnnnnnnnnnnnnnnnnnnnnnnnnnnnnnnnnnnnnnnnnnnnnnnnnnnnnnnnnnnnnnnnnnnnnnnnnnnnnnnnnnnnnnnnnnnnnnnnnnnnnnnnnnnnnnnnnnnnnnnnnnnnnnnnnnnnnnnnnnnnnnnnnnnnnnnnnnnnnnnnnnnnnnnnnnnnnnnnnnnnnnnnnnnnnnnnnnnnnnnnnnnnnnnnnnnnnnnnnnnnnnnnnnnnnnnnnnnnnnnnnnnnnnnnnnnnnnnnnnnnnnnnnnnnnnnnnnnnnnnnnnnnnnnnnnnnnnnnnnnnnnnnnnnnnnnnnnnnnnnnnnnnnnnnnnnnnnnnnnnnnnnnnnnnnnnnnnnnnnnnnnnnnnnnnnnnnnnnnnnnnnnnnnnnnnnnnnnnnnnnnnnnnnnnnnnnnnnnnnnnnnnnnnnnnnnnnnnnnnnnnnnnnnnnnnnnnnnnnnnnnnnnnnnnnnnnnnnnnnnnnnnnnnnnnnnnnnnnnnnnnnnnnnnnnnnnnnnnnnnnnnnnnnnnnnnnnnnnnnnnnnnnnnnnnnnnnnnnnnnnnnnnnnnnnnnnnnnnnnnnnnnnnnnnnnnnnnnnnnnnnnnnnnnnnnnnnnnnnnnnnnnnnnnnnnnnnnnnnnnnnnnnnnnnnnnnnnnnnnnnnnnnnnnnnnnnnnnnnnnnnnnnnnnnnnnttccgggacgcgaaggtcccagtgtgcgaggggctccgtgcgcccgccccgcccccagctccgagcgtcccaactttgcgcggcgcgggggaagcggacagacagactgcccgattcaggacgggcactctcctagcgcaagttggctgaggcttggagagggtgccgggcggaggtcccccttgcagccgacttcaggcgcggcgggggaggggacgaagcccgacccgcgagtgcgccagacagagcgggagtgcgagacagacagacaagccagcagggtgtcagccttgccgtctttccgcgccagtctcgctcgcctgcctcactgtctgtctgtccttccacccctccacccccgccttcccatttctcttctctgcacttgtcaccatgccaggtgggctctgtgtcgggagcatccatggcccgagcacacacgcacacacggactcaggcagacacggctgaacttggctacagccagcctcccatcacatttcccacggagacaccatctcccctgcacgacctcacagacacacccccctctcgtgccccactgaagggggaggctgtctggaaggggagtctctcctcccatgccctccctgcctccaaccccactccaaggcctctttccctgaggctctcgggcgaagagccagaggctaagggagctcagacttgatctgcctccttcctgacttggaggcttcaacctgcgaacatgctgtgctcatatgtgctgggtggagggcgtgggtcaccgtgtgcacctgtgtgcatgtgtccagggaagccaggcttggtccagtactggggccgagggtacatgtgtatactggtgtggtgtgtggtgttggctttgcatgagtgagtgtcagtgcctgcctcacagtgcagccatctgcctatgcccctggtgtgtgcccgcaatgggggcccaggccccagtcccccattttccttctaccagcctcccctgcctatggcttccctgttttctgacccccaactgtgacctacctagtttgggggcaggcaggtcattccccaaaccctcattctctgtaccctcagcccctgtagagtctagaaggggtgtatttcttcccccaacacttggacctctgcctgctcagccaaatcacatttggcaaaccccagcagggcaggggctgccccagtgaagctagcattagagctccctggccctcccagccccacctggtgaccttgaggggctgcacggtaggcagaggagcccctccatgaaaactgcttccactagcaggagcttcttagggacttgctgcccaactctgtccttagtgaactggaggagtggggggggtctgtgccctaccacccacccacccatgtgtgaaggcctggggtcaagaggtggtaggtatggcattctcttgcccctcctttccacttcctcccacctcatctccactctcccaggcaaataaactcccctgtggacagatctggtttaatttcctttgccccctgagggggaatgaaacatctggtggagacttgagtgagagtgagcgtgaggatatgagcaatgggatctatctgagtgtgtgtgtgtgagctgcagctgtggggcctccgtgttggagtcaacagggagagtggatctgctggttagcccagcttatgtgcatgtgagaatgtgtttacatgtgtacacactgcgggtgtgtgaatatgtataactgcacggggaggtgtgggtatatgagtgtttgtgtgtccaaatacctgtgtgtgcttctgtgcacttgtgagtgtggcgtatgcacatgtataccccggggtttctggtgcatctgtgtgctggggcccatgtgttgtctgtatgagtctctggggtttgtgagtgtgtttctgtgtgcttgattgtgagtgcatttgagtgtgctatgagattgtgagcctcaggatgtgtttatgtatctgagtgtggcttatgtgtgtgggtgctcaagggtgtcttggtgccagcactgggagtgggcaaaaggtgaggctgatcctgggtaagaggtggctaggggacagtttacagggcaactttttggcaaccctaaccatgaacggctgacacctctgcctctcccgtcctgcttgctcaccctcctccaggtttctctcccttcctcctcactccaggcttcccatttctcagagcctgggactcctggcttccactgcctctggggttctggcctctcagccagggattcttgaggatctttctcatacagtctctgactcctttccctctctctctgtctccccgaccccttgccaaagcagctgcctactgggas

SEQ ID NO: 5628 - DNA, 43871 bp, Homo sapiens
ctcactgcaagctccgcctcccaggttcacaccattctcctgcctcagcctccagagtagctgggactataggcgcccgccaccatgcccggctaattttttttgtattttagtagagacggggtttcaccgtgttagccaggatggtctcaatctcccgaccttgtgatccgcccacctcagcctcccaaagtgctgggattacaggcatgagccaccgcgcctggccctgtcaaagtaaagtttataagaatgcagatattaatattaaatagctaagtataaaatgttttttccaactgataaacataaatagaacaaagcacctatatacaaagggtaatttgactttttaaacatgtaatagataatagttaactttttaaaataaagttgttactttcaattagttaaaaaaaattaccttcagatagtggctcaggtttaaattccaggcctcaagcattctactacccccagaaatgtcctttcttgtccactgaagttcttccttttgggggcactaaatcatgatagctgtagcttcatttatgtgaaagctttaattgggtcttcacagcagcattttctctgtaatgagaaggtatttaatgtatattttattttcctacacataaagataattattactttttgttatgcaggttttattttaaaataaccattatcagcctggtgtggtaaaactatcaattgattcatttaagagaactaaagatgaggactgactttacaggtaactacatgtatcttgggacaggtgacaatctctctgtgcctgtttccttgtctaaaatcaggtatttggaatatttaaattctcacgttttataactatcactaaaacaaagatctctagcaaattacatttttcatcaatgaaaatacttactattagggtatcttttggagccacaagaagcttgaaaataaaagctcttctccccatgccctacctcccaaaccctagaattgacaggcttatttcttaagcaagcgtattacaattaaagagagcagaaagaaaaaagaaaatattaaatatggagcctaaacagttaatgattggatttcagaaaacacactaaagcattaaattttgccggcaaattgctttctagaatgttttgttatcacatttaaaaagtggattttatcttatatcaaaagtaaagattggaaagcatctgtaaaattagcagctcagcgcttttttttttttttttttttttttttgagacggagtctcgctctgtcgcccaggctggagtgcagtggcgggatctcggctcactgcaagctccgcctcccgggttcacgccattctcctgcctcagcctcccaagtagctgggactacaggcgcccgccactacgcccggctaatttttttgtattttcagtagagacagggtttcaccgtgttagccgggatggtctcgatctcctgacttcgtgatccgcccgcctcggcctcccaaagtgctgggattacaggcgtgagccaccgcgcccggcgagctcagcgtttttattctgggaagaaagggctttttattgtttttagacagtgaatgtatggcagaggggtagagacgattcaggttgttgtcatgtctccttcaaggaccatacttgggccactgctgttaggatcttattcaacagcaattctatcagttcaaaattttggaggcaatttcttatgtgtaatatccaaaaaaaatggtcttaacatccaaccatgttgttgagtatccttcacagacttctgtgtattaaaatattattgttacaaccaataaccttagaataaatccccaaatagggtaattaaagagaaagcagcttgaagttgtttctttaaattccagataccttggttaatgtcctaagatgtaaaagatctttaaatctattcattatcagcgccagatcttattaactacattaaaaagtattgctcggcgggatgctggtggctcacacctgtaatcccagcactttgggaggccaaggtgggcagatcacgaagttaagagattgagaccatcctggccaacgtggtgaaaccccatctctactaaaaatacaaaaaagttagctaggtgtggtggtgcgcacctatagtcctagctactggggaggttgaggcaggagaatcgcttgaacctgggaagcacaggtcgcagggagccaagattgtgccacggcactacagcctggcgacagagtgagactctgtctcaaaaataaataaataaataaataaataaataaataaaatattgctcaaaagtactttagaaagtaaaatttaccgcatcttttagaggtaaatgacataacattccttttataatatgtacaaaattactatgaatcagtggtgtcaaaaatgaaatcaagactaattcacaaatattttaataggataatttattttttaagaatcagtttttaaagttatgttaaacatcgaacttttaaatgcatgcaattatatataaacaataacctatattaatttttaaattttctgctggatgcagtggctcatgcctgtaatcccagcgctttgggagtctaaagtgggcggatcttgaggtcaggagttgggaggccagcctggccaacatagtgaaaccctgtctctacttaaaaaaaaacaaaaaaaaacaggctaggtgcagtggctcatgcctgtaatcccagcactttgggaggctgagcagatggatcacaaggtcaggagattgagaccatcctggccaacatgataaaaccctgtgtctaccaaaaatacaaaaattagctgggcgtggtggcgtgtgcctgtaatcccagctactcgggaggctgaggcaggggaattgcttgaaccagggagttggaggttgcagtgagccaagattgcaccactgcactccagcctggtgacagagccagactccatctcaaaaagaaaacaaaacaaaatacaaaaatcagctgggagtggtggcaggagcctgcaatcgcagctattggggaggctgaaacacggatcacttgaacctggaaggcagaggttgcagtgagatgagatcatgccactgcattccagcctgggcaacagagcaagactccacctcaaccagtacagtggctcacgcctgtaatcccagcacttttgaaggccgaggtgggaagatcacaaggtcaggggatcgagaccatcccggccaacatggtgaaaccccttctctactaaaatacaaaaaattagccgggcatggtggcaggcacctgtagtcccagctactcgggaagctgaggcaggagaatcgcttcaacctggaaggcggaggttgcagtgagctaagatagcgccactgcactccagcctcgcgacagagggagactctgaaaaaaaacaaaaaaccaaaaacaaaacaacaaacaccaccaccaccaccaaaaaaccctccaactcaaaaaataaaaaaataaaaaaaagcactttttaattttcagggaaaaaaaatctaaggctggtgttcacaatgtcaattttatttatggtttattctcactataagcttccctgcaatccatttctacccatgttttactctgcacaaactttttacctttttgctctgattttttgtttgttttttttttttgagatggagtttcactctttttgcccaggctggagtgaagtggcgtgatcttggcttactgcaaactccaccttccaggttcaagcaattctcctgcctcagcctccccagtagctcggattataggcaccccccaccatgcctggccaatttttgtatttttagcagagacggggtttcaccatgttggccaggctggtctcaaactcctgacctcaggtgctccacccgcctcagccacccaaaatgctgggattaggctgctctttgagagctttacaaatttatttaatccttacaatgactctgaggtagatcttcttgtctctgtttgtagataagaaaactggaactgtcaagaaacttgcttaagatcacagagtgcattaggcttggatccataatcaaattggaaaaaaagaaaaacacaaagaacaattaagactccaaagccctaatgcatagtctttgtatcctatcacactgtggcattatatatataaaacaaaaaactttataataaagagaaatgtattttccaaactgtggttctccagataacaatgtgtctccatgaggaccatatagtaaatacatcccataaaaaatgattaccaaccaaaagcttgcaattaatgttccaactaaagaaaaagactcaaagtaaaagcatcagctatcctaggtactgtttggaggcaacaccaaacacgacacataaatcattgttgaaaaaaaccgtaaaacataatgctgggtatttagttatgttgaatgctaaaactaatctttccttaactaaaggtctccgtcaaatgaaaagtgtattttagtcaagtcaggatttctgttttgcaaactcaaagtcttatattattaagcatatattcaggttatttattttcctgatcataattttcaaatcaaattaagatcaaactccactgaccgtcaggtactgtatattctcattttgataaatttcaaattaatgataaaaatgtattaacctgctggtcaattatacattttataaatatattttaaccaatgacatattatcagtaagtacagattcaacggcaagatttcattaagaaagtgtttcaagcttcagatgcccaagacttatttaatgtgtaaatcttcaccactacaataaccacatggttaaacgatcaccacttccattagcaagctcaagcctaataagtgatctcctgggacttcagcacagaggttttctaattttattcctccactcaatgtggctattctcccttatctattcacgctggcaaagcttctagttaaactggaattagtaactatttgatgataataattaacatatactgagtgcttccgatgccgcagttaattcttatagttgataaaagtgtggcacaaaaaggttaatcaagtagcagaggcaggatttgaacccaggaattctggttccagggcccggattcggagctacaaaggtgagtaaactgaaaagagtcctacttttattgtcattgctctctaataaaaattattttttcttccaattgtttaaatctcttctcattctctatttaaatattaggcgttcatttaaacattaggcgtctaccttacagtaggacatctttaaacaacgtaaaaaaggaaagctttgtcttcaccttcacacataccggtctgcccataaattttgcaatccagttctgcctgattctaaactgcttgtctcttgaagcgaatgccttaaaaagtgacattgggatcaggatagttatctccatccatcctccctcagaaaaacaactatattagagtaattcttgggaccattgagaacaatacacaggcctttgggtaacttcaagacaaaaaaggcaaaaagtcggggagaaggtgtgggaggatgattttccccttctaaacgtaaggtataaaagggctcagaaagcggaaaaagaaccctaaaaagcaaggtgcgggacggcgtgagggaccacacattgggcgctccgcccaaggggtccggctccttctccgcggcgatggcgcgtccttgggctcagcaaccctcctgaagacacctaacctcctccttctccagcctgcccctctggggcctgcgagccccgtcccgggccgggggtcggaagccgtgccatgtgggaccccgaaaaggcccccaagcttggcgcggaaggcgccgccagtgaccggctgcggctgggggcggaggccggcagttgctcggagctccggcgggtcaggaggtgacgggaggaggaggaggcaggaggaagacaggggggttgggaggtagcgtccggtaggtctgcgcagacagcgctgccagacctctgactcccccagtcctgccgccgccgatagccccacaaggcgacatgggaagtccgccggagcagaggggagaaaattcaaaacgagtctactcaacctcgtcttggctccgaggccccgccatggagaccagcataatgcgcaggcgcgccccaccgggagcgcgcagagcagtcccacgacagtaggaccactatcggccaccgtcgaccgtttcctctctcatccgttcttttctttgtatttccgcctctcgcctctctctaaaagccgcagttagaggcgagatttaggaaaaacctctgccgagtgagcctctggttgggaatatgtatgagaaaaaaaaactggcaaggcgttagtcaagcaaagctgaaggcagaggaaatttgatatctggctggagtctagaggatttaatgcaaataagatactctgagggcagcgtggcaaaaaaagactacaattcccggtggtcacagcgtttgagaagcgatgctttctgagacttgtagtaactaggagctgtgtttgaactatccaggctcaggacagcctcttgaaaaaaaattttttattaataaagcggatttgagtgggatctttttcctmatcgattacgggcccacacgtatgggaagaattctaacaatgattaaagggacatgctacctttacgactatccttttctaatcgatgactcctaaatctaggagtaggtagtcgatgtttgtggtctgggcgtctgtagaagggcaacctcgtgctttctgcagaggagaccggagggcagaaggcagagtccaggcttagactgcagttcctcgcttacctgtgcagtctaattttgagctgcctctttgtagtcttaaaaggcaggagcttcgtgtwgtgggtctgctaacccgtacgtttccgtgggcaagtcgtgtgtactcctcgccatggctcagctccaaacacgcttctacactgataacaagaagtaagtaagcgttccagccttctctcccttccccaggttcctttccgaccacccctttggtatgaccttgtggatccctggttgtttctgctgtcacccccacccttttttctgagattacctgctttctaaccagcttcgtaggttctatataatttgaattgtgagtgtggaggaggctgaagggcttcaggtttgctttctgaatgaaacattttatatgtgtaatttaaaaatgaacagtgggccttgttatagggtgtctgctagtggtggttcacagtttttgaaaacggaaaaaaagtttttgaaaatgaaaaaacatatttaccatttatgtatatctatatagatatataaacattttaaccagtggtctcaaggtctgttagcactcattcgaaaactaattatatgctgccttgtggtatatattgcattgttagctttctttgtgtttgcctggtctcttccaactatattggaagtctcttgagggcagggactatatattaattaagcttcttggattggctgagtcaacaaaaaatgtcaaatttttcagtgaaaatgataatatttgtcgtgttaataagctaaagttagccataaactaggaaactcccacctgagttacatctgtggttttgtttgtagctttatgaggagagctagtaaatcatcttctctccccttgtgttgttgctgaaagtatacataaatcgtattatcaatgcacctgagtatatgtacttacttacatacattgccttaatacttctctaggaatgtggtgatgcattaacataaccactgtgttttttaattgaaagtaggtttttttgtttttcttaaaataaaattttttgaaatatgtggggcttttttttgtttgtttggtttggtttttttggagacagagtctcactctgttgcccaggctggactgcagtggtgggatcttggctcactgtaacctctgtctcccgggttcaaacaatcttcccgcctcagcctccagagtagctggaattacaggcatgtgccaccaagcctggctaatttttgtatttttagtagagacaggaatttgtcttggtggccatgctggtctcgaactcctggcctcaagtgatccgcccacctcggtctcccaaagtcctggaattacaggcatgacccactgcgtccagccttgagataattgttgattcacatgaagttgtaagagataataggccactgtgttttaacccctgaaatgaatggatacatgtcatatgtgtgtgtgtgaatttaggccctccaaaaggtaaaaaaatgtagaaattaaaattctttgccgagtgctgtggctcatgtctgtaatcccaacagtctgggaggctgaggaacgcaaatcgcttatctcaggagtttgagaccagcctgagcaacatgatgaaaccccgtctctaccaaaaatacaaaaaatttgccaggcatggtggtgcccacctgtggtcccagctacttgggaggctgaggtgggaggatctcttgagcctgagaggcagaggttgcagtgagccaggatcaatgcaactgcactccagcctggggaacatagtgagactctatctcaaataaataaataaataaataaataaataataaaattcttgctttttctttttgcttaatattatggtcagtaaaatggaggcggggggctaatataattgtcacacacacacacaagaatatacatatatgtgaattatatacataaatatatagctatagccttattgctcaaagtgtggtttgaggatcatcagcatcatatttgcaaagttgtgcaaccatcaccacagtcaattttagaacatttttcatcatccttgagctgtttgttaaataatacccccagccctaggcaaccactgatctactttctagctctgtaactttctctcttctggacgttttgaataaatggaattatataatgtgatcttttgtgactggcttctttcacttactatgatttttaaaaaatggtttcattatatcatagtatatattagcacttcattcctttttgtggccaaataataggccattgaatggaggtaccatatttttccattcatcagctggtgggcatttaggttgtttataccttttagctattatgaatagttgttatgtgaacactcgtacaagttttcgtgtggatgtatgttttcgtttctcttgcatatatgcttaggagtggagtttttgggtcagatgtaattccatgtttgagtttttgaggaactgccagactgttttccaaagcaactgcaccattttacgttactgccagcaataatcagggttccaattgctccatattttcactgacacttgttattagctgtctttttacttatagcaccctagtggatgtgaaattatatttcattgtgtttgattagcattacctggatgactaatgatgagcatttgcatgtccctattgggccattttaaaatttgtgttgtctttttattattgagttgtaagtgttcttaatatagtctagatacaagttccttattagatacatgatttgcaaatattttctcacagtctctcttataagagtctcctaatctgcctcctgtcatgtgttcctctatttcagtgcccattgtgcagccagaaagatctaactaaataaaatctgatgatacttctaatttgcactgctgtgatagttcttcattacccacaaaaaagaagtaaaaatgatttcacatgatatataaagcactccatgtgtatctctttagcctttggtcactttggagcaaagtcagattttctggaagtggctgggcagtttaacaactcctagctattgttttgatgttctctctggtttcgtccacactgcttcttccagcctacccttccctcacctggcaaaaactcacttctcttttgagacagggtcttgctgtgtcacccaggctggagtgcagtgcagtggtataatctcagctcactgcagcctcgacctcctgggctcaggcagtcctcccacctcagcctcccaagtagctgggactacgggcacatgccaccacgcctggctaatcacttttctaaatgttgcttaacagttatcttttctgtggatcgtttctggccctgctcccctgccctccttttctgtggttaaaatgacctatggtgtctttgttctttttatacatgtcacctaatggcattgttcttatataacttcattctatttgattactaaacttcaacctcatcttagaacagagaccatgttttaattcatttttgtttacaacatgtagcaaaatgtctggatgtctggcatttatttacccaataaatgtatgttgaattcgtaaaagcatgtttgttcaaatatctgtagacttgatcttgacatatcatttcctttttatagatatgccgtagatgatgttcccttctcaatccctgctgcctctgaaattgccgaccttagtaacatcatcaataaactactaaaggacaaaaatggtgggtatatatgcttaggagagggcacagtgtccctaattattctaaaatgcattaagtttttagttccttttttggccttatgatactgtatgaattttgtagtggtaaaatttgtaagttataaagtacaggttcttctgctggatgatactgtaaatactgctttgaaagaaaagttttcagaaaaaaatttctgtttaatctgtttttaaggccatgtggaaatatggtggttgtagttaaggaataaagattttggtataaagttgtaatayagaggtaatcaagacattgattgttctacagagggctgagttatgcaggcataaaacaagcgttttagtgcttaggccccatttactagtgaagcacaaagcaaaatgacaatatcagtatttgagtgtttagtgtaatatcaaaatgacagtatgaataccagtattttattttttgtgtccagaattcataaaaaaaggatataacaaaacatggaagaatataaaacatttaaaagatacaaatattaaatatatactattgtactaatataagttatttgcccattaaattaatatgaacaatgtatgtaaaaatatcaatgaaataagattggctatgagttaataattgttgaagtttgtaatcccagcactttgggaggccgaggcgggtggatcacgaggtcaggagtttgagaccagcctgaccaacatggtgaaaccccgtctctactaaaaatacaaaaatcagccaggcgtggtggcacatgcctgtaatctcagctgctaaggaggctgaggcaggagaattgcttgaacccgggaggcggaggttgcagtgagccaagatcgcaccattgcactccagcctgggtgatagaggaagtctcaaaaaaaaaaaaaatgttgaagtttggtgataggtgtaaggaggctccttatattattttctgtatctcattgtagttttgattgatatttctgaacttttccatatgtatgaaattttctataataaagtattttttaaaaagtaaagaaacattacataaaatagagaaaatttaaacatgaaacattaagtgattctcctgcctcatcctccagagtagctggaattacaggtgcccgctaccatgcctggctaattttttgtacttttagtagaaacggggtttcaccatttggcgaggctggtctcgaactcctgacctcaggtgatccaccctcctgggcctcccaaagtgctgggattacatgtgtgagccaccatgcccagccagaggcaagtgtatttttatgcagatgtttccaatgctgcagagctcttctgactctaccgtagttggaggaatgaggaggtaagagttataaactaatgtgtagtattttccccatcttcgtcttcaaataatcacataatttttttgtgaaatttgaggtgatgtttttgagcaactttattggcttggggtgggggaggaggggacagggtttgcaatctttttattgctagttacagttcaatattcaatattcaaggatatttacatagcatttcctgttgctccttgtttttgttttcatcatggatatatagagattctgatgcatagttacctttataaatttcaaaactgttatatagtctatttgttgaacaagtctttgaactagaataagaaatattctttttaatttttgtaggtacgtggtaggtgtatctatggggtacattagatattttgatacaggcatataaggtgtaataatcacatcagggtaaatgaggtatccatcacctcaagcatttatcctttgtgttacaaacaatccaattatactcttcgttgtttttaaatgtataattaaattattgactatagtcatccagttgtgctatcaaatacaagatcttatttattctttcaattcttttgtacccattaaccatccatttccacttgcctctcacttcccccactacccttctcagtgtctggtaactctccttctactctgtatctccatgagttcaatgttttaatttttagctcccacaaataagtgagaatatgcaaagtttgttttctgtgcctggcttatttcactgaacataatgacctccaattctacccatgttgttgtaaatgacaggatctcattcttttttatggctgaatagtactccattgtgtagaagtattgatttcctgatttctctacttttgagtatatacctagcagtgctattgctggatcatatggtagctctatttttagttttttgaggaatctccaaactgttctccatagtagttgtactaattgacatccccaccaaggtttatgaggggtcccttttctccatatcctcaccagcattttttatggcgtgactttcagataaaagccattttggcctggcgtggtggcccacgcctgtaatcccagcactttgggaggccaaggtgggtggatcatgaagtcaagaatttgagaccagcctgggcaaaatagtaaaccccatctctactacaaatacaaaaattagccrggcatggtggcaggtgcctgtaaacccagctactcaggaggctgaagcaggagaattgcttgaacccgggaggcggaagttgtagtgagccgagctcgtgccactgcactccaacctgggtgacagagcaggactccgtcttgggaggggtggggaaaaacgccattttatctggggtgaaatgatatctcattgtagttttgatttgtatttcactgatgatcagtgatggtgagcaccctttcatttacctgtttgccatttgaattttcttttgagaaatgtatgttcaaaccttttgcccaatttttaatcagattattaaatttttacctacagagctttttgagctccttatatattctggttattaatcccttgtcagatgggtagttggcaaataattattcccattctgtgggttgtctcttcactttgttaattgtttcctttgctgtgctttttaacctgatgggatcgcatttgtctatttctgctttgattgcctgtgcttgtgtggtattactcaagaaatttttgcccagaccactgccctggggagtttccccaatgttttcttgtattagtttcatagttcgaggtcttacaaatatttaagtctttaatcccttttgttttgacttttgtatgtggcaagagataggggtctagtttcattttttttgcatatggatacccagtttttccagcaccattattgaagagactggctgttccccagtgtaggtttgagttcactgtagatgtgtggatttgttttggcttctctattctgttccattggtgtatgtgtctgtttttatgccagtaccatgctgttttggttactatagctctgtagtataatttgaagtcaggtaatgtgattcctccaagtttgttctttttgcttaaggtagctttggctattctggttcttttgtggttccatgtaaattttaggatttttttttttctgtgaagaatgtcattggtattttgataaggattgcattgaatctgtaggttgctttgggtactatggacattttaacaatattaaattcttccaatccatgatcctggaatatctttccatttttttgtgtcctcttcaatttctttttttctttttcttttcttttttttttttttttttttttttttgagacagagtttcactcttgttgcccaggttggagtgcaattgcgtaatctcacctcatggcgacctccacctcccggtttcaagcgattctcctgcctcagcctcctgagtagctgggattacaggtgcctgccaccacgcccagctaatttttgtatttttagtacagccttggtttcaccatgttggccaggctggtcacgagctcctgacctcaggtgatccacccgtctcagcctcccaaagttctgggattacaggcatgagccactgcacccagccctcttcaatgtctttcatcgatgttttatagtttttgttgtagagatctttcacttctttggttaattcctaggtattttatttgtggctactgtaagtagaaatactttcttgatttctttttctgattgttcgctgttagcatatagaaatgctactgatttttgtatcatgcaactttactgaatttatcagtcctaattggtttttggtaaaataaagattatatcaaatataacattatatcattgatttttccaaatataagatcaaatcatctgcaaacaaggataatgtgacatcttcctctccaatttggatgcccttcctccctccctccctccctccctcacttacttccttccttccttccttccttcctccttcttccccccttcatctgattgctctagctaggacttccattgctgtgttgaataacagtggtaaaagtgggcatccttatcatgttccagatgttagaggaaaggctttcagttttttccccatttagtatgggggtctattatatatgaattttattatgttgaagtatgtttttctatacccagttttttgagggcttttatcatgaaaggatgttgaattttatcaaatgctttttcagcatcaattgaaatgatcatatgctttttgtccttcattctgttgatatgatgtatatattagggttctttagagggacaggactaatagaatagatgtatatatgaaagagagattttttgtttttttggttttttttgagacggagtcttgctctgtcgcccaggctggagtgcagtggcacgatctcggctcactgcaacctccacctcccgggttcaagcaattctcctgcttcagcctcccgagtagctgggattacaggcgcgtgccaccacacccggctggctaatttttgtagttttagtagagacggrgtttcaccatgctggtcaggctggtcttgaactcttggcctcccaaagtactgggattacaggtgtgagccactgcgcacagccgagagggagtttattaaggagtattgactcacacgatcacaagatgaagtcctacgataggctgtctgcaagatgaggagcaaggaggccagtccgagtcccaaaacctcaaaagtagggaagccggcagtacagccttcagtctatggccaaacacctgagaatccctggcaaaccactggtccaagaatccaaaagctgtagaacttggagttcaatgtttgagggcaggaagcacaggagtaagataaaggcctgaagactgatccagtctagtccttccacattcctctgcctccttttatcctagccatgctggcagctgattagatggtacctacccagatagagggtaggtctgcctcttccattccactgtctcaaatgttcatctcgtttggcatcaccttcacagacacacccaggaacaatactttgcatccttcaatccaatcaagttgacactcagtgttaaccatcacagtgtattacattgatttgtgtatgttgaactattcttgcatccctgggataaatcttacttggtcatgatgatcttcttaatgtgttgttgaatttggtttgcaagtattttgttgaggaaagaattattcctgtaagagaagctttgcaattccagtatgttacccaaatagttgggtaacatttttctaaacatatagaccgaacattattccttctgtatagactgttaccatattgcaactctgaaagaaatgaatgtaagtacagtattggttctcaatagctgttaatcccgataattaggtaaaagactgacaaggagcattatggtggatagaatcagactgatataatccaagccctatgatgggtcttaatatcttaaaaagagacacaaccagaacctatttacatcctgatgggatgtaacaggaaatagacaatactgcctgtgaatattcttgtcaaaaaaaacccaaaaaaccctgaaatctaaccaggcatttaccatttacctctgactagtttataggatatttgtgtgataaagaagcatgttaaaggacaccttggagatggagtcaacaaaacccagaatgttacaaaacagatgacccactttcatcaacaaatacatggcaaggagaaaaaggaggaggaactgttaaagattaaaagaaacattartcaaatataatgtatggattatggatgctgatttttgaaagctcactgtaaaagaacattgactatttgatgttagaaggagtgattgttaaattttaaaatattgtgacaaatttttgaagtccttatattttagagatacatactaaagtatttacagatgaaatgatataatttctgagatttgctttaaaataaaccagccggggaatggagggtggaatatagatgatgtcccattagttggtggatgtcaaaatgggcaatagtgatgagattcattgttatttctacttttgtgtatgtttgaaataataaaagttttctaaaccaaaataattacaccaacaacagtaaaaagacattatactaacagaacaaagtatttctgatcttaaaaatcacagagaaactcaggccacactgggataataggtacctgtttgttttgggagttctcatatacctctgccaatattactttagacactaagagtgataattttgttatgtattttcctcagagttccacaaacatgtggagtttgatttccttattaagggccagtttctgcgaatgcccttggacaaacacatggaaatggagaacrtctcatcagtaagttcaaattcttatcttctgtatttcacttgaggcattatcggctattgtaggtaaactccttttagaatcacactgaatctatctttagtagcaaagattctttttaatatattggctatatatgttgtgtgtgttatgtattgtgtgtatattttatgtgtgtattgaatatatatakwgtgtgtrtatatatatatgtatattcctgtatattcaattttgaagccctctktttttgtgagagtgttttattcaagaaataaatgaacacattctttatatttgtggaagaactggcaagaaagggaatagcaaatatgtgtgtacaaatactggtgcacaaaataactgggcaaatataaaaactatgggttaagttactgttatttttcccttttattttcaaagtttccttatattgcttttatgattaaaaatataacttataattgttgcttgttttgtgattttaaaaattgtggtaaaatatacataacataaaatttagaattttaaccatttttaagtatacaattcagtggcattaagtgcctttgcagtattatgcaaccatcaccattttccagaattgtttccttatcctaaacagaagacctgtacccattaaacaatgtgctttttttcttaattttaatgttttcttttatcttcttttttttttttttttctgagacagagtctccatctgttgcccaggctggagtgcaatggcacagtcttggctcactgaaacctctacctcctgggtacaaatgattcttgcgcctcagcctccaaagtagtgggattgcaggcatctgccaccacgcctggctaatttttgtatcttcagtagagacagagtttcaccatgttggccaggcacatcttgaactcctgatcttaggtgatccacccgtctcggcctcccaaagtgctggggttatgggtgtgagccactgcacctggcctaaggctttcttatattcctttcccccccatttgcagcataagttgtacaaggcgattaatatttcttctttttaaaatttttgttaggagacagggtcttgctttgttgcctgggctggacttgaactcctaggctgaagcagtcctcctgccccagctttcctaatgttaatagctgggactacaggtgtgagtcaccatgccaagctattatttcctaatatcactcttagcttacagttaggtcaaataaagttcttgactttttgaatggctccaaatttgctgagttataaaggggactaatatgaaggatataaaggagatatattaaattgggggttatcttcataatgtaatattttaaaactagaccacctgacttgttgctggtttctcttgtgattaggaagaagttgtggaaatagaatacgtggagaagtatactgcaccccagccagagcaatgcatgttccatgatgactggatcagttcaattaaaggggcagaggaatggtattgccagattaatgcccttctcttttttttgttttgtttttacctccttcagtctttttaaatccatatatacatatttttctgtgatttaatgttatttgtaaattaattttgtgatctctgtatcagtggccatggcaaacagaaagatcttttcattcagtgtcttcaagaagaaacaggtggctgggtgcagtggctcatgcctgtaatcccagcactttgggaggccgaggagggtggattacgaggttgggagatcgagaccatcctggctaacatggtgaaaccctgtctctactaaaaaagtacaaaaaattagccgggcgtggtggtgggcgcctgtagtccccgctacttgggaggctgaggcaggagaatggcgtgaacctgggaggtggagcttgcagtgagctgagatggccccactgcactcaagcctgggcaacagaatgagactctgtctcaaaaaaaaaaaaaaaaaaaaaaaaaaaaccacaggtatttattaataggtactctttttctgttctgttcaatatgtggtagtaacaattattgttgcctttttttttttttttttaaacggggtctctctctcttgcccaggctggtcgcaaactcctgggctcaagcagtcctcctgcctcagcctcctgaataggtgggatttctctacacccagcaatatttgtcttctgaataagtcatgtatcttagagcatttaatttatttggttcgattatgttgcttttaagaccaaggatatagtttgtttcataaaggaaaaaagtaacttttatagccatagatctcctggcctaataccttaaagatgcatagcatactattttagggctagaaggagcagactggactcagcaaagaaggtacagatatcttagggcaaatcctcactggccttacttgtaggaaaacaactcaagagtagattatggtaggagcttctttcaaagaatgccttcttggagttattacataaagttatatttctcctagttttacttttagtttaaatggttttcactggttaagtacaaaatacttcaggtggacagccaggcgcgtggctcacgcctgtaatcacagcactttgggagcctaaggcaggtggatcacttgagatcagaagtttgagaccagcctggccaaaatattgaaacctgtctctaccaaaaatataaaaaattagccaggtatggcggtctgtgcccatagtcccagttactcgggaggctgaggcaggagaatcacttgaacccaggaggcagaggttgcagtgagctgagatcgcgccactgccttccagcctgggcaacagagcaagactccatctcaaaaagaaaaaagagtactacaggttgggtattccttatctggaaatgtttggtaccagaagtattttggatgtaggattttttttgggtgggggtggttttggaatattaacatatacatagtgaaatattttagggatgtgatccaagtctaaacatgaaattcatttatgtttcatatacagcttatacacctagcctgaaagtaattttatactatgtatatatatgatatatattttttatatatatatatatatttttttttttttttttttttgaaacggagtctcgctctgtcacccaggctggtgtgcagtggcgcaatctcggctcactgcaagctctgcctcctgggttcacgccattctcctgccccagcctcctgagtagctgagactacaggcacccgccaccatgcctggctaattttttgtatttttagtagagacagggtttcactgtgttagccagaatggtctcgatctcctgacctcgtgatccgcctgcctcagcctcccaaagtgctgggattacaggcgtgagccaccacgcccagccatgccaggtattatttttaggaggttgagaaacgtcaagtgatctgatctagtatggcttgaaatctcaatcttcatatcaaaaaagagtttaaaagtataatcctcaaagttactttgtcattgccaaagaaacatttcagggtttggaaaaactgctttttgtgtttcataagatttttttttctcataggatcttgactggttcttatgataagacttctcggatctggtccttggaaggaaagtcaataatgacaattgtgggacatacggatgttgtaaaagatgtggcctgggtgaaaaaaggttaggacagtttgcctacacttagaggaatcctagatagggatttggaaataagccatttttggtgctggggaagaatggggagtgggtgggaagtatctcatacctcagttattatgaggtctttcaaaaaatacagtgttcaagaagaaaaagattatataaaaaattcataaattgttagaagtgtatctttattaaaattacatcagataatatacattttcaagttaatattgaatgtattacattcatcttttattttcttctgtttttgtttgtttgttttgttttgttttgttttgttttgtttttgagatagtctcgctgtgtcacccaggctagcgtgcagtggcatgatctcggctcactgcaacatccacttcccaggttcaagcgattctcctgcctcagcctctcgagtagctgggactacaggcacctaccaycacgcctggctaatttttgtatttttagtagagacggggtttcaccatcttggccaggctgatctcgaactcctgacatcatgatccacccgccttgscctcccaaagtgctgggattacaggcgtgagccactgcacccagcctgtttgtttgttttttgaggcagagtctcactctgtcgcccaggctagagtgtagtggctccatctcaactcactgcaacttccacctcctgagttcaagtgattctcctgcctcagcctcctgagtggctgcaattacaggcgcctgccaccacacccggctaatttttatatttttagtagaggcagggttttgccatgttggccaggctggtctcaaactcctgacctcaagtgatctgcctgtgttggcctcccaaaatgtcagtatttacaggcgtgagccaccacacccagtcatcgtcatctatttttgaagaatcttttctttataccacatcagccttttaaaacctggccatatgagttatctttttaacatctttttcaataacaacaaaaaaatttagttctttggtttcagaacatgatgtattctaaatggtatactgatttgtttcttattcttgtgttctcctttctccagatagtttgtcctgcttattattgagtgcttctatggatcagactattctcttatgggagtggaatgtagagmgaaacaaagtgaaagccctacactgctgtagaggtcatgctggaagtgtagattctatagctgttgatggctcaggaactaaagtaagtagctagaatattattagtactctgttaaatttgaatttgagcttgttgctaaacattttcttctgcatatattcattgtgttggcctagtttcctaacaatcggtgacaaaagataggatttcaaagcaagagtaaatactcatacaataggagatagtcacttgctcagtttgaatccctggtttagaaccttatataaactccagaaattttaagaaatgaggtatgggccgggcgcggtggctcacgcctgtaatcccagcactttgggaggccgaggcgggcagatcacctgaggtcaggagttcaagaccagcctgacccacatggagaaaccctgtctctactaaaaaaaaaaaaaaaaaaaataagccgggcatggtggcgcatgcctgtaatcccagctactcgggaggctgaggtaggagaatcacttgaacccgggagacagaggttgcagtgaccgagattgcaccgttgcactccagcctgggcccaacaagagtgaaactcagtctcaaaaaaaaaaaaaaaaaaaaagaaagaaatgaagtaaacaagccattcatttatataaccttcttacctcatagtaattgacatatttccagtctatatcagctactcttaagtgctgtcatcaactgaaaacgcctagttgatagtctgagcattagcatacactaaagttagtgctaatagagttttactatagtatcaatctactctttatcatgacaaaatggtaaaagttagttaaaaggtaacaaacctgagggcaataccatattgatttattaatatgaagggttataaatccacttagaatttgaaagtttcctaagccacattgaagtattctggacttaagagtgtttctttgacagttagggtaacaggatgcttgtattcaaaggtgaagatttatgatttttcatattgagccgaaaagttttatatgttgtttagtccaaactttagtggattaactgtacctcttctttttggttaaggagagatagaaactcaacttgaacttatttaaccttaaaagtaaatggattgtgagatccaaggaaagattgaacaaccacatcacaagaagggtaatggtgcatttgggcctcaggaaccagtggaatagaggcttgaatgtggtccgcacaccctctcgctgtcttgtccctcaagttgactttattctctctcacttcagattggctttcttcaaaagacatggcaataagcttggccttcaagatttcccagattttatgttctgtcctatctgcccctggaaaaaggctaatttcagttctgtggaacacaagttctttgaaaaggtcctgaatgaggaagagacctactgttgtaggcaaataatatgaatcatattacatatgtcttttcccttcatatacatctgtttagttttgcagtggctcctgggataagatgctaaagatctggtctacaggtaaattaaatatttattttaccttgacttaataatgttgtttcaaaaatttaaattcggaggctatatggtggcttacgcctataatctcagcacttcaggaagccagggtagaaggatcacttgaggccacgagttcaagagcagcctaggccacatagtgagaccccgtctctactaaaagtagaaaattaaaattagcaaggtgtggtggtatgcaccggtagtcctagctccttgggaggctgaggtaaggggattgtttgagcctaggagtttgaggtttcagtgagctatgataccatgccactgcacttcagccagggtgatggagtgagaacctgtctcaaaaaaaaaaaatcagtttagtgaaaggggactttttaacccatattttgccataaaaagagaccagtatggcaacaaattcatatatttctttgtgtttcaagattttttttttcctaccccaccacccccttacttacaggatagtgtcactgaattgcaagtatcaaaaacatgtttggtgcaataggacataaataccttgattctcaaagttctcttattcaggaaacttggaagtaaataaaaatactttccgagccattttgacttaagtaatgtaagaatgacttttgagtcattttactgttaatttcttaggtaagctggtttacttaaaaaaatttttcaatgcagttttaccaatattaatatttttactctgaaagcatagattaaaaggagcaaattgagggaggaggaggaaggactttgagaggaaggtgctttcatagtagtaagaagacactgatgagaagaaaagaggaaaaaacacacacccatagatacttacattttaagacctagtagctacaactatttattgcataggtaaacaaatcagaatacctctgttactttttaggtaattgctgtgttacacagtataataccccaaatgcatttcacaaagacttgagggggatcaagaaaagcttaaccagttttgaataattatgtgtaagatggtgggaaatatataatccgttttagtagattttacaaaaatgatgaaagcaaataatttggtggcaaaaagtgatttagtttagaaaattctttagtagaattttttattttttgatagggctgagtaaatgagattgtatatgattagctattaactttaagtggtttataatctagtttgagaaatattaatatccataaaagccacaaaacgttttaatgttttacatattttgttacatatttaatgtaacataatatgcatgttactatatataacatataatgtaacatacattacatatttaatgttgcatattttatgtagttttcaatctgggtttgctgcttaaccaagtgatgtataacaaagattttaaaaactcaaaaaaaccagaaacatttttggtagaaaaatgaaattaagagaataaacatggctgaaatgtatgtgcgtttatcatgtgtttactttatccttccctccttcataatgtaaatgtaatgtcataactctcctacaactaacagtaagcaatttttcatagctatgataaaatgataaatatttataatgatgaccttaaagatagcaagattttaaattacttagattttagttttctaatatagtttatgttttattttttatttttagagattggtaatctaggtaatattttatatataactttctgttaaccaaaatgatgaggaatattcattccctaactgtgtgataacgtggaaaaactatatctggaaatgtaaagaattctttcagacagttcacgattaatactgtttttaaaatgtcaaatctaattctctatgacacagtccctacagatgaagaagatgaaatggaggagtccacaaatcgaccaagaaagaaacagaagacagaacagttgggactaacaagggtcagtatttgtgagaactgactgtacttgccttaggcctgtgttgacaaatagatggtaatttaatatggtcttttttgtttatgttgccttctgtcttaccttgctgctttaaccatgattatcctttttttcagtagacttgtaaatttttattataagcaaagtattgttgctacatttatttgtatctttgaatgtagtggcattgagccaggcttatggttgctaggttgatgatttagttattatgtttgatctcatgttgcattctggaccttttaattattaaaacttacactaaagtgaagcatctaattacctggctgttggataatattatctgtttcatgcactgagtatgtaatttttataagggatcctagttatatcttctaaatcactagaaaccaagagtttaatttgggatttgattctgtcatttagctgttagattccattaagtcaaactcagaaagtttatccagattttttcttacttttaaaaatacttaattgataaagattgaacatattcaacgtgtactacatgattagatacacataaacattgtgtaatgattactgcaatcaaattaattaacacatccatcaccacccatgctgtacattagatccccagaacttgttcatcttataaccgaaagtttgtgcccttggaccaacatttccccatttcctcacactccagttcccggcaaccactgttgtactctgtgcttccatgagtttgacttttcatgcagattattatttatcctgttacaaagatatttgttataatgtgacctgacctgtatttatatactttttgtgaagggcaatactgagtcaggtttagaaaaacacttttcattcattttctaatagctataatgaatgtgcagtaaataaagcacacatttgcacattaattcttatagtcaccaataaaatatcttgtaaaaattgttgaaaatgaataaaatgggatcataaattatttatcaaatagaatgtaatattagcgcttactggttccagctgaaagtaatgatttataatttcttaatacatttaaacatagactgatgaattgcaagaggaaagatctggcacttactcaacttctttactctggtaggctaaattaaagctagaaatggaggccaactgtggtggctcaggcctataatcccagcactttgggaggccaaggcgggcagattgcttgagctcaggagtttgagagcagcctgggcaacatggtgataccctgtctctacaaaaaattttttaaaagttagctggatgtggtggcttgcacctgtggtcccagctacgcccagcccaggaggcagaggttgcagtgagccaagattgcaccactggactctagcctgagcaacagagtgagaccctgtctcaaaaaataaaataaaaaataaagctagaaatgccttaccatttggatattgtgccagtgggagtttatattcatgcatgtccctggtcaaacttttaaagaacatatctgagtaggaaaagatttcctgagttataaaaatgttttactgagaaggtagctcttttattctctttttttttttttttttttttaaagagacaaagtcttgctctgttgcccaggctggagtgcagtggcacaatcatagctcactataacctcaaactcctggcctcaggtgatcctcccacctccacctcccaaagttctgggattacaggcttgagccaccatgctctgccaattttttctctttttaaagtttggcatgtagcttaaatgttgctcaatgaaaaaaaaaattttttttttttttttgagacggagtctcgctctgtcacccaggctggagtgcagtggcgtgatctcggctcactgcaagctccgccccccgggttcacgccattctcctgcctcagcctcctgagtagctgggattataggcacccgccaccatgcctggctaattttttgtattttttttgtagagacggggtttcaccctgttagccaggatggtctcgatctcctgacctcgtgatccacccgcctcggcctcccaaagtgctgggattacaggcgtgagccaccacacccggcctgctcaatgaatttttataaatatgtatactcaagtaattactacccaaataaaaatatagatataccagtaccctagatgtctgcctctagcctgcctctcaaccagtagctccctaaaggtaatcacttttgagttgtgccatcttagattagttttacctatttttaaaatttcatatgatatctgtaagatagatcttttcattaatatatggcattccattgcagcatcaatatgccacaatttatccattattgagatagggtctcactctgtcacccaggctggagtacagtggcctgatcatggctcactgcagcctcagcctccccagactgaggtgatcttcccaccccagcctcctgagtagctaggactataggtgcatgccaccatacccaactaatttttctttttttttgtagatattgggttttgtcatgtcacccaggttggtcttgaactcctgggctcaagtgatctgcttgcctcagcctccgaaagcctctcaaagtggtgggattacagacttgagccaatacgctcaggctatttattattcttttgatggacgtttctttccccccttttgagaggagtggtgcagtggcataatcatggctcagctgcagcctcaacctccagggctcacaaaatcctcacgcctcagcctcttgagtagctggaactacaggtgcatgccaccatgccctggctaattttttttttttttwaagagatggggtcttgttatattgcccaggctggtcttgaactcctgacctcaagcagtcctcccacctcggccttccaaagtgctgggattacgggcgtgagctaccatgcctggctgttactccacatctttaccagcacttgatatggttacttattaaagtcatgattaacttttaataagccctggatctttgataattatgaaatgttcatatttttagctaatttttaagttgttgttattcatttttttatagagatggtgtcttgctttgttgcccgagctgtctcaaactcctgggctgaagcagtcctcccacctcatagcccattttttaaaagtgttggctctattttacttattgatttttttgttgttgttgttttgctttgtttttacttactgatttgtaagagttatttatgtattctggattcaagttctttgctgaatatatgtatttaagtattttctcccactctactttgctgataccatttatttctaggtgcatactttcgtaagcttgctcccatagttcatttcgtttgagagaaataatagtatattgagtttctcatttagcttttttcctcctttcactgatttttcctgagaaatcatttagctttttatagggtttaaatttatacatgcataaattattagtttaagtcatgccagaaacctttgaagtgccaattacaatgaaaatgttgctgcgttagaaataatagaaaaatttggggcccgagaaggtggctaacacctgtactttgaagccaacactggaggatcacttgagcctaggagtttgagaccagcctgggcaacatagcaagaccccatctctaaaaatttaaaaattagccaggcatggtagtgtgcatctgtattcccagctacttgagaggttgaagtgggaggatcacttgagcccaggaagtcaaggctgctgtgagttacgattgcaccactgcactccagtttgggcgacagagtgaggccttgtctcaaaaaaagcaaagaaaaatttggattttagcaaaataatagaaaaaagagaaaaaacatatcaaaaataggtatcttctctttgcatttctttctactgcctgaaatgtgttaatgtgaataatgctgccagttcatttacctgtcatttgcttgatatattaacatacaatagtcttttcctccttaattctcaaaattgcttttttccctccagtacttctgttccacttagtttgtagtgacaatgtcaatgttgacttttctacttttaaagaaaagttttattagaggaaaattcactttttggtgtataactatttagttttgatgaatatatagaatcatgtaactgctacacaaccaagatatagaacagtccatcattcctgaaaactcatattgccccttcttgtcaactttcctcccacctctatcctctgaaaaccactactctgttctctgtccctgtaatttttccagaatgtcatataagtgcagtcacacagtatagtgtatatagctttttgtatcgggcccttttcacttagcataaagcatttgacattttttgaggttgttgggggttattgatgctgagtagtattctgtggtatggatatgccacagttggtttaatcattcaccagctgaaggatatttgattgtttccagtttggcagttataagtaaaactatcaacatttgtatttaggtttttgtgtgaacctgttttcatttatcttggataaatgcctaggaatggtatagcttattcatatgataagtttgcctattgtttttaccatgtcattttctttttttttttttttttttgagacggagtctcgctctgtcgcccaggtcggactgcggactgcagtggcgcaatctcggctcactgcaagctccgcttcccgggttcacgccattctcctgcctcagcctcccgagtagctgggactaccagcgcccgccaccgcgcccggctaattttttgtatttttagtagagacggggtttcaccttgttagccaggatggtctcgatctcctgacctcatgatccacccgcctcagcctcccaaagtgctgggattacaggcgtgagccaccgcgcccggcctaccatgtcattttctattctagagccttctgattacctctatgtcaccttttcattttgttttagatgacatcagagattgttctgtttctcactcctctatcaggttcctttacttctttcaggaaaatgctaagagacctcagggatcatttggtctaggagttggcaaattacagcccaacagccagtttggctgtcacctatttttgtgctacagagagctaaggatggtttttacaattataagtgttgtaaaaacaaccccttattaaaacaactgtgggccaagtgcagtggggcacctgtaaccccagcactctgggaggctgaggcgggcacatcacctgcagtcaggagtgaagaccagcctgaccaacatggtgaaaccccgtctgtactaaaaatgcgaaaagttagccaggcgtggtggcacgtgcctgtaatcccagctacttgggaggctgaggcaggagagtcgcttgaacctgggaggtggaagttgcagtaagccaagcttgtgcattgcactctagcctgggcgatgagtgaagctccatctcaaaaaaacaaaaaacaaaactgtggtattattcatacagcagaatattactcagcaaagaaaaatatacaacagaaactgtgtatggtctccaaaggctgaaatatttacttgctggttctttactgaaaaagtttgctttctgatccagttataactcctaaatattacagatgaggcaatatttaaggaagttaaatgtagcaaagttatataaaagtagattgactatcccctattccagaattcttttcctcttttttttttttttttttttgagatggagtttcactcttgttgcccaggctggagtgcagtggcgcaatctcggctcactgcaacctttgcttcctgggttcaagcgattctcctgcctcagcctcctgagtagctgggatgacaggcatgcaccaccacgcctggctaattttgtagttttagtagagacggggcttctccatgttggtcaggctggtcttgaactcctgacctcaggtgatcacccacctcggcctcccaaagttctgggattacgggtgtgagccaccgcacccagctagtttttttgtttgtttgtttgtttttaagagacagactctcactgtgttgcccagggtagagtgcagtggcacaatctcagctaatggcaacctccacgtcccaggttcaagcaatcctcccatgtaagcctctcaggtagctgagactacaggagtgtgctaccacagccagttcatttctatatttttttgtagagacagggtttcagcatgttgcccaggctggtcttgaactcctgagctcaagtgatccacccacctcggcctcccaaagtgctaggattataggtgttagccaccgtgtgtggcctcctctctttttttttttttttagagacaagatctctcttgttcacacaaaaacctaaattacaattataaagtgttgtaaaaaacaaccccttattaaaacaactgtgggccgagtgcagtggcccactgcaggagtgggcctggctggagtgcagtggcgtgatsgtagctcactgtagcctcaaactgctgggctcaagtgatccttctacttcagcctcccaaatagatatgactatagtcatgtgtcattaagcccagctaattttatttttagtagagacggggtcttactatgttgcctaggctgttctcaaacccctgggctccagtgatcctcctgcttcagcctcccaaagcgttgagactacaggtatgagcctctgtgcctggctcttcccactctcttttatatactccttatatttaaggtaggtactctacctagttacctagttyggggcttttagtttagaaagacattagagattgtggagtattaataagtgaactgtgtacattatttaaagattaaataataggacttaaagatactgaggaatgaggtggtaagaataacttactgagattaatttacctggaggagttgtgtagaaattggcggcatattttgtgtgaaggtgctgaaacctatatctgtctgatcacaaaggtttttgtgttaactgtgaagcagtttcactaataaccagtctaagggaggattcccactggttggaggatagtaaaggtcatcgtatgccaggcaccaggaatagaagtgtgaatactttcacccaccgcatcctgggctgcagttttaccagttgcctgaatctggtgaggaagagcacacacgcaacacgttacatgaaacgggtttattacttacagataggcagcaagggacaacagaagccgaggatccattgtgagccagtcccccaaggctcaagaaagctgccaggggcaaatggagtgttaactgcatatgcctcacttgcagtacagctgagggatcccaaaaaacagcctgccctggtttttgtaccctggggtcacttgactctgggcaaagtttgaaggacatcctgtttctaagagctggaatagagcccccaggctatgctggccagttgctccctatctcaggatgttatattcccagaatattctatagttattttgagaactacaggcaagaagaaaagagggggggagaaactgtatccatcagtccaaggccattgggaaaccatccagcactaatctttaatataacatttgtcagctgggagagttaagtttgtgttaatgctgatcaaaatgaaaagtagaacagatgaggagcagcagaatatagtggaaagactacagacgagtaatatttggggtcaaattcaagtctgccacttataagctctatgaccttgggcaagttatctttatcagcctcagtgtcttgtataaaataaaaacagaaatatccattccattgtaaagaaagaagaaataagtcaggatatgaaagatgggcagtttgtctctgtcatgtgggctttgtaagtaataagtactattattgtttcaattattctgtaatgaaaacactttccycttttggggttcttcctttctagactcccatagtgaccctctctggccacatggaggcagtttcctcagttctgtggtcagatgctgaagaaatctgcagtgcatcttgggaccatacaattagagtgtgggatgttgagtctggcagtcttaagtcaactttggtaagacaaattcagtgttcttttaagtgataaacttctagagatggtttttagtctaccatggttaatgttctttccttttctttttcagacaggaaataaagtgtttaattgtatttcctattctccactttgtaaacgtttagcatctggaagcacagataggcatatcagactgtgggatccccgaactaaaggtgagtcatgtaaaccactgggggaatatatgtgtgaataacatctatttctcatctctctggagatgtacaaaaaaaggaatttctggccaggcgtggtggctcatgcctgtaatcccagcactttgagaggcygaggcgggcrgatcatgaggtcaggagttggagatcagcctggccaacatagagaaaccctgcctttactaaaaatacaaaaatcagctgggtgtggtggcgcgtgcctgtaatcccagctactcaggaggctgaggcaggagaatcacttgaatcccagaggcagaggttgcagtgagccaagattgcacyactgcactccagcctggtgacagagcaagactccatctcaaaaaaaaaatttctacaaatattttttgggttccttctacctacttcccttttctaaaattcaacgcttgtcttttttgctttgttcagatggttctttggtgtcgctgtccctaacgtcacatactggttgggtgacatcagtaaaatggtctcctacccatgaacagcagctgatttcaggatctttagataacattgttaagctgtgggatacaagaaggtaaattctatttatgatctataagagaaacatatcaattacctgttatagaaaggaaatgaatactgaaattcttatctaaaaccagaagagtaaaaaaagcctcatggttttgcaacctcatgtgacaaatactgatatgcaaaagaaaagccaggatcaaaaaaatttttggccaggcacagtggctcacacctgtaatcccagcactttggaaggctgaggcaggcagatcacctgaggctgggtgttcaggaccatcctggccaacatggtgaaactctgtctctaataaaaatacaaaaattagccgggcatgatggcgcactcctgtaatcccaactacacaggaggctgaggcaggagaatcgctcgaacccaggaggcggaggttgcagtgagccgagattgcatcagtgcactccagcctgggcaacagaccaagactccatctcaaaaagaaaaagaaattcatgttaatatgttgttttgttgcatatagatagctagacaaacagtatataaggccatagtttgggggttaaagtagtcaaggaagtgtgaaaatgggcctaattataaataaattcttaaaatgaaataacatttttttctgaatatatttgttataataaatgtctgtggtctaccaatgatacaggaaaaagaggagagatgatcaaataaacagaattttaagattaagtggttattggggcaaggttggtaaaccctgtaaagttttcagataagtataagtgattattcaaatgtttgttttaacactgtgaatgcatataatatgttaatattttcatcttttagttgtaaggctcctctctatgatctggctgctcatgaagacaaagttctgagtgtagactggacagacacaggggtaagaatttattagttatttgatgaagaggaaagtgactagaataaatctggtgtttgtgtttataaaatgtattagtttcgggccgggtgcagtggctcacgcctgtaatcgcagcactttgggaggccaaggtgggcagatcacgaggtcaggagatcgaggccatcctgactaacaaggtggaaccccgtctctactaaaaacacaaaaaattagccgggcatggtggcgggcgcctgtagttccagctacttgggaggctgaagcaggagaatggcgtgatccaaggaggcggagcttgcagtgagctgagatcgagccactgcactccagcctgggagatagactccatctcaagaaaaaaaaaacatttattagtttcaatatatttgatatttataattctgtattatttcacttaatattatttataaaatgtcacctctcattcaaagaagaaacaaatttgtcctttaataggccaggcatggtggcttatgcctgtaatcctaccactttgggagggaaagggggaagattctttgagcccaggagttcaaaaccagcctaggcaacatagtgagatgatgtctctacaaaaattaaaaaattagttatccatggtggtgtgacctacttgagcctacttgagcctgaagcaggaggatcacttgtgcctgggaggtcgaggatgcaatgaactatgatcgcgccactgcactctagcctgggtaacagagtgataccctgtctcaaaataataataatactaggaatagtaaatttgaaattttggagcatttttttttcttgtgagtatagtgggttttttgttgtttttgctgttgttgttttaagaaacaaggtcctttattgcccaggctggaatgttagtggtgcggtcgtgactcactgcagccttgaactcctgggttcaagcaatcctcccgcccccatgtgtatcttctttatttatttttagagattgaggcttgaactcctgggcttaggtgatcctcttgccctagccttctgagtagcagggactacaggtgggtgccaccatatctggcaaatttttaaattttttgtagagacgtggtctcactgtgttccccaaggtagtcttgaactcctggcctcaagcagttctcccgcctcagcctcccagagtgttagaattacaggtgtgagccactgtgcctagcccccacgagtatcttcatgaaacattttacctccaaaaactcactacttaagactaattggatcaaagtgtttaccagttggaaaaatcttgcataagtctgcattataaaatgtgtttaaagaattacaatttaattatttttatgtatatacgtaagctcttactgcctaagaattctttccaaatataaggcctagggctacttgaataatttgtaatatacaattaatgtgttgtcctttaaaaatttttaattttctttaataggtaaaactgtatccctttcaaacttatgtatcttggcagatgctttatagaaagtgcaacagcatattatgtctcaaccaaatttaaatgatagcttttaatgttttaataaactgtatcatagtatagtagtgaaacaacgttggtccctttactcactctcaatgcaagttaactgctcacccataattccttttgtaatgaaaatcattagtatttaattaggtttagctatgatgtgaaataattatatttatttatgttttcttgtctttttctctccttttacacagctacttctgagtggaggagcagacaataaattgtattcctacagatattcacctaccacttcccatgttggggcatgaaagtgaacaataatttgactatagagattatttctgtaaatgaaattggtagagaaccatgaaattacatagatgcagatgcagaaagcagccttttgaagtttatataatgttttcacccttcataacagctaacgtatcactttttcttattttgtatttataataagataggttgtgtttataaaatacaaactgtggcatacattctctatacaaacttgaaattaaactgagttttacatttctctttaaaggtattggtttgaattcagatttgcttttttatttttatttgttttttttttttttgagatggagtcttgctctgttgcctaggctggagtgcagtggcgcaatctcaactcactgcaacctccgcttcctaggttcaatcgattctcctgtctcaacctcccaagtagctgggattacaggcacacatcacgatgtcctgctaatttttgtatttttagtagagacggggttttgccatgttggccaggctggtcttgaactcctgacctcaggtgatctgcccacctcagcctcccaaagtgagccactgtgcctggccgaattaagatttgtttttgaaatgctgtaaaaggttatattggaaatccagtaattgattgttgagatttttatttctgttagagacttagatttttttaagttagctattttaaaaaagcattcaaaaagattaatgaaaattgtaatagagaaaaagttagaaattcagttccttttggcagaataaatgttcaagaaaattaggctgtgagggtactcagaacattaaaaaaaatgtaggctgggcatggtggctcacacctgtaatcccagcacattgggaggccgaggcaggtggatcacctgaggtcaggagtttgagaccaccctggccaacatgtcaaaaccctgtctctgctaaaactacaaaaattagctgggcatggtggcgaccgcctgtaatcccaactacttgggaggctaaggcaggagaattgcttgaacccgggaggcaggggttgtagtgagctgagattgtgccactgcactccagcctgggtgacagtgcaagactctgtctcaacaacaacgataacaaaatattgattcggcagggcacggtggctcatgcttgtaatcccagcattttgggtggccaaggcaggcggctcacctgaggtcaggggttcgagaccagcctgaccaacatggtgaaactttgtctctactaaaaaaaaaaaaatccaaaacaaattagccgggtgtggtggcacactcctgtggtcccaagtacttgggaggctgaggcaggagaattggttgaacccaggaggtggaggttgcagtgagctgagatcataccactgtgctccagcctgggcagcagagccagactctatctcaaaataaagacaagtagattgccaatttttgaagaattcatcaagatattttaaggaaggcactttatattaaatatatgtcagatcctttagaaattgcatacagttggttgggcacggtggctcacgcctgtaatcccagcactttgggaggctgaggcgggcggattgcctgagctcaggagttcgaaaccagcctgggcaacacagtgaaacctcgtctctaataaaatacaaaaaattagctgggcgtggcagcatgtgcctgtagtcccagctactccggaggctgaggcaggcaaattgcttgaacccgagaggcagaggttgcagtgagctgagattgtgccactgcatttcagcctgggcaacagagcaagactctgtctcaaaaaaaaataaaaaattgcattgcatacagttttcactgtaaccctaatctttcctcatgtgtagataagaataaattttttagacaaaacctttcatcagtattaaacattctacagattttatgatatcattagcatttatctttatgcatgtgttatataaaaatatttaaagtaaatgtattttttaaatgttatttccattattaatggattgatactccttaagtagagcattcacaaccttttagtaatatttgggaaatatgtttggtctcattattagatggtattacatctcaaatgatgttcctgttgcagaagtctgcgaaacaatatctaaacttggctgcagttgagagctaaacagtgtattgaaccagttaggagtttagttctctgtagaaaaccagaggcagtccagggctgatgtaggttttgttccacattctttaggatcctaggctccctccatccctggtatgtggtcctcattttcatatagaccaagagctagagctccagttaccatttcttaaagtatattttaatgccaaatagtgaataaaggtggccagaaaattcatgcacagaatccttctttttctcattttgtgctgattggtataaattttattgtatttgtagtctctggaaatcttctaactttgagaggacaaagatgaattcctagtcctgttttggatggtcttcaaatgatccttaagggcagttatttaaaatgtctttcttaactcacccaacctaggctgaccgaatgtagtctgtataaactagatggttaaagataaagaagcctatatatcagatgcatagacaaagaataaaatggcatccagaactggtccccacctattcccaatcctggttccacagcagaatacattcatagttcaggcattcttccttgagatagatataatgtaagtgaccaagtctcttggacaagtattgtctctgatcaatccctgccaaactcctttccttggttaactcaagtggttagatcttactccctgaacagaaggaatatgagaggtcaatacatgcctagactattcagtcctctgatattgctccacaccctttccctcaaaagccatgagacctttcaatggtcccagttcctctaccagaacaccagagatgcctgctttacatggacttatatattcccaagaatcacttggataaatgagtggtgctgctttcccgtggttggggaaaagctaggaacctgacaatgcagtgctcagaacctgctgaccggtactagttatgctgtcttgccatagtagtgcagttctttaaaatgttgatacttgctctcttatcaaaggttggtttttttgtttttttgtcaagacagggtctcactatgtcacccatactggagtacaatggtgtaatcttggcttactgcaacctccaccttctgggctcaagctggcctctcacctcagccttccaagtagctgggaccacacccagtcaattttttattttttattttttaatttatttttattattactttttttgtagagagagggtttcgccatgtagcccatgctggtcttgaactcctgggctcaagctgtctgcccrcctggacctcccaaagtgctgagattacaggcatgagccaccgcacccagcccaaataaagttttaagaaattacttggccaggcatagtggggcctttgtagaaaaacatagcttttctatgagaagatgatcaatattttcttttcctttgaatttggaattaccattttggaactgttgtcaacaatgcataataatatatcagaatgcttcctagtatattattggagaaagaacaaacaaaagtttaaattgatataaaatgcatataatggaacaagcaaccctgcaaaaaaaaaaaatatatatatatataccatctgggaatttctgataataacattgaaatctgttcacacagtctaaaattcttttgatgtatcgtagttttgaaaaaaaggtaacagtttactatatataacaaatataaggaaaatattaaattttttgaaagatactagtttttatttttgttcattttttagagacagggtctcactatgttgcccaagctagagtgcagcggcccgattatagctcactgcagcctctaactcccggactcaagggatcctcccacctcatcctcctaactaggaccacaggcgcatgtcaccacatctggctgattttaaaatttttttgtggagacagtcttgctgtgttgcccaggctggttatgaactcttggcctcaggcagtcctcatgcctcagcctccctaagtgctcggattataggcatgccactgtgcctggccaaaaatacagattttttaatagatattactatggctcctattcttaaaggaaaaaatatgacattttaagactatatgcaagggatattccaataatatcttttttatttaaaaagccactaattagaatcagatttcattaggcaagtgaaatccagattttactagccagaaactgccaggtgtagaaacagcaagaacattttagtcacttcattgttgacatttttgactatcatagattaagtatcaaacacaataacagtattttgttatatgaaccaaatatatctctttttacgagacatagtctagctctgccatccaggctcaactcctgggttcaagggatcctcctgccccagcttcctgagtacgtacctgggagtacaattgcatgctgccacacccagctattttttttatttttgtggagatggcgtcttgctatgttgcccaggctggactccaactcctgacctcaagcaatcatctcaccttggcctcaaaagtgctaagattacaggcatgagccactgcatccagcctgaaccaaatatatctttattataacttaggagagaaacgtttttggctggttagttttacagaattaaacctaatggttgttctaatagcagttccaatgatttgcagatttgaggaagtaaattattttcttacagtgtccataaaagtaacaatgaaactatatcctaccataataatcctctataggtaataaattatttgcattttataggagagaaaaatatatgttaaagtttttgaacagtcacacaggcaggaaataaatggcagtgaatttgaacttggacttatcttggacaagctcttaactggtatatattttgtcaatcttatgtcgtgcacaagaatgatgtttttataaatggaaagaatgagtgtggaagtgtcttcacttgcctaacagaaaggttatatgtggctgggcgccgtggctaacgcctgtaatcccaacattttgggaggctgaggtgggcatatcatctgaggtcgggagttcaagaatagcctgaccaacatggagaaaccccgtctctactaaaaatacaaaattagccagtcatagtggcacatgcctgtaatcccagctacttggaaggctgaggcagaagaattgcttgaacccaggaggtggaggttgtggtgagccaagatcgcgccattgcactccatcctgggcaacaagagcgaaactccgtctcaaaaaaaaaaaaaaaaaaagtaatacataaatttaagtgacatttgtgggtactaaattacaataatatgttcagctttgcatttttttgcctttaaaattaatttcaattttagcgtgccactaaacgtattactgtaatagtatataaatgtataaagatcaatttctgtatattctaataggaattgtatataagcaaaaatgaattttagaaattatcctattattcatgtaattatgtcattcatgttatttaaaggaaaccacaatgcagacaggttaagtacctagtgtgaaggtatgtaaccaattaatggagctgtgcgacatacatctgagtaataaagactacagagaaagtatcttgttaggtactatctgatacaaagtttagaaacatgtcaaacaattctatgtatagttggtgaaagtgtaataacatggctgagacttaataccagatgaagttcagtggtttcagggggaggaaataatttttaaaacgatgtcgataacacttcacatttaaaatcatcataataattctaattctagaattgtgtctaattctaatactgtttctagctttgcttgaataaacagaaatgtagtagggaagagacagaatgtttagcttgcagtatctaattactcatttgggtatctgggaagatagctctccatggccccactgtcactgacctataatgcttctcctgacgtcttcggtaaaatccaacagattacaaagaaactggaatgccttgaagaaatagagctttttgtgtgatgtcagattcaatagac

SEQ ID NO: 5629 - DNA, 317876 bp, Homo sapiens
agtgtcaggattacagacatgagccactgcacccggccaacttccccctctaatagttctaatgaaatattaactacccaagtatttctgtagcctgttttctgaatatctttctcactgtctcctcatctgactgtccattgccttaaggctccccaggtcacatctctttaagtgtactctaggcgggccgatcatgaggtcaggagttcgaaaccaccctggccaacatggtgaaaccccgtctctaataataatacaaaaattagccgggtgtggtggtgtgtgcctgcaatcccagctactcaggaggtggaggcaggagaattgcctgaacccaggaggcagaggttgcagtaagccgagatcacgccactgcactccagcctgggtgacagagtgagactccatctgcggggggaaacatgtactctaacctccttaccaactctgggtctcagacatggctccacagggttgcttgtaaaatgcaaacatgaccatgttaatctcttccctaagagactctcataattctgcagtattaaaagtaaataaaatctaagctcattaaaatgatatttcaaagtccttcttgatttggcttcctgttcatttttaaaacttcatctcccacatatagacactgctgtagccctgctgagctactttctactgaaaagctttgtatacaccattactctgcctgaaactcctcactctactattctacctgggaactactcagatggactcctgggaagcctgcattccccttccaggcagagttaattctctcctccattgttctccaataaaggtctctctctctctctctctctctctctctccctccccctcccccaacctctgtttttgtccttagccatattctgattaccatgaccccttcttaaccttaaattcccctcatatgaaattctagtatactgggattaactttcatgtatgtttttgatgaccacaggaatttttatttgtgaagtctgtgggaattatttaaaggaggagcaaagaactgagcattcagaatataaagggaggagaagtgaatgtcacagaaggagaaaaggttgcacagagatatcttgaaaaacataaaaaacaggagaaaggagtagttcattctgattcttacaaccaccttcaggtggttttggaaggagggagggagggagagaagggagctaagacttcagtgagaaaggctgtggagccaggatgaggaagaaagagaaaggtgagaccatgcgacaggaccggagcagaagtcagcaggtcatgaattatggatgagcagtacactgaacatttggataccaccctcattccatgtaccatgtatggtatcagcaacaatgcaaaatacatttgcatgtgtcttgctgaagaagtcaaagagagtaaaggctgatgagtggaaatcaacagtacagcagacaccattataaacttaaagtctacaacatgccattaatgttatcagtgttctgacctaagggttttatttattttttattattttattttatttttattttttgagacagagtctcactctgtcacccaggctggagggcagtggcatgatctcagctcactgcaagctccgcttcccgggttcaagccattctcctgcctcagcctcctgagtagctggtactacaggcgcccaccaccacgcccagctgattttttgtatttttagtacagacggggtttcaccgtgttagccaggatggtctccatctcctgacctcgtgatccacccgcctcggcctcccaaagtgctgggattacaggtttgagccaccgcgccgggccctaagggttttattttaatgaatgcgtacaaatgtgcataagggttccttaggtaaactctccaactaggtgccctcctccaaacactgagcagcccccagagcagatcctccctgtccgagggctccattgctagcaccccatataaaagcttcctcaccctggttactcagttccactcaaggatgataccgtttcttttggattgcctgctcttcaaaactcttggatttaaatggaatcttgctctccacccaccaatgtggagttgttctgtgcttcctggagtcaccttgccttgttcttagacatcagttacctttgcctcacacctttaactccaggtcagcaatcgtcttcctcactcaaagtccccaattcatctctctgctctgaaatcctcttttataggagaaatgatcagacacccttgcttctccttgtacccaagattataaagacagctgtgaattctttttgtcattttttcttttaaggaatctaaacccaagagaggatacaggagggtgaggattattatatttctttacatgatattgataacagcttatatttaatgaacacttattttgtgccagtaacctaatgtgctaaacattttacataacttcagtgctgttattatctgtctgctgatgaaaaaacaaggttccatggtcagtaagtgatggagtcagactttgaacgcacataaatgagcttcaggcccgtgttcttaaccttcaaccatgtggtcttccctagactggaggcttcagagggaagaatctgcaatttactacatttcgtgttcctatcatcttatagatggctaatatgtaaagggcacatgcagaatattaggggaatgcattctagattagggaagagacaggagttttactagtcaatgaaagatagaatttcaggtctatagaatgtttaccttgggagaggagaagaagagaggttatctaccatatagatctgaaggtcatagattctaaaactactttaattcatctttcctgaagtatttctgaatagagtaagtaaacagaatgagtgccaatcccttggaaacagcaattgatttttatattgcttttcacagagtcaacatatgcagacagtctgacttgcctattgatctgagctagagttgagtgaatgagctggatgtaaaattccctaactcatcactaaaagtcagtcagaccttgaacgacggttactttcttttttttttctaacatgggtgacaatgagcaattgaatgcttagattgggagctgagagattatctttactttgttgagtaataaacacattaattaacaaaacaggaaaatcctgtcaaagaggaagtccttattaagatcatgctggaggccttttctattgcactggaaagattagctgagttcagtggtctttaagaaagtataatcatgaaaatagttacgtccagagctcagagagtttgaattatccttttgattggaagattctagcccagactattttatcctattctaaacttgccaaaaatttcatattgtcaaactttccctccaccccatgccaagttgttaagctttcaaataaacaaatttattatgataaatttcatctctattgatgtaaaggctattggatatcttttcttagcatttagtttaataccaaattaatattttgtatcatcctgatatatgaagacatttacaaatatagaagagaaataattttaatcagttttattgtgctgtaatttacatctgccaaagattatctattttaactatacagctttatgagttttgacaaatttatacagtcatgcaaccacaatcacaatcatgatacagaacattttcatcacccttaaatattccctcatgcctccttgcgatcaatctcctccccaacccctggcctctgatttgttgtctatcagtgtagttttggcttttttagattttcatatggaatcatgtgatatagaatcacttaggaagtagtcttttgtgtcttattgttgtccttgaaaaatatttttaagcaagcaaaatgacttgccacaggttggcagaaaaatatttgcaaaatacatatttgaaaattcttgtatctagaatatatgagctcttacaatcaataaaagacaaacaacaaaattttaaaaaataggcaaaatatctaaacagacagttcaccgaagaagataaacaaatggcaaatatacataaaaagatgcccaacatctttggtcattagggaaatataaattaaaattgtaatgagatacctatgttgacacaaagacctgttcacaaatgttcataacagctttatttataatagtcccaaactggaaataactcaagtgtttatcaactgatgagtagagaagcaaactgtgggatagccatatgatgaaatactactcaataataaaagggaaccaattaatgatatacactacagcacagatgaattacaaaagcattatgttgagtgaaagaagcagatacaagagacatatagaagaaattgggaaggtttaaaaaaaatttttaaaagcagtgactatttgagtatcacaagtaaagtttttttttgttttgttttgtttttgagacggcatctcgctctgtcccccaggctggagtgcagtggcatgatctcagctcactgcaagctccgcctcccgggttcacgccattctcctgcctcagcctcccgagtagctgggactacaggcgcccgccactaagcccggctaattttttgtatttgtagtagagacggggtttcaccacgttagccaggatgttctcgatctcctgacctcgtgatccacccgcctcggcctcccaaagtgctgggattacaggcgtgagccaccgcgcccggcataagtaaagaattataagctatggtacataatgatcctctcctcaaagagcctacataagtaagacacaaaataagtaaaacacaaacaggcttgtcctgaaagagcctgcatgggtattaaccaatgcaatggtaattacctagagatttttcttagaagtgaaatttttacagctctccctcaaattcagttttgtctgtgtgctcatggaaagtctgagtgcatcaatagttgattttacaatcgaaatgtagaatattttcatcactctcagtggtttctgtagtcccagcacagagtgagtggggacatcagtgctccatgtcctcaaaccatatatccagctggaagggtgtatagcgcagtgtggaaagtgggaatggattccacagccgtccataggtcccacagggatgataaaaagtaaaaagtacaaattctttgtacattctggatattaacccattttcatatatatatgatttgcaaatattttcttccattctgggagttgctttttcactctgttgatgtattttttgatgcacaaacgtttttaattttgatgtattccaatttatatcttttggttgtctgtgtgtttttctttttttgcccatgcttttggtatcatactcaagaaatcattgccaaatccaaaatccaaggtcatgaatttttgtcctattcttctgagttttatgttatagtttcagattttttgaaccattgtgagttaattttatagttttagctcttagatttagatctttgaacttttttgagttaatttttgcatatggtatgaggtaagcctcctacttcttttgcatgtggatatctagttttcctagcgctgggtaaaggtggaactcctctgcaagggaggtgaggaaggaggggaacagagaaaggtgtagataatgaccagtttacttttgttgaaacctagttacttcttaagcaaagattgtttaagtggatgttttcaaagctgcttgttactgtttcaaaggtcaaatagataatgattaagttgcgcatcacttaaggtagattttgacctctcacaagttgaagagtactgaagatctaagatcatttacatccctctggaagaaaaaataacatagccttctagggcaaagaagaaaaaactcaacagttacaggatattccatggttcaaagtacacctgcctggtttgctgttctccaaaatcccatgctcagttggttggagtggcctcactcttacctgccaacctgggaggttgatgatgaacatgtctttaccttttctttggagtttgcttaccttattaatatttgctgaagtaaatggcgaagctggagaacttgagctgcagagacaaaaaagaagcatcaatctccaacagtaagtaaacacatgggtcattcctgctcagggactaggctaattcctcaccagttttcccaaatagccagataaacaaaggtgcaatttttcttgaggaaaattatgttgagaagcaaacagggaaaaacatttagactgaggtatgaaattactttcctatgcacaaattattatctgtcattttgcaaataatctgtttgcaattgccaggaggtatctctgagaaatgtgcagagaaaaaagtggcagatgagcaggggcagttgggttgagatgatcaaaaagtgaagatgtatttggcctgtagttattcagtaagaaactttgttattttggtttaaaaattgtacttgctaattactgatgcattctctsgtttgaattatataggcctcgaatggctacagagagaggaaatttggtgtttcttacggggtctgctcaaaacattgagtttagaaccggatccctgggaaaaattaaattaaatgatgaagatctcagtgagtgtttacatcaggtaatacactggaaatatattgaagtcattttgtatatccatatacggtgacttaattgaacaagtctagattaatctgtaccttgaatcttttttaattattattttttattaatacataatttgatacattcctataatgtgtaaagttcaaatcagggtaattgggatatccatcaccttaaatatttaccttttcttcatgctaagaacatatgaattgttctcttctagttattttgaaatgtacaatagattaatgttaactatagtcaccctactggtctatcaaacactaggtcttatttcttctatctaactatatattgtattcattaatcaacctgtcttcagcctccctcccccttcctagtgtaccttgaatctttagcatagagaacataattgggcatcagacatgttcttgtaaaggacgatggcctggggttaatagtgggtagagggagtatgctaaaagatagaagctcattgtgccagacaatgcaccctagtccagagaaggcacggagggtggaactgaaactcctccacaggggatgcgaggaagtaggggaccaaggatatgtggacatgtgaccagtttgcttttgccacagaacagaattggccagttattctcctgccttactgggtgttttcatttcccaataatcactgcatatttcagtcataatgttagaagtcagcattattcagagcttactgtgggccatccactgtgcttagcaccgtatggatgttatctcatttgaccttcacagctgtcctatgaggtggcctttattgtcaccctagttttacaagaggtaaagaaaccctgaagcagttaggtaacttgcccaggacagcaataaatagctgagccaggacttaaaacctaaacagtctgcttccaagccaggtttcttaataagcaccctaaactggtattataggaaaacatacaaatggaaaataccttgatctattgttactgaaaaggataagtggaattatgctgtggctattttagcccagtgtttattacgcatggtgttgttttggtttttataataataggcaagatcttagtgcttaaagtagaatactactcaagtttttaattatgttactgtaaagataaatatgatattttcactagtgctcttcatttcttcttctttttctaaaattagatccagaaaaacaaagaagatattatagagttaaaagggagtgcaattggtctgcctcaaaatatatctagtcaaatctatcagcttaattccaaggtaagtctgacatctacgtcataagaaccgatgagttctccctagttctattgtataagtaaccgttttgtaggggatataccaactttgtgtgctctttagagatttagcatgtaactactcactgtttggttaaatgacacagctgtaatggaggctgtagaagtgatggacagaaggcaggaaatgctgtgcaagcacttgttgcagaagtaggccttgggctgggagcagtggctcactgcaagtgaatggatgattaatataaaaaactgcctgtaatcccagcagtttgggaggccacagagggagggtcgcttgagcctaggagtttgagaccagcctgggccacatagtgagactccgtctctaccaaaaaaaaaaaaaaaaaaaaaaatagctgggcatggtggcatgagcctgtactcacagctacttgggaggctgaagtgggaggatggcttgagccagggaggttgagrctgcagtgagctatgatcatgccactgtgctccagcccaggcaacagagtgggaccttgccagaaaaaaaaaaaaaaaaaaagaaagagagagagagagacagaaagagagagagagacagagagagagagagaaagaaagacagagtgaaagaaagagagagagagaaagaaagaaaggaagaaagaaagaaaagaagccttgctgaagttctgagagcaatcttcttattggggaagtggatgcatcactgacatttatgaacatttccatagtcactgcctacagagaagcaatcggtcaacttatcagtgggttgtactttaaaaaaaaacttaaaaaaaccccagaaatctatgtgataggagggaataggaaggaagaaaatcctgaggggagaggaatgaagaggaaaaagggaataaaaggaggaatgaacaaagtgtgtccctagcagagggcattaggacaatatgtcaaggatataacatcacatgtgcaatgcctttgaaccagctaactgaagctttttcttccctattgccagctggtggatcttgagagaaaattccaaggcttgcagcaggtaggtctcatgctactacatacccaaatctttcacagaaaacatactagaatcattaatagagctgctattcttattttgaaggtgaatggatgattaatattaaaaacttgctttttcccataatttaattctcatcccagcrtgtgcttcccaggatgcagatgcagagctgagtctaagacagatgaaatgacaaggctgaggtctccgagcctgttagggcttctgaccctgagtttgcagcccacagcccacatcctttaccatcaccctttagctgtgtgtgctgtgcttggtcagctagtgatctcccaacttgctgattctcccatcagggactggggctcggaaagcaagcatcctctctgacgctaagctcggaagtctaggtgtatcacaaaatagtccgaattttcttaaaaygacatttgctggtaattaaacttgaacagtttcttacagaaaacattgtataactgtactacatgcttgtagactgatctatgtaaacttaggcttcttaccccttttgtaggaagctgaccttttaaagactttcatggaagctgtaaccttctatgcagagaaatgtacagaatctcttcatgtttaaaattttgcataaaaatctggggattccagtgtaagaatttctgcaaaaatattcttcatctgttttgctcatgcttcaagcattttcctctacttttaagtttgatctgtcccactgtgaaggacagatacaaaaaaaaggactcatgcagattgaggcaggtcccaccattctggcaaggattgctgctgcaaacctttttgtcatttgatgatcaagttcgtgtattccttttctccacttagataatacattgacccctcagctgtcatttttaagagagtagttaagcgaaagaaaatgagtaaagaatagtgctgtggaccgtgacactgcactcaagttttgtctcctggagggcttcattatattcgctcagccagtcctcctaccctcatccctcaggaggaaygttgaatgattttcaaatgtgaatgctttgtgcctttggatagggcaaatgctctctggccaccacagtccccaccactccctattgtcttcctcctgactcctgatttcattttctactaggcccctgtaggcttttaagattttagtccccagacagtgttgcttttgtctgacagaaaacctttgaatgagtttgtggttaatgttttaaagagcattctatgatggacagagccaattgttgtgctagcacaaagagaaaaatagaataatggaataaaacagggttcataaagagacccccagacgtgtggtcatctaatttatgaccaaagtggagaaggaatgtgctttgcagaaaatggtattgagtcagttggctatcctctggctttctatttcatccataaaatgaaggaaacagacgtaatttttttttatgagtcactgtatatagtatgttgtatttgtatgtgtgtgtgtatgtatgtgcatatatatagacacatatataatatatatgtatgtgtgtgcatacatatatatgaaatgtaatcaacagtttgcccctattttaactttttaaaarcagagaattaggttgggtacggtggctcacgcctgtaatcccagcactttaggaggccgaggcaggtggatcatgtgaggtcgggagtttgagatcagcctggtcaacatggtggaaccctgtctctactaaaaataggaaaattagccaggcgtagtgggacattcctgtagtcccagctactgaggaggctgaggcatgagaatcgcttcaacccaagaggtggaggttgcagtgagcygagatcataccactgcactccagcctgggtgacagaccgaggctccatctcaaaaacaaacaaacaaacaaaacaaygataccaaccaaaacccagacaattggactatgagtgaaattcataaagtggccatcattgcataatcaagtgttccctctaaagaagttttctctggctgggcgcggtggctcacacctgtaatcccagcactttaggaggctgaggcgggcggatcacgaggtcaggagatcgagaccatcctggctaacacggtgaaaccccgtctctactaaaaatacaaaaaattagctgggcrtggtggcgggcrcctgtagtcccagctacttaggaggctgaggcaggagaatgkcatggacccgggaggcagagcctgcagtgagcrgagatygcgccactgcactccagcctgggcgacagagcaagactccgtctcaaaaaaaagaaaaaaaaatcaaaaagaaaagaaaaaagaaaaaagaaaaaaaagaagttttctctgcacccaaaggcagtaaaaatcttaacaagattcaaactggtagctgacatagggtcagattccccaggttatgtagatgtagatgtagacaaaggtaggtctgtttgtgatctgggctgaaagcagtcaggtgagcaccagggtgaaagatatgtcttagctggccacatttctaacaaagggacttggagcaggagttcagtcaccttaacccatgggaggaggggcagcagcagcagatgattatatttcaaaggctcacctcgagggaccaaagataagaatcaccggtaaaataaccggaatctccattttattttctttgtgcaatagcaacatccattattatttccacacctgaaacctttactcctgtccactgaggtctctttctcaggtgagaataatacttttccaagacaaagtgagaatcttctcccctcagacttcatcccacccgtggtcaaaagcatgctgagagttaaggaataggaacaagattgataatagaaaatgctttctgttttttcacaagagaggtgatttgaagaagaacataagtaatggctttaaagtgtagaaggagacccccactgattaagagttaaatgtaatcccacgtgcacggtaacatgcgttttgttgctgctgactgcaagtcatctcattgactgtcctgtttttgtttcagactgttgacaaaaaggtttgcagcagcaatccttgccagaatggtggaacctgcctcaatctgcatgattcctttttttgtatctgtcccccacagtggaaggtgagtcatctactctttggttaagaatgatggcmggtcagcatctgtggtttccttggaatcatcaggcatatttaattctccatctaaagtttctaggattctgtggcctcccaaatcaaattgaaatataccaggtatgctaaaacccaaacagtggtgagtatgattgtataacccaccaaatactaaagccattgaaaggagaggttcacttgattggataactgcctggaagaacacaatatttctgttaacattaatttaaattgttcagcattggaaagtaccaaacaaatcttgacatacctatgcaaattttctcattttctttgtttgtttattttttctgataacgatggaaactgtctccagcatgcacataaaaaaaaaagttaagtaagtattcccagatgtagcaccactgtgaactgaggattctattatgtttagataaggattcctctcctgtgactgctgtgatcttatgaagagctcttgtgttctattaggtgaaatctgagttccagaggaagaatagccaggggttaatatcagtattattgtatttgactttatgaggacttatatactgtccacgtataaatccttaaacgtatcatgtgaatgttcgctccagatacctctgtgacctttggcacctgactttgttccttatatgatcacagggtcctctctgctcagctgatgttaacgaatgtgagatttactcaggaacacccttgagctgccagaatggaggcacatgtgttaatacaatgggaagttacaggtaactttttttttttttttttggtaaatatcaggtatatttttgaaggcctaaaacatcccatagttaagagcatcctaaattaactatctgtattccaccaaaagttggtactccatgaggaaatatttagctcttgcttaacgtctacatagctatttttacttaactgaagaaaagctcatgagtcctttactctcaccccgtgaagaaatccttgctctaacatccccaaggaaccggaagaaggctcccgtgattggcacagagagtaagcatggcctggtgcaaaaggagctgaagacttaggaagagccggagcattgaaggggagccactgaatggccttaagtagaaaaggggacaccccaccacaccagtgtccccagctgtactctttccatgtattagcaagctcatagttttgggtaaagagagctttattcaatgctatgtcaaaatgtgacyataacgaggtcaaagattaaactgaggttcaatgaatgaagtaactctctctgaccacagtcatcattatcagtacagctctatcttctcttctgacttattctgtmaagtgacttgtccacagaattctcctgctcagctcaggcatcactttctgcaggaaactttcccttccctttttaagcagagtgaggcatctcagggcctctatgttcccatcatgctctagggatatccatcgtcaaagctttgctgatgacacacacattgtctttctaaaaacgaagtccaaaaaattaaggcagatcaatgccaaacttacttttgtacagttctttgaagtcaccttttaaactagacagtgtctttccttatagtttggctggtctcttttattttgtgatttttaaaagattaataaataaattctgctatagaatgaacaaatcctttcaatgctctggagtagaatctcactggattgaagagcaattatttgctctcttactggtgtctctgctatcttgttcttcaatttccacataacaatatccattctagtctttccagcaaaaatgagtgcagtaattttgttttttaaaccatcactattttttttaaattttattattattatactttaagttttagggtacatgtgcacaatgttcaggtttgttacttatgtatacatgtgccatgttggtgtgctgcacccattaactcgtcatttagcattaggtatatctcctaatgctatccctccaccctccccccaccccacaacagtccccggtgtgtgatgttccccttcctgtgtccatgtgttctcattgttcaattcccacctatgagtgagaacatgcggtgtttggttttttgtccttgtgatagtttgctgagaatgatggtttccagcttcatccatgtccctacaaaggacatgaactcatcatttttttatggctgcatagtattccatgttaaaccatcactattaatgcacacttctaaaaatgcagtcacaaaccttctctttttatttgatacttttgtttttttgatctgatctttaaaacttttactcattccaggttataaactcaaattattcaaacttctactagatatgtctatgagttcaatcattatgcaaaagtaaaattaaccacttctgacttaaatttagtgttatgttattaaagagctttttgattccaggactctgtttctcatttaaatgaagmcttttttccctgcctttgttaggcttgggctggaagcaaaatgcagtctagtctctcatttccgtgaacccattatctcctgatttctgtttatgggcatttatcaaggaggattgctacatagaggtattggtggcaaatgtccaggctcctagaacttctgctttctgaccttcctgatatctaggaatgttacagagattagatttcactcctagtcttcctttatcatcactgtcttttggagtcttgtgggccaatagagcgacaagtatgggcaaactgtgatgagatccatagaccaagataaaggctgttgctgttttcagcacgttatttyttccccctgcaaaatgaaaaacaaaacaaaaacccttttactatttaccactctgcagcatgtcagaggttagagttctttwtccacacacacatatgacagaatgagagctaggaggaaaggaaccatttatttgttgaaagctgcatttctaaatgacagattcaactttgtaagaacagtacgaaattctctcttgcactcttttataaaggagagcaagaatacagaagaactratgatgtgtggatggctttggaaatgatcttgattcctagactctgcccttcatagatttgctggaggacattagagaacagagcatttaaatcagggttctttctcttgatatgggaatagtttctgaaacctcatgaattccatttcattatctacactttaagtcccgtaattcaggcatatgttggagactttttgagggaataaaagaaaatgaaaaaaggtgcatgagcataagattaaattattgctttgtggaatccacgtgtaatgaaacaagtgaacatttagatactttcttgagttctgttaattatgtgaggttaaatccttgttaatcagggtattcactgaggctagaaaaccctttgggaaatttcagcacacattagctaaaagaaaacttgagcctcagaatcatctggacctgcaaaaatgtagtcatggcatcaaagttcgctttggagtttggacctcattcagtttctttaactmtttgagctcttttacttggacggaaaaaggagtctttaactggattaatmatttgccattgtaaagacctctgaaaaggtgcagatactcattcatggaaagtcctgtttcatacctgtttcataggtaaacttctggtggaaattcttttttagaacaatgattatagcacaagaaacatcattttctgtttccactgattcttttggcttgaggtctagacccagagcttcagacaactaacacaattacatttygccacttctccatgctgttactccctctttgttctgaagacgtgattcttgttgtttccctgctcactttgttttgttttgtttgtttttgtttgtttgtttttgagacagagtcttgctcttswcacccaggctggagtgcaattgctgcaacctctgcatcctgggtacaagcaattctcctacctcagcctcccgagtagctgggattacaggcacctgacaccatacccggctaatttttgtatttttagtagagatggggtttcaccatgttggccaggctggtctcaaactcctgacctcaggtgatctgcccgcttcagccacccaaagtgctgggattacaggcgtgagccaccgtgcccagcctcccctgcttactttggatttaagacagcccttgggatctgagcttgccatgcatggatggtgtgtgttgtacatttagggctcagatctagaaggctttccagaaaaacaaaaagttgagtttctctggttttccrgaaacatgatgattagtaaattttatttcacttatttccattcatatcactggtagattttacatcatgcagagtttaaacaatgaggataatctagttttagctcaggtggtagttaggtattaaacttattacctttttcactcagtcagtaaaattagtattgaaccatggactctaacacaagttaaactatgactatccaagtgtgtttaacctcttctcaattgccaaaatgcacttgcagtgttttcaaagaaaagcctagatttgttctgctggaaccaagttggcaataaaaggtcatagaaaagacacttctgctatatcagtaactaataactaaagcaggaatagtagtaagttggttttaaaaatacaatatatggcttttattttcacttagggaggtatataagtaattgttcatttttaaaggccatatcaagacaccttgaaaatatattttgcctgttaaccctgttatgtttaaaaggtacatgaggctgggcacggtggctcacacctgtaatcccarcattttgggaggccgaggtgggtggatcacctgatgtcaggagttcgagaccagccttgctaacatggtgaaaccctgtctctaccaaaaaatgcaatacttagcttacgtgctggcacgcatctgtagtcccagctacttgagaggcagaggtgggaagatcgcttgaacctgggaggcagatgttkcagtgagccgagatcgcaccactgcactccgcctgggcacaagaccctgtctcaaaacaaaacraaacaaaacaaaacaaaaaggtgcataaaaatgcagcatcttcatataactctacttatcagaatgtaagaatataacatgcaggaacaayggtgcaggagtcgggtagacctaagtgtctatttatcttctgccaattattcattttgtggttttgggaaatgttagtctgtaaaatgggattaataatacttgtctttgaggatcataggaaggaatcctatggtttacttgagtttcttcctccctttctctatcttctcacatcatctaaacttaagtgaaagaagtatactctgtagctatttagagaacagtataggattaatgcctactcatctcccagtgataatagcaaggatgaaggaagagagagataaagagaaaggatttaactgcaggtccatgaaccagaatctcctctcaaatcttatgtcattttgcaatagttaagcacttagtgataaaataaagacaatcttcttagcacttgctacagggraatgcctgtagactgcaatatgaccataattcacagagattaccactattatttcataagaaattgaggcagagggagttagtacattgtctgggtaaacagttaacaggaaggaccaaaatttaaacctaggcaatcttatcccaggggtttccaaacactcagatctcccagacatagaaaatagaaagctagtaacagttggtttaaagattcttcagcagggtgcggtggctcacgcctgtaatcccaggactttgggaggccgaggtgggcagatcacctgaggtcaagagttcgagaccagcctctacctctagaaaagagacttctgctaaatcagtaactaatcaattggtttcaccacatggtgaaaacccatctctactaaaaaaagaaataaaaaattagccgggtgtggtggcacgcacctgtagtcccagctactygggaggctgaagcaggagaattgcttgaacctgggaggcggaggttgcagtgagctgagatcatgccactgcagtccagcctgggtgacagagtgagactccatctcaaaaaaaacaaaaacaaaaataaaaaagattcttaaacattgttgggaggtgttgggacaggtggcaaagtaaacttttagtaatgaagyctcctggatcaaatgctcaaatatgtgtatgaactgttttaaagttccataatcctcaagagtctaattaaattctctatacaaatattctatgtaaagatgggaggacaaagaggaaagaaaacaatatgagaaggraagtagagagagatgcggggaatataaatgtctatgggggggatggataattcaatttctctttaattttaatcatttattgttattttcctatgactttatcttagtgagccgttccaaaggcaactttggaatgctcagaaatgtcatatattaatgaatcagcttttatgtaaatatatactgatgtygtaaattgcatggaacatatttataccaaaaaatattcatttattggaaactcacatttatttgggcatgctgtatttttatttgctaagtctggcctcccgacttgaatgcatggatggtgctccctgcattcttattctccatttctggccacactcattgctctcctcttccttagaaactgccaaaaagctgccaccccagcaattggttctggggcccaccacaggcaagccgaatcctrtgcctggagkttggttcttgatgcctttcaaacagtcaaatgctaatttcccacaatgtcgttcatacattgtcatccatgaacattackaagctccttgtacctcactgtgtcttgttaaaatagctcttttcctttgtagaatggcatgggagggaggcctggccacgcaggcacgccctgttccttgtctctgacccctggcaccaacagtcatttcccccatgagagcttttcttgccaattctgctcaagtccggcaatcggcaacctctgggcctggccctacctctccatcagatgtgccctggcatgtggggataggcttaggcttctgggactcctctaccctcctcctcccctagctcccatgctcagatcatagaagttcccattaagctgcagagataaggctaaagcagctttaacaatgacaagggcttaaaacaacattgcttatttgattatcattggacttaaatcttctagtaacaaagcacccactgctagcttacgcatagtgtaataattaccacattttgttggaaattcaagtgtggctatgaaagaaatgccactgtattatattatataactacgctttttatggatagaagacatattgccctttgtaagataataataatgatcatagactgtgaggtgtggacactggattgcgtgtggggttatataatcctagagagcattcagagttatcagtgtagcccacgttgcctgtgcttcatggcaggtccaattggacagatgatgaatggatttgctgatctctccctttaccttcttgaactaactccattacctttggcttatacacatctgacctttgaaaatgctgtttgatgacctgataacacaagaatttatagtgctaggcttaccagataataagttgtgattcaccaacattgtatttactcaatccaccacttggagcacagcagagtgattttctcccgagactccagtcagtaaatttgcattgctggctgacgattccaagttaacatcgttgatttgtaatttgaattatttttctcattgatattaagagacaggcactggccccaaagcgcrtgccctgacattgtgctcttgtgtaaccaacagttgtcactgcccacctgagacgtacggaccccagtgtgcatccaaatatgacgactgtgaagggggttctgtggcacgctgtgtccatggcatctgtgaggatttaatgcgagagcaagctggagaggtgggtcccttccccaaatgtgcctccttgcagagagccatggttagtagctcctcctcctcctatgcccactgcatacaagcactacctggagcttacagaggtgaagtcacttcctgtctgtaagtaggacataggcgaggaggggagatgaactatgcaggaagtaggacccagagattaagatgtcattatgtaaaataggatttttttttttttttttttttgagatggagcctcactctgtcacccaggctggagtgcagtggcacgatctcagctcactgcaaccttyacctcccaggttcaagcaattctcgtgactcagcctcctgagtagctgggattacaggagcatgccaacatgcctggctaattttggtatttttagtagagacggggttttgccatgttggccaggatggtctcgaactcctgacctcaggtgatccacccgcctcagccccgcaaagcgctgcgattacaggcatgagccaccgtgcccggccgaaatgggaccatttttattatcccgtcatgactctctctgagataagaccttctcttggccttgtaagttttattttaacagtgacaaaacacaggaatataaaaggaccagtcttgttggcaacatgtggtttcaaggagtctgacttttcccggcctgggtctctggaactgctgcagactctaagagcccactccccagaacgaccctccatgccctgcgtcctgatgactttgactcctgaccctcaaggttgtccagtcttggctggcttggctcttcatgagaacttcaattctttatttttagttgtattttttctacccatgtgatggaaaataattcccgtccaatgatggggatggaagggttgaggaggtgggtaggaggaagaactttccaaagaaaaacaaacggaattgattttccaargtctgtgcctacatgggtgtttttccctctaaaaacatagcaggctgagttgattgactttaattatattgacttacagttcttgattgttgttactctttccctggcatctttgggagaaattatagcttgcttttactctgaaataaagatgtttccctttttgcatggtctggtctaaatgcttaatcatatgggaagaaaaagasaagccagtggattggccttatggaaatgaacgttagaggataaacagttaggggcttgatgaaatgttcaaaggcttttcttgctgattttcatgattgtctttattcacgctgttgtcatcctgccagcccaagtacagctgcgtctgtgatgctgggtggatgtyttcacccaacagccctgcctgcacgctggacagagacgagtgcagcttccagcccgggccttgctccacacttgtgcagtgtttcaacactcaaggctctttctactgtggggcctgtccaacaggtacattctcagggccacaagccaggctctgcatgccaggttggcgaggtgccagaaccaattttctttcactattgatgagtaagaagacaattcttaggaggtgttcaaatccagttttgtgtcctggttctgctcgacgatctcactgctatcacaattccacgtcaaaagggggaggcttgtccaaaactgtgctagagtcagactttggggcaaggttagccatagaatttgtaagttagacactgcattgcagtgaccaccaactgaccagatttgagatcaaaagagatactctagtcccacctttcatactaaccagatgtttgtacacatggggaaattatttgacctctttgcatctccaccacagtctagtagctcttgcctgggtgtgtcattagagtatcttgcggccttgacctaaacagaggtatccagctccattatgccctgcagcaactgaatctccagggatgccatatgttgagtcatggaaaacatgggctccgttagtcaaagactgcctgtgtttgaatccgagggcatcttttgttttatgagatagtcatcatatattccacacattttttttttgtaggatgcctactatgagcaaagcactgtgctgggtgcattggtaggcaattagccagacctcaggttcatctgcgctccagggrtgttcttagaaatggagccacaaagataatgtaataatagtagctggttttgttttgttttgttgttgttgttttgagacagagtctctccctgtcacccaggctggagtacagtggcatgatctcagctcactgcaacctccacctcctgggttcaagcgattctcctgcctcaccctcccgagtagctgggattacaggcacacctcaccacacccggctaatttttgtatttttagtagagatggggtttgccatgttggccaggctggtctcaaactcctggcctcaagtgatctgcctgccctggcctccaaaactgctgggattacaggcgtgagccaccacacacggcctggtttttatttttaatcaaagtgttattaaggcattgtataagcaatttttaattcttttaactacaacaaaatcaagacatggtaaaaataagtattactcacattttacaatatgagaacttgagcttaaagaggttgaataacttgcccaagatcgcatagctttacagatagccagaattgaaacccaagtttcttggcaagtttcttctcgccaagaaaccccacacacctattgccccatgtagtgatttttggtttagtggttttctgcgtgtatatatttagatcttgtaaaactggaaagaaatggaaaaaaaaaacctataaagactttttccctcttagttctcaggggcaagcacaatttgcaagcaatcacattttgaaggtaatttatcatggacaatctttaaaaactataaatcagaaaaataaattatttaaattagaagattggcaatgtttttacattcttctttttattgttggagaggaaaaagagaaacaatttttttgttttcttgtttatcaccctatttttcctgaaatatatggtagttatattttataagcagcaaagcaatatatgctgcttataaaatatcactacaaaaatatggaaaaaatagaaaaaaatacctttgatcttatcacacagaggaccatgatgaacatttgggcgtttttttcttccaactttttttcatgtacacattttgccatgcacaaatatgataattttcttaggcagagtcttagaagaggattctacttaaatcaaagaatatgaatatttttaaatctttaaaggtttttaagaattcttataattttaataatttgaattataaatctacaaccattgaatacaatgggaaccactaaagtaaaattcttaaatctcatcttcctaatgacaccattagtcatttgttctccttcctcttctactttattcttcatttgtacaagcacatatgcaagagtttaaaaaattctttccccaaattaggagtatgagcccaatcctccatatgattttaacagtttgtttttgtttttgagacaaagtctcgcccaggctggagtgcagtggtgcaatcttggctcactgcaacctccacctcccgggtttgagggattcttctgcctcagcctcccaagtagctgggactacaggcgtgaaccaccacatccagctgatttttgtatttttagtacagatggtgtttcaccattttggccaggctggtcttgaactcctggcctcaggtgatctgcccacctcggcctcccaaagtgctgggattacaggcatgagccaccttgcccagccacatttagtattttaattaatgtatatacaaaaattctttcaatgtgtgtgtatgcaaatgtaggtatacaggtgtacacatgatattaaaaagcgtttttagtatttggtcacaaagatgagtcataaggtgttcagctatgcttctattgataattgagggttttttccctattaaacagtgctgcggtagacatcctcttacctacttataccagtatactaagatgtatactaccatcttagtatactggtagttttatcacaataggctgagttttaataggtgcaactggcagtcaaagtctatgtattttaaaaattttagtgaatactgccagagctctttccaaataggttatatcaatttaatgtctagctatcagcatataagaggagcccatttgcccactttgttgtcagaatttgattttaagaattcaaaacaacttttgccaatctgataagcatatctcatttttattttatagttccttaggtggagaaggtttttatatgttttgactcttgtatttcttccttgttgacttgtctatagagctaaacttttaaatcctcttgttttcctaggctggcaaggcaatggatatatttgcgaagatatcaatgaatgtgagataaataayggcggctgttctgtggctccacccgttgagtgtgtgaatacacctgggtcttcccactgccaggcctgtccaccaggtgctgcctcggttcaatgtcaacctcctgaccccagcacagggaacacagacataggaatacggaatctagtgctccatttaaaatatgatttctggctgagtgcagttgctcatgcctgtaatcccagcactttgggaggctgaggtgggcagatcacatgaggtcgggagttcgggcctggccaacatggtgaaaccctgtctctactaaaaagacaaaaattagctgggcatggtggtgcatgcttgtaatcctagctactcgggaggctgaggcacgagaatcgcttgaacctgggaagcggagattgcagtgagctgagatcgcaccattgcactccagcctaggcaacagagtgagactctgtcttaaaaaaataaaaaataaaatattatttctgtcttaggagaggaaatagtacagaaagttttgcttatcttgtgaattcaggacacattagtacaactctatgataagaaagaaaaaacattttgaatatcagtagaaaacaacaaactttacaaactgtcaaatagctacagagataatgcagaatttgaaaagttttctgagtggatcacagacttactgttccattgccctcacgaataatttgttaatatcatgcactcctgagttgttttgcatataccaagtttactaaaccacaggcatcacagtaggcatatatcgtaattgttggtttccctccttttctggaaagaagtcttttctgctattctctaatctaaatcgaattactacccaagaagttcagggagtactaagggataaactgaaaccttgtatgtttaaataacatggaactacagtactttgggcttctataataaytgacctctaagaacatcagagtcactgtaatataaaaatattaactttcttagtgtcagcactttctaagtctaccagtagttttatacatatttttttcattagaaacaacccagaacattgcttatgaaatcaggttactaattcttgttatttttcttatttatgaaatttcatttgttgatgacattttatacttatattttttgtttcgatgatagaggatccctgattggtccatttcatgatatttgaatcctagacaggctttgtcctcccatcttcttgacattgtttcttatgacctggctcttgttctcatcagggtaccagggtgacggaagagtgtgcacactcacagacatctgctcagtcagtaatggaggctgccacccagatgcctcatgctcctcaactctaggtaatgactcatctctctctttggctttgggtattgtaatatgaccttctaaaccaattcaacatcttaaacacaaaatcctctgttctcaaaattgttattttgaccttcaaacctaaaattaatccatgccataaaactacacatttggctttcttaaatatgtaataaactatgctctttaatggtctgctctgatttaggaaataaggtaattaagccagttaattaattaacgactgtattccaacaagcaggcaggagaaaaggaggaagaaggcaatgccaccttcttttgaaggactcttccatttctaggccattgcttagaactgagctttgctgcaaagggagtttgggaagtacactctatatttcaggcatcctgagtccagctgaaataaggagttcagaaagaaggaagtagaaaatagatctagggtgacaaccaacagtgtttgcaatgctgcatagaagggtttaaccctgtaatttaacaaaatatatactgctaaactttctccaagaaagattgtatcaatttatgtattcaccgacagtgtataaaaatacatatttactccatctttgacaataatagatattattattatttttcatcttggtcagttttataggcaaaattagtttttccattattttcatttatactttttgattactaataattaatactttccacattttcactgggcatctttctacttgttcatcccctttgctctctttctttcttactgattggtaaagtttctttatgtactaaggacattatctcattatctgtcttatgttttataagtgtttttcctggcatgttgtttttgttttaatcttgtagtggtagtgctattcagaagtttagaatttttacgtagtcaaaaagataaatcttttctcttactatttctcccttcacagtcatgtttaggaaggctttctttactgaactctttaaaaattgtcaagtacatgttcttttwtacttctatggtttctttttttatggtaagatattttatatttttagaatgtattttttatccgtagcatcaaatagagatctggcttggtatttttgctcaaataagtggacccaattccatttcttgaataatcatgtctcttgctatttcaagataccacctttattttttattaatttgtcatatacttgcatatatagaaaagaacatatatgtgtatgtaaacacacacacacacacacacacatatacttgtgactaaatgcttattaaatgattatcaacataccaaagtggttaggagcatgatttctagataaagactgcttgcatttttccctgggctccaccagattttagctgcttgtcctcagtgaagacacttaatctctgtgctttagttcttcatctgtaaaatgaggataataatagcacctacctcagggtgcttcagatgattaaatgagtccttatatgtaaagtgcttgtaacaaatattattacaaaaataactgttttttaatatggaggacagtcataatgttgatgacatgaagtattaataacactttgtgtacttttaggctgcccttctttactgcaacctgtaagtttaccctgggaaacttaaaaaatttctactcagagcttcaacagtttcagagcttgcttactccatttttccctataaatatttttaaaagaagtaattaactataaaaaaatgcatttctaggcaattatttatttaaaagaaatatttgtgttttttaatattgaagtggaatcttgcaagtaatataagctgagaacataacaaaacttgtatttttgccaggcgcggtggctcacgcctgtcatcccagcactttgggaggtcgaggcaggtggatcacgaggtcaggagatagagaccatcctggccaacatggtgaaaccccgtctctactgaaaatacaaaaaattagccaggcgtggtggcgggcacctgtagtcccagctactcgggaggctgaggcaggagaatggcgtgaacccgggaggcggagcttacagtgagctgagatcgcaccactgcactccagcctgggcgacagagcgagactccgtctcaaaaaaaaaaaaaaaaaaagaacaacttatattgtcattcaattctactgtaaatctgtcacattgtgtaatttgttctattttttaaattattcagcagggtttttctatccatctttaacagttcttgctgatggaggaatgtagttaactgccacattgatttccttgtattatttcaaccattgtgcagtagtagaaagaacatatatttctgcaatgagatgtggctttttgctattaagtgagaaatctggaaaactctctggatattaaatttagtaaaattttgtaatgtctatgacgagtatttttaacctaacattgcgtaagaaaactgtcaagatgctggatgctctaaaactmtwgttagctattacctcatgtacatcataattaatcgtggatgttaattcatgttttaaatagacacgatcatttcaaattccttttgaccaagttccttcctaacctaattcgattgccattgttttaaccttgwaccttggcaatgaggagctcatcagaagtgtgggagaagttttggtgctggtattttgttgatgtccccatatatttatgttactatattatcttcaatctgtggttttattgcaaacatcttttagagacttaagttcattctgtgatagctatttagcctgtttaaaactggcagcatgcaatctgcacatccacataactggggacatgtggcctgcctgtgtaagccacactcctgtacaggtgtgctgtaggcagcctacacacgaggggagtgcttgctctctgggctcccctcattctagctgtgtgtgtgtgtccttggccgggacaggctgtctgtgtactggcttcatctgtaaagtggggattataagagagtacctatatagggctttttttttttttttttgagatggcgttttgctctgtctcccaggctggagtgcagtggcaggatcttggctcactgcaacctccacctcctgggttgaagtgattctcctgcctcggcctcctgattagcctggactacaggccaccatgccccgctaattgttttgtatttttagtagagacagggcttaaccatcttggccaggctggtctcaaactcctgacctcaggtgatccgcctgcctcggcctcccaaagttcagggattacagattccatagggctctttattagtattattattattataattaaaaaattttttcttggaaayggagtctcactctgtcacccaggctggagtgcagtggcactatctcagctcactacaacctctgcctcctgggttcaartgattctcctgcctcaccctcccaagtagctgggattacaggcgtgtgccaccatgcctggctaatttttgtatttttagtagagacagggtttctccacattggccaggctggtctcgaactcctgaactcaagtgatctgccctcctcagcctcccaaactgctgggattacaggcgtgagccactgtgcctggccctctattgggctcttgggaggattaaatcagtcagagtaagtccagtgcttgcaacagatagtttcatcctaagaatctccttttctgcattaactcctccatgatgaggaatgtctgtcttccccaggtgcagctcacctttgtgcacagctcaggaccatctgacatatgggctgacagcacccatgtcaacccagtacgtcaataatgtgtggaaggcatttaatggctttcttattttaagataagaaatacaaaaataaagattctaatattttctcctcataccttgttttgtctgcccgtcaaaatacacagactggatgttggtggatccttgtctagacagcagattctgagtttagatactgcatccgaacagaggaggagacctgtatttacacgtttgtttttatttctgaacaggttccttacctctctgcacgtgtctcccgggttatactggaaatggttatgggmcaaatggatgtgtgcagctcagtaatatttgcctaagtcacccctgtctaaatggacaatgcatcgtgagtcctttgtttttcctgtggacagagagtacctgagaattagtttcacgcctataaaatgtaacgttataggattcaggaatgtcaagataatgagtcaagtttcagataaggaactgtcgagaactctcagatgaaagatagataatgattttagttcttaggaaaaaacattgagttaattttttgtctcagtggtttatgaagtactaaaactacgcctgcagtttgatctaaataaatctgacatacaaaacaattaccatttaaacctattaataacaagtagactactagaaaatacttacatataaacacatatatatttgtagcacctgttaaatatatcagtaggccaggcgtggtggctcatgcctgtaatcccaacactttgggagggtgaggcgggtgcatcacgagccaggagatcaagaccagcctgaccgacatggtgaaacactgtctctactgcaaaaagttagccaggtgtggtggcgcgtgcctgtaatcccagctactcaggaggctgagaccggagaatcacttgaacccgggaggcagaggttgcagtgagctgagattgcaccactgcactccagcctggccgacagagcgagactccatctcaaaaaaaaaaaaaattatatatatataattatacatatataattattacataaataataattatttttaaatatataattatatattattttatatataataattatataattattatatattatatatctccatggcactacattcctattatttgggttgattaaagtttagtgtctatccatttgttttatggtattatgtgttttttttccccttaggacactgtctctggytatttttgtaagtgtgactcaggttggacaggtgtcaactgtacagaaaacatcaatgagtgtttgagcaacccctgtttgaatggaggaacttgtgttgatggcgttgattctttcagttgtgaatgcacacgtctctggactggagctctctgtcaggttcctcagcaaggtacagtcagcatttcttatgccacggatgctcacagcatagcagcagcatcctttagtgagtccctcaacagattcctctgctgaacccactttcttgtccagttgctcagatactgagaactaagtctttccttgcagaaatggtataaaattcacaagctaaatatttataaatctcactgtaagccaagaacttttcttccaaagaataaatacattagtatttgccattttcactatgtcctttttgaatataaaacatgctaaggtattgtcttttatggttttctaaagggaagttttctgaggagcagccacttaatttccctagagtactgcattgaatcaagtcactctccctttccaggatacacagtggcttcccgttgcctgttaaatagagactgggattaattttcaatgatcttctataaccaagtctcactcaatccatctaaccttttttttcactagttccctagaaataacttcactcaagcaagttttctttcgtcaccrgaccccatgtaccaccatgagtattttccactgtgttcatttatttggaatgtttctcccgataaacstcctcacacatcttccttgtttctcatccagatgtgtctgtccctcaggagcacttccctctcaacttcttccataaagtcacttttgactcttctgcccctcacttaaactcctgatttggaatcaacacatttattgagaggttgttgttatatgtttaggrcaatagtagaccctatggaaaaatatgaaagtgtaaaatactgtctccacttatgaactgctcaccttgcagctgaggagacaagaccaaccccaatgggagaacagatacaagagttaaagacatgagctatgttgtgtggggtgaaattgggtgtcacagggacacagagaatgggaatcagtgaaaacataagacatggcagttcatggagcaggtgatgaggcatcagctgagctttgaacaagaggtgggatttctatggaagttgacagaaaaagggcacagaggagagggaatggcagggcttttatctccaaccttcattactcaaattttctctaagtttatcagcagcagggttacagttgcccaacctcttccttttaggaacctctgaaaagcacagttcatcttttcctttgcagtttgtggagagtccctctcaggaataaatggaagcttcagctacaggagcccggatgttggttatgttcatgatgttaactgcttctgggttatcaaaactgaaatgggaaaggtaaatgtagtaactcttgcccaaatgcatattatatttgtatatataaatatggagtatgtgtatattttattacataaaatacatgcaatgataattcaactatcatatattgagtgcttactaagtacggagtgccattattttggctagacatatacctaccttttcataaccttacattaattgtttgaaataagtcacaggggctgggtgcagtagctcttgcctgtaatcccagcactttgagaggatgaggtgggtgcatcacctgaggtcaggagttccagaccagtctggtcaatatggcgaaaccctgtctctactaaaaataaaacaaataaaaaaaaattagccaggtgtagtggcacattcctgtaatcccagctactcgggaggctgaggcaggagaattgcttgaatccaggaggcggagtttgtagtgagcagagacagtgccactgtactccagcctggccaacagagtaagactccatctcacaaaaaaaaaaaaaaaaaaaaaaaaaaagagtaacaaggccaggcctggtggctcacgcctgtgatcctagtactttatgaggctgaggcgggcacattgcctgaggtcaggaattcaagaccagcctggccaacatggtgaaaatccagctctactaaaatgacaaaaattagccaggtatggtgatgggtgcctttaatctcaggtactcgggaggctgaggcaggagaatcacttgagctcaggaggcagaggttccagtgagctgagattgcaccactgcactccagcctgggtgacagagcaagactctgtctcaaaaataaataaataaataaataaataaataaataaataaataaataaatargaggatcctccttttatagatgaaataatgaaaagtaggtgaagctaaacattttttgttaacacttcttagcttgtaattgtaatagttgaatttcaaagtcaagtttgtctggttccaaagtccatgctttctccagcatgaatgattctctacactggttgactgactgcaagccactagttaatctgtaaaatcatgttgttactgagacagtattttagaagatggttgcttagttttatgttgattattgtgcaaaaatggccactgatattaagatagttttcttatcaaatgtctttgctctgccatgttctatactaagtgctccatatacattacagcattccatttttaactctcataaccctgaaagatagaaattattatcttcattttacacatgaggaaacagagcctagtgccattgagaagtgtgtccaggtgcatgtggttcgaaagtggcatgcagtgactcagacacaggccagtcacctccacagcctgtcactctgagccgctccgtgaacgctcttcaaattaagatccaagtccaaggtttttagtgctcttatacccgacattaattacccaggcatttctaaatattgtttctcaaccacctcctggattcataaaaataaaatggtatgtctgaatagataaaattttcccttgaaatcctattaactttttccagcaaactattacagagggcattgtacaagggtcaaaaaacatttttttttcctttgaggagggaggactatttgcgacctggtaacctcacactaaaataaactccaaaataaatttcccagtgggtatgctatgtgaatttccttccttccatttagttttcatgaattctatttcctggcattgaaaacattcttttgaaaaaaaaatattcttaggtgagaaacttgtaatactttyattaccaattcgcaagaaaattcatcttgtttttttcttgattattgtgatttcatatcttctcactcataatggacataatatggtagaaaatatatacaaatcaggatagttcaattaatgaacatttgagtttcatttaaactgttttaagaaagtcatgtagtaataggtaactgatcttaaaataccctagcacagaatttwaaaaattccttatattctttttcattaactgaatattgttgtgattttaggttctgatgaaaattaaattcgacagccttcttttgattgtttatctcaaatgaggttgtcagtacgttttataagttatattactatatttgaagtctgtattctaatccattcggacacatttttgtgtttattctcttctacttgtatgctcagtatttttcctgttattcttgtatgctcagtattcttcctctcattctctactcttggtattactcatcctttaattatatccagtccctgaagccgtccaggccttgcttgtctacatcccgcctactccgcccacacctgagcgtgtcggtctgggctggcgtcagaatcttagcccctctggaatcaacatmcctggcgggcagtgatgaacgtctgtgtgtttgataacaggccacaggttattcagggaattagggtgtacattcttgtgaatggtaatattagccagttcaacttaattcaggtagattttcaaatctccaatttattttactgctttagaaacaatgtcagttatatatttgamataccttggtctggtggacttgacaagtttaatgaaattggggtaaatctatgttattaacattaagattttttgatatattttgatattagttgaagtttgtttttaacaatatttagcacaagttatttagtatatagattgccatatgtactggtggataattagggaatgataggtctagctcttgaaagtgcctcagtatgaatgctgcctaggaagtgggagaaatactttaaaatttacatggaagtaaaagataatatatgtggcctttgtatttttaggtcctgcgtatcactttcacttttttccggttagaatccatggacaactgtccacacgagtttcttcaggtttatgatggagattcctcttctgcttttcaacttggaagattttgtggctccagcctccctcatgaactcctcagcagtgacaatgctctctattttcatctctattctgaacatttaagaaatgggagaggctttacagtaagatgggaaacacagcaaccaggtatgtgtgaacctggagaaaaaagcaagcaaaattttgaggttattaagtkttcttaatcagtgttagacttttggatacatgagatgttttgggatctgaagatatataatatttttataatttattttattttattcatttatttattttgagacaaggtcttactctgttgcccaggctggagtgcagtggcctgatcacggctcactgaaacgtcgacctcctttgctcaagtgatcctcacacctcagccttctgagtagctgggactacaggtgtgcaccaccactccaggctaatgttttgtgtgttttttatagagatggagtttctctatgttgcccaggctggtctcaaactcctgggctcaagcaatccatctaatttggcctcccaaagtgctgggattacaggcatgagccactgtgaccaaccataattactttaaaatcaaatcaacctagaatkaattagaatttattttgtgtctaaaggcaacaaaataagcatgaaatagaagggattaaaaaacatgagtcttagttggtcccttatcaaattactgaacagcctttttataagctctactagtagtttactgcaggaataytgaggacattgtccaccccttcatgtagtattccttcatcttaatgatcactcaataattttttctttttgttattattttgttttaattattctattttcttttaagtttttactatgcaagttttaaacaaataaaaagtaaagagatcagtataccatgcccccaattcattcatcaatacatctgtggatcaatttcagcattttctcatcttttttactggtgtttttatctatcctgatgctacctaggcttaacttctgatgcttgaaatctgagagtgtaatttcaactttgttcttttcaaagatgttggatattctgcatttccatataagtttttgaatcaacttgtcagttttcccaaagaattttatgggaattacattgaaactataattaactttggaagaaatgacatcttaaaaatattcagcctgccaatgcatgaamataaactattttwaaatttagttctcttttcatttatcctggcaatgttttatagctttcagtgtctaagtattccatrtctttgttagatttatttacagatatttgatatattatgcttagtgaaatattaattttctaaaatttaatttttcacttgttatgtaaaaatatgtattttttaaatatttgattttgattccatatacattgttaaattcactcatcatgtctaattattttttgtagattcttttggattttttaaacgtacataattacatcatgtgtgaatgaaggatatttttcctcttcctttccagtctttgtaactattatttcttttccttgacttattgccctggctaggaccttcaataccaagccgaataaaagtggtgaaaaggaaatccttgtcttttccccagcagcatggggaaatgctcaatatttcattgttgaatatgatgttagctgtaagttttcacagataatttttatcagatgaagagtgttctttcctatgtcaactactattgctgtataactaatttcccacaaatttagtgttgtagaacattaatcatttgactttgtttytgattttgtgggccaggaatttggaaagaacctaacatgacagttgctacttgaaatctattcagcagttataagcgggtgtcagctgggactgtagctgtctaaaggctggactgggctgaatatccaagatggcctactccagtggctaccaattgatgctggctttcaatgagagttcaactaggctatggacctgagtgcctacatgtggctactctaaaaagtttgtcttagaatagtgaaactttcttcgtggcaattggcttctctcagagcaagcattacaacagaaccagacaggtgctgcgtgggaatttttcagcctatgtttggaagtcattgtgttatttctgccatactcaatgggttaacttagtcacaagctgacccaaattcaaggygaggggacataggcccacttctaaatgggagaggtgtcagaatttataaagaattaaaaaaaaacccacaccttttgttcctagttaccaagaattttaaaaaatcatgaatgaatgttgaaacatataaaatactttttctgactctattcaggtgatcatatgttttttgtcctctattctgtaaatatagtgagttaaattgattgattttgaatggtgaatcaactttgcattcatcaaatattttccatttkttcatggcaagttatgctttttatacattgctagattttatttgctaatatgtatttttaggatttttatatctatatttgggtgatattcttttgtaattttgtcaagttacaggtaatgtcaatgttttaaaattaatagaaaagtgtcctctctttttatattctctggaaggatttgtgtaagattgacaatatttcttaaatgtttgaaataatttaccataaagttaattgagcctgcaggcttccttgtgagaaggctttaaattatgattcaatgtatttaatatagatctattcagagtttacatttcttcttttttcagttttggcaatttttttctcaagaaactcatctgtactttcagaatattttcttactatgttttagtgttcgtaggctctgtagtgatgtcgtctcttttcattcctgatattgataatttatgttatcttttttaccttgataagtcttaccaaggatttgttagttttactaatgttttcaaaattccaactattggctccgttaatgttttctgttgatttttatttcattgattttcctcatggttttatcattttcttcccttgtgttattttgcacctaatgtatggttactttaacaattttttcctagcttcttgacttggaagcattgacaaatgagtttgaacttcttagaatttctaatatatgcactaatactaatgcattttccttggagaacttttatttgcatcccacaggttttaatatgtatgttttcattagcattcggctgaaagtattttgtcatttttattttgaattctctgtgaccataggttttattaaaattatactgtttatttaccaatgtgatcactaatcatgcagtatattatttcaatctttaaaatttgttaagatttactttatagaccaaagtctattttggtgcatttattgtatggacaggaaagaatgtatattctgtaatggttagatgtagtcctctacctatattaacttagtcaagttggtaaatagtgtttttcaaatattaaatttctttactgatttaaaaaaatatttgctttattacttagtcagaaagttatagtaaaatctcaaactatgattctagatttgccagctttttgttctgaaacttttgctttatttattttcttacattatttttatcttcttttcccaatatttcaagcatttatgttttcccagctttattggagcttaactgacaaatgaaagttatatatatttaagatgtacaatgtaatgttttgatattttgatatatgtataacttgtgaaatgattaccacaatgtaactaatatatctatcatacatagttaccattttagtcaatatggtgaaaatatttaagatctactctcagcagttttcaagtgtataatacaatattgttaatgatagtcaccatgctgtacattagatctctagaagctattcattccagagaacataaacgttttascctttgaccaacatttccctattgcccccacctctcagctcctggccaccaccattctactttctgcttctatgagtttaactttttttagatttcacatataagcgagagcatgcagtgtttgtcctcctatgtctggcttatttcactcagcatgtctccctgtttcatccatgttgtcacaaatgacaggatttccttttctttttaaggataaataatatcccatttatgtctgtgtgtgtgtttttgtgtatttatatattgcacwttttctttatccatttacctgttgatgagcacttagattgattccatatcttggctatggtgaatgtatgaatgtattgtgaataatgctgcaatgaacatgaaagtgcagatagctcttccagatatttatttaattttctgtggatatataaccagaagtgagattgctgaatcatgtggtagctctgtgtttaattttttgaggaacctccatattgttttaaatatggctgtaccagtatactttcaacaagggttcccttttctccacatctcatcaatacttgttgtcttttatcttctcgataatggccattctaacaagtatgaggtggcatcttattgtggttttgatttgcatttccatgatgattagtgatgttgagcattttctcatatatttgttgaccatttatatgttttctattsagaaatgtctatttggatcctttgcccatttttaagattgggttagtttgttttgttgatattgagttgagttttttatatatttcagttgtgcttttgtggtcatatccaaaaaaatcactactcagactaatgtcatagggcttttcctgtatgttttcctggattrgttcttcagttttaggccttatgtttaagtctttaattttgagttgactttgtatgtggtgtgggataagggttcagtttcatttttctgcaaatggatatccagttttcttagcaccatttattatagactatcctttacatgttgtatgttcttgccatgtttgtcaaaaatcaattcagcataatatatggacttatttctgggctctctattctgttccataggtctagatatctgtttttaatgccaataccatactgttttgattactacagttttgtaatatattttaaaatcaagtagtgtatttttattttaaatgtatttttaaatcaggatgcctccaggtttcttctttttgctcaagattgctttagctatttggggtcttttgtggtttcatatgaattataggattctttttctattttgtgaaaaataccattggaattctgttagagatggcattgaactgtagactgctttgcatagtatggacattttaacagtattctttcaatttgtgaacaccaaatattttctttttttcattaatstggtatagttttcaaaatacagatatttcactttcttggttaaatacattcctaagtatttaactttttgacactattgtaaatgggattttcttcttaatttcctttttgtacagttagttgttaatgtatagaaatgcaactaattttatatgttgattttatatcctgtaactttactgaattagtttgttcatttattagttctaaaagtattttagtggagtctttagggtattctatgtatgaaagatcatgccatttgcaaacagaccattttacattctaatgggatcatttttcttcagcctgaagaacatattttaatatttctcacagagcatgtctgttgaagacagattccctcagcttttgtttaagaatgcattttttaccttaatttttgaaggatattattacacatagaattttaggttgaccatttcctattagctctctaagaataccacatcagtgtcttgtcacttccataatttttttggggagaggaacctcagcagtaattcttgttgttctcctgaagataatgtgtctttttctccmccctcactgcttttattgtgtgtttatatttaattttccacaacttgattatggcgtatctagatctggttttctctgtgtttgtcctgcttgagagtcactgagagttttgaatctataggttgctttcttttatacaattttgagaaatttcagccaatattttttcaaatattgcattgccacttttttcctctttcttctccttctgagactcaaattacacatatgctgaaggttttgactgtttctaatagttcytatggttttatattcttgccttctttttttgctttgattcyatttggttattttgttttggaaagtctgtaagtactgttgaaatgttcttcaactattttgtcaaccttttcctctaagttttatcataattattttggagtcattgtttggtagcctcagtatctggaatgtttctggctttgctgagattgcctgttttatttattattgggttttggttttttttttactacttcctcacaggcctagtcagtttttattgtgagcaggacattatacgtgatatgttgcaggggttctggattatattatcttcctctcagaagggttgggtttttttctagtaggcacttatgttcctggcagatcactttcattcaatcaaggcttgaatttacaggggacctatttcaaattttccatgaatcctggtggattgccatatttcctagaatatgaatcttactcctgtagcatacttttctcacgtttcaattcagttctcagggttttcataaaagtatctcctttctgactgaatgaggcaacacatcccttcagtatttattatgcagtctctcttcaattcttagcaacttccctcccctccraaactgytctctgttagttagacctgctgtcttctctgtgcatttgcagcttgggaatgagctaaggacccaaggaaatgcctgtacatttttgaggtgccatttccatgcagctgctttccttatagtrtgcagctccaaaaccgccagatgctttggtagccctaaatcrtgagttgtttgtttgccatagcaagggtattgctgtctccttgggcttcacttctttgaattcttgagtgtgtatgggacatactttatatgcttctcttttcagagattacagtcctttgctgtttgttctcaatgcctgaaaatgataaaaactaaaacaaacaaacaataattccttactattatcaatcattaatcattgttcattttttcttaagtgagagcaagtttattaagacagtaaagaaataaaagaatggctactccataagcagagcagtggcatggactgcttgactgagtatacttacagttattttgtgattatttgctaaacaaggagtgaattattcatcagttttctgggtaagaggtgggcaattcctggaactgagggttcctcttctttttagaccatgtggggtaacttcctgatgttaccatggcatttgtaaactgtcatggcactggtaggagtgtcttttagcatgctaatgcactataattagcatatagtgagcagtgaggacgaccagaggtcactttcctcaccatcttggttttggtggtgtttgactgccttctytactgcatcctgttttatcaacaaggtctttgcgacctgtatcttgtgccgacctcctatctcatcccgtgactatgaattccttaaactcctggaaatgcagtctagtaggtctcagccctattttatccagcccctattcaagatggagttgctctggtttgaatgyctatggtttattaccccactcccttttmcaaggggacctttaatcctaagggttgtagagggatgtcagtccattttctgtaactccttcaggatgaataggggtgatgatattcctgcctaactattagggtctcttgtattcagggtagagaggagcttagtcagaaagcgtcagtatggtgagacccgttcataactctgataaaaggtgatatccacagtctgccagttggtgctacagtctgtttcctatgggtcaggggttttctccgtatcgtccctgtggggtttgccaggaagatgttaccagaaaggattcctgatctagaccccaagagagggttcttggacctttcacaagaaagaatatggggtgagtccatacagtaaagtgaaagcaagtttattaagaaagtgaaggaatraagaatggctactccataggcagagcggcccattgttcaaatttatttgtgaaagaaatggattgtttgttctgtagatcatcccacatcttggattttgctgtttatattctacatgccatttgtcatgttgtttgtaaactggtgcttataccaaaaagtttggttaaatccagggggttttatgtggtaaaaaataatcttttcaggagatacatgaaatctgcttttctattatgaagttaacattggtcrgagtgttctgatctcctcaggttgaacttcccattaaaagcctcttttgcactttctctaatggttttagcattctttaggttcagtatttagatgagttattcaytgagacctacaacatgataatagtttgattttattatttcttctttatttatttattatttgaagttctttaatggaatagaagttactcatatcagctatttggttgctctcatacagagatcatgtaggaaaggtaggataaatgcttgattttctctctttttcttttttttaaaaagtattcaaattaataacttggttccttagcattcttcaaaatggtcacttattccattttattttgttttgttttcgatatctgtacatttatatattatatcacatttgatgtgctttaatcaattctaggcatttaaaaatgaaacacttttccgtgttttgtttgttgtgtttgttaataatttgttttcaaaactctggaaaattttccagttagtttctgaacttgttttaaccaaactccagttacctttgaaagctcctttgctttctggtcagaaaagatgttctaggctcttcctgcacattatttacctcaggactgaaaaccctgatttccctaaagagctctgactttttctgtgggaaatggtatttagatctcacaatctgggtgctacggatggctattggtactgggtgtgtcatcgtctctagacctttcagtggacagaattagaaaaaacttttttgttgttttttaaagaaaaaataccctatatattcatagtgatyttacactatattggaatattgagattatagagttgctttttttttttttttttactttacatttctacctcttctctcatacagtaaaaatcctggttcccaatgacatgaacatattatttatgtacttagtcctactgtacatattttcaaaataacaatactaatattattactaatggtatgataactggaaaccatttaagatttctttgttcttttttgtgtatttaaaatatgttttgcttgagcggtatagtcaaattacagtgtttaaggtcccttggaatatttctactctctatggttgtcagctcaatgcaattatttcaccagtttcacttcagttgtgattttaaatatttctttcatttttctcaaattttgctttataattatgtaaaatatatttatagttccaaagccaaatcaatgggcatggtagattatgagaggtctagcttttttttttcctgtcccttccactctgttctttctcccccattagagaacagtttttattagtttttgatttatccttctatttaaaaattaagcaaatgatctcatataattgtattttcctctttcttagataaaagggagcataatatacacactggtctatagttggctttttttcacatcatatatcctggagattactccataatcagagcatagtatgccgctatgtgatgtctcattttctgttcaatcaatactctattgacggacatttggcttgtttccagtcctttggccattttctttttagtcttttgttttttatttttgagacagggtgcgatcgtgtctcacagcarcctcaacctcccaggctcaagtgatcctccttcctcagtctccccagtagctgggactacagacacgcaccaccatacccagctaatttttatttttttattttttgtagcgatggctgcccaggccgttcttaaactgggctcaaatgatattcctgcctcagcctcccaaagtgctgggactacaagcatgagacatcacacccagtcttgtttccaatcttttggaattccaaatgttactgcaacaaaataccttattcacttgtcgtattgtatttttgccaatgtacctttgsgatatctttccaatggtagtattgtttggtcaaaagaaaatgaaatgcataggtttttgctaggtattgctatattctcttatgtagtgatcgtaccatcttgcattctctagcaatgtgtgagaatgtctatgtccccacagcctctccaataatttgttttcaaaactctgcatttttaacattctgaggggtaagaaatggcatctcaattaaggttttatttgctccttctttgtgatgagtgaggttgaacatcctttcatatgtttaagagacatctgaacttttttcagtgcactctattcatgtctctattctttttagaagttctttatattttaggataataactctttgttgcatattgcattttttcttattttgtcattaatcttttcctttgcttatgctattttatgcatttaaaactggtaacttttaaagtattacattgggaaatgcctctttttctgaagaactgagatgttttctcagtaggaacaatgagactcatggaactaatttgtttcattttttactttggcaggaaaatttttatttgaacaacctgtatagctatgtaaatttcatatcttacacatctaaaatgttacctatctcacttatttctaatgtctgtattactacagtctggatttttattatttagtgtttctrtcatttgatttacagtagcatttctcatagaaatctaagccactacagattctttgttaaataaatgtgggtattaatgaagagcaggttcttccagtcactagtcagcaacgttagggggccgatgtggtataatgaggatggtagtggggtcagcatcagaaagcctggctcagtccctcacttgctccattcttggaacagtggctcgatcactacagacatttgaattttttcatttattaaatgaatgttttaactatatgatagtattaagaaaccttctcaaatgaaaattatgtcacacttaaccattttaatatgcaaagtgatctggtttgctgaaacacacagaggttggcagaagttctggaattcyttacaatttcacatacagaaattaatatcatcaaagtgaaaaagatgactctacaatcctggtattcatcgctcagatggttcagccctgtttaaatagtgtcagcatgtgatggctcacaagcacagagcttgacacatgggtgattcatttgtttatcaattgatacttctagacttgtaactttataaaactggaaaatgtaaatcttttttaatttatgagggtgtctaaaactgctcatagttatttaaacaaagtttggcttcttacgccaagggctctgatcattctccataaattatagcatctatacaaatgtaacattatttttccctcttattttagagtgtggaggtatcctgactggtccttacggttctattaagtctccggggtatcctggaaactatcccccaggaagagattgtgtctggattgttgtaactagtcctgacctcctggtaacatttacttttgggaccttgagcctcgagcaccatgatgactgcaacaaagattaccttgaggtaaataattatatttagatagaacatatcacaatatgattaggactcagggcactatggtctagccatgcccatggatgaccccaaaatattagctgtagttaggtgtgtttctcaatagtcagtcaatatctaactcttgcaaagtctctatttttaactgtgcctgtttgttgcttcttcttctgggttccatttgaatctgggaaacagattaccttgccctgctatggtgttacctggaagctcacacccctgccatgagaatgcagaatttatgaaataaacactcagtaatagccatctccttcaatgcagattcaaaccttcagttgtctgtggtaaactggcaaggtctttcacagcttaactgtagcattccacgaagaggccgggtgtggtggctcaagcctgaaatccctgcactttgggaggccaaggtgggcagatcacttgaggttaggagttggagacagcctggccaacatggtgaaaacccatctctattaaaaatacaaaaactagctgggcgaggtggcgggtgcctgtaaccccagctactcgtcagtctgaggcaggagaatcgtttggacccgggaggcggaggttgcagtgagctgagatcgtgccactgcactccagcctgggtgacagagtgaggctctgtctaaaaaaaaaaaaaaaaaaaaaagaaaaagaaaaataatagtgattgtgttgaactgggttaggttcctggaataaagtaatcattattactgagaggagaggtatcagccgaagctccttctgcctacccattagtaaaagattaaaatayggaggaggagaaaaggctcttatattcaaatgccgtttgtacgtaggtgcatcaaaaagtgttgctcttcatttgtagactgacaagataatggagaagattgagttcccaggttgycctgtattttttatcaccataaatctcagccccttgcagcagtgtgaaaaagacaatacgcatttccaagtccattagagaggratagagtcaatgcaattattcataaaggatagaaggatgtggtgtcaaaaaggggctctgcaagtaaaagtcattagtaattcagcaataatggatttgaaacctttgggaatgactggaagatctgtctctctctggaaaatttctgcaaaatggtcatttaaatgttgacagaaaagtgagttatcttgaaattaattttcaataaattccatcaagttaaaattagaggctttaaaaaattcctacacattcatttctggagaccatatggtagaaagtgtcaaccactctgacaatattgaaatgtctctcatttctctttaaactacagtatttcaaagaaccagttaaatattagaataaagttatgctgccatctaactttgatcccagtaagaaaagtaatttgaatagacaaaattgaccatattaaaatattctttagttcattgactcctcggtggtttatatagtatagaatttgcaattacaacaaaattatagagagattgacatgattacatcatagattaaaaaccaacaattagaaaaggatttctaaggtcacgtcattatcattgtagtacttacttactatcaaagttgcatttttaaattcactaacctgtctttctgttgtgtctaatctgatggcacttcctctctacctctgacccttctgaaaacctggaccaagttatgaatcagttggcatcaatggtgttccttcttctgttttctttgcttatattcattttcttctagatcactaagaatttataatgaaaaaaatcaaaagggaaagatctttgattagtaacatcatgacaaaaattcwaactatatgtccagccttggaattgaaatccagtcacaggccaggcgcggtggctcatgcctgtaatcccagcactttgggaggccgagatggtcagatcatgaggtcaagagattgagaccatcctggccaacatggtgaaaccctgtctctactaaaaatacaacaaatagctgggcstggtggcaggtgcctgtagtcccagctacttgggaggctgaggcaggagaattgcttgaacctgggaggtggaggttgcagtcagctgagatcgcaccactgcactccagcctggtgacagagcaagactccatctcaaaaaaaaaaaaaaaaaaattcagacagagagaaggcattggggtgatgggagaaggagacacactttgctgaacctcagccatgagttacatttggatgtgatggggaaacttccttgagcgatcacttttaaatgatagattttatgaagttaatwtccaaagtgacctagtttgttaaaaatctgaccactttgagcttaatgattcatccttttgttttagattcgagatggtcctttgtatcaggacccccttcttgggaagttctgcaccactttctctgtcccaccgctccagactactggcccctttgccagaattcacttccattcagactcccagattagtgaccaaggcttccatatcacctacttaacatcaccttgtaagtaacctaccagttgggggcttaagagggatttgaaggccaatgctatgcttacatctgttttatattttaatgtgattcagaggatgactgactgtcttagaccaagaacatttctttataaatatttctctcatagcttcatattttttctttatcttcccaatgctctattattaatactgcaataccctttgatccctaaattatgggatccacatcatgataaagatgtatgaggcacccaaacttaaataattcagggcaccaggtccctcgtggtgtttgatgtttagttgtgagagaggtttgtgcatgcgagcagtgcagtctctctggattttatcctcggrtcaagtccagctgcacaggggctggggctggcttccagcatcacagtgycccagactctagagcttcacttccagccaaatactattagctgttaggacctcagttgctttgataccttaaaacaaacaaacaacaaaacacaggaaatactctatgatttggatttttttagggaagtggaggattttgtttatgacatctattattgtgcccttaataaatgttctcagaaaaagtaccttttaagtttcaatatcaggaagagtaacaaagaacatctttacttgtcccctttcttcatttccttttctttccacggaatctgstgccaacctcctgttcccctttcaattgttttccrtgcaaatcaactccccctggctacatcttgctattctgtattcattttttctttaatctgcttcatgtatacagttatgtagtttattttgttacatgtttttaataaccatctcaaatcttattgaaatgaagcagagcattaatgtatttaaaaagcaacttatagaagagaatggcagattggaagctagatcacacatctctgcatctatttctttaagccactacagagatgtcccacaacacatcaaactgaaaatcttaaaattagaggcacaagcctatagagggtgaataaaatggatatgtgcttgtgtgtgtgtgtgtgtgggtaaatttttagaaattggatccaatgcctgcaagccagagcaatgccattgccatgacctgttcgtctcttccctgttcttagcggatctgcgttgtggtgggaactacacggacccagagggtgaactcttcttgcctgagttgtctgggcctttcactcacaccaggcaatgcgtctatatgatgaagcagccccagggagaacaaatacaaatcaacttcacccacgtggagctgcaatgccagagtgacagttctcagaattacattgaggtaactttcactactcaatcgcccttagatgacattcatcaacatttttatattctgcagagtggtggtcttcaaaagattgttgggccaccagcagccagaatacctgagagcttgttagaaatacaataataactaagctctaatgactaaggtgcaggcaaataaggctgataggatgtactaataagatacagatttattatctagaataattaatacaggaaagaactcaacccagggaagtgaagggatttgcccagatgacccagctagtcaagtggtaataaagtttaagtgttgaatgacccttgttttggaggttagggtttttccttcctttattctgcttgctctcctccagaaatctttaattttgatttaagtgtgggtaatgattgtaatacagggaatatttgaaacagagacaggctgtttttgtttgctgggcctggtatttcttatgctaaattattggtcaagccacaaattaaagtgttgagcaagataaaacattgtttttttgggcataatcattttacataaactagagaagaatttacaattttgtttgtttgtgcaagttaaatccatttattcatccaggaaaaacctatgtgacctcctgtcctcttctttctacatttagacagaggaaacagaactttagcataagatctagctagacttagttgaagtgcattgaccatagcactacagcagtatgtatgtatgtatgtatgtatgtatgtatgtatgtatgtatgtatttatttattttgagacggagtttcgctcttgttgcccaggctagagtacaatgtcatgatctcagctcaccacaacctctgcctcctgagttcaagcaattcttctgcctcagcctcctgagtagctgggattacaggcatgtgccaccacgcccggctaattttgcatttttagtagagatgagatttctccatgatgggcaggctggtctcaaactcccaacctcaggtgatcctccggcctcagcctcccaaagtgctgggattacaggcatgagctactgcaaccggcctgcattttttttaatccagaaatttttatttaagatcatttcagaatgggtatatttattcaatttaggttttctaaagtctcttataaagtatattaaagttttacactacggaagaatttcaaatatttttatgtaaatcaaaattaaattattaacccttttttttttaacttttgagaacagcaaaaatagctttcaattagagagtgcttcctgtactccaggcactattataagactttaaaatagtataacaaattaaatagataatgatcattgtcagcttactgcctgccatgtgtggtaagtgcttttcgtgagttatttcattgaatcctctcaacaaccattattatttctgttttaatcttaggaaactgtagcccagagaagttacttgtccatggttacatgtctagcaagtaatggagctgggattcaaatttaggagatctagttatacttatcttcagtaagaacagaaatgcaattgtgtgacgttgactacaagaggtgtctcatcttccatagggaggaaggtcttgtgaattacccaattccatacctggctctccgatcacgagactaaaacatgaagccgagcatcatgattttctcagatacgcaagaatgtaactataattttcagggaaatttggggccctttctgttaaagccttcatggtgattctctggttctaaagaactatcagtacctctgaatggttcatcctctcaggctttgcagaacactagaactgaatttcagtgagcggttccatgaactcctctgaattcttctgaaaagttygcacaaaaaatcataaaactggctttggaagttttaatttcataaaccagaatggtggaatgttttgtagccagaaggggattaaagttagttcacctaacttcttattttagttcatttgtcagatgaccgtataaccttggacaattctttatctggatctttcagttcctacttcagtaagatgtcctatctatttctctaaactttgggggtagaatcaaggaaataaatgataaaaagaagcttgaagtgttaaaaaaaataatgcaaatgcaaggtttttctggaacaaagttttaactctagccttgaatttatcagttcagagacagccgatgtggctgtcacagttggccagcgaggtatctacattctgatgtaaccacatatcctcaaagtcttgaccaaatttccctcaaggattgttgatggaaaaaaaaaactgtattattcagaaggagaggtcatgtacggtgatttaaatattaatagatagatttttatattatatctttgaccaaccaacctaaaggaatacaaccaacctgtagaattttggcatcagcaaggaccttaattttacaaatgagaaaattgaggctcacaaaggtcaaactctagttattgtcaaagtaaaacttagatgtacctctatgagattctagatggacgtacattgactttggttaaagctcttgtctttaaatcatctctatccattgggaaaatttgtgaactgaacccgttttctaaaaagtatattcacttctcttgttgttcttcagatagtggtcatacaagaaagtgatacaggaaccaaattctaatracattattatgactcaatatattgttccctaaaatgatgtcttcattttttaaagctatctctaaaaaatgaaatatttatgaaaaagaattaaaaaaagaatgttggtatttcgaatactttggtggtttagaggggggttgactttgtcctttactgactccattgatgagtaaaagcagtccacccaaaattttagaaagagtggagaagagaaaagaaattcyacagagatgtgggagaatgatcctaaggacatttactttgcatgtgaataggtgtacttttaagaatcctagatcttctctttgtgtggttttaggtgccttggttgccaggcaaacatatccttcaaatgaagattaaggtaccattgctgagtgtgtatctttcacagatactgtggttttgaaagacttacttttgctcagtaagagagttccataagcactcattaaagaatagattttaactgcaaaagataagaatgatattgacccagtgtagcatatctttctttttttttaacacaagkaacacacattaacatgttaattcttagatttatatatctctcttaagtgaagtttctacttttaaagatatacattacccatggaagatgtgacatggctacaaatgaatgaatacaagaacagatcaattgttagttcatctgtttttgtcgaagagagcttttaaattgtatagaatagttcaatgaaggtgatggaagcatctttccagaataaaaagcagcacctctcattaatatttcataagtgatttaagccatcagaactctgagtgaaggacacataggtagtaatgaaagtttaattttaaatcccagagaagggaagttgtaggctgaataataaattcagaaggctatacgatgttaaggtgaaggcttgaggtaggatacgaagggaaatgagtagaattgttcacccatcaaatctccttgaccaatcccaaagtatctgcctcctctccccagagacactgaggaaccagaaagggggctctacaagagacgcagggagagcgatgtgccttctggagaaagagaagggctttcgagaagttgttgtttcttagatgtggaaagcaaatacaaacagaaaagttgaaaaatataatcaataagacaggaaggagtaatttacattgaattttatttctgaaatctagggaatatacctgttctacaagtggcgttgaaccctaattcatcatattttagacctctatggcaatcccagtaaattaacaaagcagaaattgtacatctcttcacaatataacataacccaagattatttataaacattttaaaatgcccaagtgtgtggaagtatgtgaactctccaaaataatcattggcttgagaaagaaataaaaaatgaaagactacatagaaaatgacaaacaggaaatgctgtgtatcaaaacctgtgagatgtgatgaaactcaactccctggtaaaatctttaagatttaaaagaagagaaccaaaataattgggaaagcaggagagcagaagctgaggcaggaaggtctgtcctcygtctgaaccttttctttcaccaccttcccctgcatccttccctctacttctccctccccgctacactcctgcttcagcctaagcagccctcccrcatctcctgcatgtctttagatgaatgcaaattcacaaaggacctccttttgtgacttcttaggcattgagatgattccactatgagcttgggattgggtgggggagagccaggacttgtggaatgcatgaggcacttgcttccctcaagtggacctgctgctcagagtctcatggctgcaattcacagactacacacctaaatgtcagaaamagaataaggcctggagcaagcaaacacaccacataggctgaatagtattgtgtttttcagttaagtacatattgaaattaattgtaggtcagaaaaatatctttctagagagggtaggataaagggaaaagggggagatcctcaagagtttgtactcttggccaggcatggtggctcatgcctgtaactccagcactttgggaggctgaggtgggtggatcacctgaggtcaggagtttgagaccagcctggccaacgtggtgtgaaaccccatctctactaaaaatacaaaaaagtagccaagtgtgatggtgggcacctgtaatcccagctacttgggaggctgaggcaggagaatcacttgaatccaagaggtggaggttgcagtgagctgaaatcacgccactatactccagcttgggtgacagagtgagactccatctaaaaaaaaaaaaaaaaaaaagagtttgcattcttgagcatattggatttagggttttgacagagactaggaacatttggttagactctgagctctgttgttgtgagcacagtttttccacaactgctggaccatcgtgatgctttttagtgaaggaagaagataggccattcctctagtgaaataattctgtaggttggagtagtgggaggcaggaaacagactgagagatgatagaacacctaatttggagttgtgagaacttgtagagaatacatttttgctgtgtttgaaggagttgcatgctcatgtagaagctgcaaacccattgaacatgcgtgatgtagagcagtaagcaggaataagaggatatggatggaccattatcaagaacattacaaattcctaggtcaaatagagggtatggctggtacttttctgatataaaatggaaacaatattgcatggaaacatgataaaacccttcagctctctgtgttactaaaggcaagatacctgtaagccacagcttcctcatgtgtaatagggatagtactagtagtactagtagaaagagaccattcattcatttatctattcattctctaaatatttatcaaaccacttaggtttcagtcaccatgctagggaatgggtatgtaatatagatattaaataagtaagcacacactacataatttcaagaggagataagtatgggcaggaaagaaacagtactgtaagagaaaagaacagagctactgacttcagtggagcagtctgagtttgcttctcaagggtctttgtatggctagctcattctcatctgtagaccctgtatgtaggatctgcagatgaggagtgagcaatgcaaagaactgagagaaggaggactccaggtagtggtgctaacccagccctagagactgaagtcagaaaaaataaactaaaataattggaaatagaccagggtggctggaatcacacagggatggaaaagagaaatatgagttaggcaggagctagaccctgaagggtcttgtagaccgagataaagagcctgggttatattctatatgcaaggacaaacaattagaatgttccttgtcacattgtgcctgtcacacaatgaatgctcactaaagttaacatcatgatgataatgacgatgatgatgatgatgatggggaggagaagagagggcaggagaaggtgacctactggagtttgcaatcatgagggaaggcacttctaggtaaaacttattcatgtgttcttgattttagaatatcagatcttaaaagatcagattatatttattaatagagatgttagaagggacactttcacaaggcatgaaaaggtttaaaataccaactctaaaaatcatgaaacatactaataaagaacaaaggataataaccaaagtaaatgattttgagatcctaaatggcttctctcatctcttatcctcctcaccccttattctctcactgggggcagggcctcattcctctcctgctcacccagattagcccaaggctcctccctaaggtccagtctttacttagctaagatgtatgtcagcctgaagctcacttcacagaaagccacatgttaaacactaccatacggtgtggttctcttttcagctctcagatggactaagcgtaagtgccagcatatttgaattgctttgaattaaaatttaatgcttattattttagaaattatagtataaaaccaaatctggattcatagcagaggaagacaaatgagcgtgcrtattaagacatggctttgggacttgactcattccagatgttaaagctcacgactcactaggctcaaaagcccacatttaaaatttcatgtaaatggtgtttctcagcaaagtaaattttagttctctctatagaaaatcattcctttacaaaaactcgtttttttttatgagtagtttctcttctggaactagtttaatctgatgaatgtaaaaattggaagccatttggaatacaccatatgctgaacatcctgggacctgaaaccttcagtgtttcctggacgaataaggcaatccacaagaaatctgaacctggtccgtgaaacactagaattttgaattggttcttgttgtttccttgcaaatgcgattcactaaaaagaatgaattcactgtgactcctctgcaagtgatcacggcatggcttcacctgacttagaaaaattcagtttttctgcacaaaccagactcagatattggtcatctttctctaggttatgctgcaataacaaacaattagtagcaacaaccagaaaaatcaaaaacaataacaaaccaaaagcgtctgtggctttcaataacgtgtttattctttgctcacaatagcaggttagttttggatccattgcagttctgtttcctatgtcagtttcctgtgccttcaccgtcctgagacccaggctctagagcttgctgggggaaaagtaaaagatggttgaattatgcagtgacttccaaagcttctatgtggaaattggtktatcacttttgctcacactctgttgggcaaagcaagtcctatggctaagcccatagtcaatgggaagattatgtattaattctccgtatggcagtattgcaagtcacatggcaaaaagcatagatagtcaatccttttacaggaagggaagtgaataactatgtaaaataatgccatccatcccagttcatgagcataaaggaaagaggtttttttttttttttttggtgggggtgcaaatttatcaagtcctagattattgaacgcaatacatgcttcagaggtagctagggtcactttagaacatttgatgaattttattctagtgtctctttcaaaggagttgtagttaaagtattgccatgtctagaatccagggagaatacaggctttcagaattaataaggtttcatttccacagagagagagagaaacagagccaaaatcaattgcaccttctaggttcagggcccttgagccctatgagttcctcttaaaacatttggactacagctgcctttctccttgttaaaatccttgaatttcattagttggggcccaggggaatggcccactttagcttgcagtgatgctatttggctgttttttttccttcttgtcatcttctaatgggcgaaatagaaaagagagactacaatcttcgaagaagcaaatagaaccctggaggattagagagcaggaagataactttgtgtttcatgctttctagttttcaagaactgcagtatgtctgtatctctaacaaaaactgaaccatcatactgtaccttaaaattaatgaatcaacaagaatttgtcaaatacctatttgcaaagttttttttattagatgctgaagggcaaacagaaatttttcccttccctcagagacttactgtttggttagagataaatttagcatagctttactacaatatgtgaaatttgtgttacagatgttgtaagagctcagagaaaggaactagtatgagcctgagtcagtggagaggcatgtgatttttcatgtctgtgtcagactctatcatatggctgaatcattatttatttaatcacctcactattattaggcctttagaatggtttcaattattgttattatagagcagactttgatgtggatctgtatatgtcttttcctgcatcttgaatatccttgtgatacagtgttagaagtgaaatacccttaatacatattgtcagtttattttccagaactttatacttccaccagttatggatgagagtaactgtcgccacatccctaccaactttgaatatcatccttttaaaatctttcctttactggctaggcacggtggttcacatctgtaatcccagcactttaggaggccaaggcaggcagatcacctcaggtcaagagttcaagaccagcctggccaacatagtgaaaccccatctctactaaaaatacaaaaattagctgggcgtggtggcgtgcccttgcagtctcagctatttgggaggctgaggcaggagaattgcttgaatctgggaggcggaggttgcagtgatccgagatcgtgccactgcactccagcctaggtgacagagtgagacttcatctcaaaaaaaaaaaaaaaaaaaaaaaaaaaagaaaacaaagaaaaatcttctctttactacctgtttgccttggcctagataactcctactcagctttcaagtctccgcttaaatgttatttccactgagttttccataatcccctgggtgagttcagagtctttggttaacccagtggttctctacaatttaagactttttaatatcactccttgattattcagaaatgaaatacactgatttaaccccactagacacattatatttaaaaatatgtaaagttgtaagaataacattaagaaaaaatagagtaacagaataaaatcacatttatttcagtatctgaaaacctaggcaagctgtacttgaagacaaaataaagcagttgattgtctggaccccaaattgctatgaatatgacagtacaaatgcaggctgacacagttatgtgggttggtgactaatttttcagaaatagtgactaactcttgacagatttccaggagaaagaatcttcaatttacactctacttgtaatcctggaaaattcagtatgcattaaaattgcacaaaactactttgcgcttaatatgtaaaatagagcgagattttatacccaataacagaactttcacttatgtgaatgtcacacaggttcaggagaattcttgttgtgtgtgacgctcacatttcaggctgcctcgtgtctttggtcccttgctacttactaaatgccagtaatgccccatgattgctgtgataataattaacacaaaaccaaaaaggtactctcacacatttcccaaatgctagattgtggtccctgctgagaaccaytggttaggtaacaatgaagtatcctgcgcttccccaaaaaccgcagtcatcatacttttcaaaaatgttcctgcctattgtaagttccttgtgagcagtgactgtttcatggtattgtcacctgcacagttcctggcatttattcatgccttgataatgttaatgaagtgaatgaattaatatttggatgtctgtatccttcagaataattgtactgaacagcggcggtatatatatccatcgaataattcctgctcatagtagcaagcctccagtgtttcacctccaaaaatgtccagaataacaacagctatccttagtcaacattttccattaccaaacatttggctaaggaattcacactattgtttcatctgtttgcttcaacaatcccatgagcttagatagagtaacttgctcaaggctattaagtgaggtggtttgtaagtgacagaggtaggttttgaacccaagtccatagactgtattcatggccactatactataagagctggctatttggccgggcgcagtggctcacgcgtgtaatcccagcactttgggagtccgaggtgggtggatcacctgagattgggagtttgagaccagcctgaccaacataaagaaaccccgtctctactaaaaatacaaaactagctgggcgtggtggcacatgcctgtaatcccagctacttgggaggctgaggcaggagaatcacttgaacccaggaggcagaggttgcggtgaactgagatcacgccattgcactccagcctgggtgacaagagcgaaactccatctcaaaaaaaaaaaaaaaaaagagctggttattgatttaaaatcagtagtctattatatgaaggaaattccttttttttctaataaaacaggaatgctaacaatgttttttgaatttatggagttatcatatggcttatcttatctgatgtactgaggaagttaatttatagtttataatttctaacctttcttgcactattattattcccatatttgatctggtatataagctggcaatggactgtgaatttatttttctagaactgtgtttaggatttgtgtatctatattrataggtgacatcagtctatagtttttatttctataatctatgttgggatttggtaacagcgttctaacaaaaattatttggaaattattctatgtttgaggatggcttagaataaattatacatgggaattatctcttccttaaaagttttaaagaatgtactaagtagagcatcttatgggagatttttctttttgggggttgagggtgggatgggaataattatttgataatgttttcaattttatttatgacttatgtctgttcaaatcttatttttcttctccttcagataattttaatgttatactttttctgaaaataacccattaaaaacattcatagagttgtacatagatttcacgtttaaaaaaatcttagtatctgtgtctttgtcattttcaattttgtatatttgtgcttatatatttattttctttttagacttgccagagatttgtcttttatatccccacccataaccttcctcaaaaaaacagttcttgaatgtatttatgaataccacatgattttgtatttcatttattaagttttgctcttctttttactgtattcttcctcattttaaggatttttttctaacttaaaaaaattgtacatagagctgggtctcactgtgttgcctaggctgtctccaattcctctcaccttggcctcccaaggtgctcagataataggtgtgtgccactgtccctggccttctttctaagtttttaagttgactccttacattcttttactttctctctctttcatcaacttttcttttttttccttttttctttcaatggcaaaagtagtttagtccataactttctttgattgcagatttggctaacacgtgtattttttcataggtaatattctcattttttattgttttccaagtagtctaaattgtgaatttatttcctctttgacattgtgaaaattattaggagaacattctttaaattcttgtgcttttggactttattggcttaggattttatcagcatttcatgttattgcattgtgcttaaaaatgacctactgctttagaaaataatagaaatatgtaactcaaattggattatcattcattttgaatctgccattttttcatctccaagtaacgccaccattgccgacgtaagtttctttatttgaattacatctctattttatttttctctttaggttcgagatggtgaaaccttacttggaaaagtctgtggcaacggaaccatctctcacattaaatccattactaatagtgtctggatcaggtttaaaatagatgcttctgttgaaaaagctagtttcagagctgtttatcaagtcggtaaggaaacatataatttttaaatgtctaatttgcctgattgtaatattttaattcttcaaaataatttagtcattttatgtcctcaagtgttaagtggaaaatattctcatagaaatgttatattcggttatctcctcaggcagtattagattttgcaataaaattgrgataaaattattaatatctggacaagcactactataatttttatgcttacagcttgcggggatgaattaactggagaaggggtcattcgctcrcctttttttcctaacgtgtatcctggagaaagaacctgtaggtggaccatccaccagccccaaagccaagtcattctcctcaacttcactgtctttgaaattggaagttctgcccactgtgaaacagattatgttgaggtaagagggaaaaaatctttgaatttgtatttggttgtatattataaaaaatattatgggttgttgtcttcaaatctgttataggaaatgaaagtagtttatgtagaccaatatgtcttatggatacatatgtaaaaatcctcagcaaaatactggttcagtgaatctagcacaaaaagaggatttatataccatgattaagtgagatttgtcccgagaattctaggttgatataaaaccccagaatcagttaatgtgatacatggtaccaataaaataaagaacaaaaactccatgatcacctcaatagatgtgagatctggattttgctggatttgacaaaattcaacatcctttcatgatgaaacactcaacaaactaggagtagaaggaaccttccttaatctcataatggacattcatttaaaaactcacatctaacatcatatttaattatgaaacactaaatgctttgcccctatggtcacaaaaagacaagaacgtctgttctcactacttctattcagcattacactggaaattctagctagagcaattaagtaaggagaagagataaaatgcatccagaatgaaagggaacgagtaaaattctctctattcacagataacatgaccttgtatataggaaatcataaggaatccacacacataaaaaactattagaactaatccattcagcaagttgtgggttatgagatcaaaatatagaaatctttctttttctatacaccagcaatgaacaatttgaaaatgaaatcaaggaaacaattccatttacaatagcattaaaaaataataaacatgaaggaatacagttttaaaaataagtgtaaaacttgtcctctgagactataaaacgtccttgaaagaaatttaaaaagacctaaataaatggaaagacatttaatgttcatggattagaagacaatattgttaagatggcaatactccctaaagtgagctaaagattcaattcaatccccatamaaatcacagcrggctcttttaaaaaaatacataagctgatcgtaaaattcatatgaatatgcaagggaaccagaataaccaaaatgttcttgaaaaattacaaagttgaaggactcacacttcctgatttcaaaacttagaacaaagctacaataatcaagacagtatcttattgaagtaaggatataaatatagatctatggaayacaattgcaagtccagaagtgaacacatacttttatggccaattgatatatgaaaatgatgccaaaacatatcaatggagaaaaatcattttttcaacaaatggtgctcaatagccacatgcaaaaytatggtgctggaccccttccttatagcatacacaaaaattaactaaaaatggattatagacctaaatgtcagagctaaaaccatgaaactcttaggagaaacctaggagtagtctctatgcccttcagtttaggcaaagccttcttaaatatgacacaaaaagtacaaacaaaaaaagaaaaaagaaaaataacttcctcaaaattaaaaacgaataacttgatttttaaaatgggcaaaggaggctgagcacagtggctcacacctcatcccagcactttaagaggtcaaggtggatgaattacttgagctcaggagttcgagaccagcctgggcaacatagtgagaccccatctctacaaaaaattttaaaaatagctgagtgtggtaatacacgcctgtagcctcagctactcagaaggctgtggtaggaggatcacttgagcctgggaggtagaggctgcagtgagctatgattgtgccattgcaccctagcctgggtaacagagtgagaccctgtatcaaaaaaaagaaatgccaaaaacaaaaggacacacccataggatagctataataaaaagagtcagataatggtgtggacaaggatgtggagaaattggaacctttatacactcctggtggagatgtaaamtggtacagccaccttgaaaaacagttggcagttcctcaaaaagttaaacatagagatactatctgatccagcaattctacttttagatatattctcaaggggaatgaaaatatatgtccacacaaaaatttgtatgtgaatatatctacagtcatcatctataataacatatacaaatagcaaaatgcaatcattatttttaattttaaaagtagaaacaacttaagtgtccatcaactggtaaacggataaataaaatgtggtatatctttacagtggaatattacaaggcattaaaaaagaatgaaataatgatccatgctacaacgtggatgaactttgaaaatgttatacagtgtgaaagaagctaatcacaaaagaccccatattgtataatcccattttgtttgaaatgtccaaaatgggcaatctacagagacagaaagtagattagtggctgcctggggctgtggtttcaggggaatgaggagtgactgctaaaggatatgagtgttttttggggggtgactaaaatgtgctaaaattgattgtattctcaaattgatttgtactccattaaaaacatttcagaaataattattcttgaagcagttttcaaaattgatatacaacatatttgaacatatcttctctaattttagattggtagcagttccattttgggttctcctgaaaataaaaagtattgcggtacagacataccttcatttataacatctgtgtacaattttctttatgtcacattcgtgaaaagttcttctactgaaaaccatggtttcatggctaagttcagtgctgaggatttgggtaagagaytgttcccttttttttttcctcctcttgggcttgtatcagaataagtgaatgatagaaataaattatatgaaaatcatctgtactgtgaaaaattttaaagtacactcaaagacaaagaatrtatattttctaatcaacatttatatcaaaagttaattgttacttattaataagagaaaaatcaggttatcttaagtggcaactaagaaacatttttccttttaatctttgaagaggttattatcagagccttttaatttgaaatccaggtagcttggttacttgctgcagtaattawaatttttatttcaacagcatgtggagaaattcttacagaatcaacagggaccattcaaagtcctggccatccaaatgtctacccccacggtatcaactgtacttggcatatattagtccaacctaatcacctgattcatttaatgttcgaaacatttcatctggagtttcattacaattgcacaaacgactacttggaagtttatgacaccgactctgagacatcccttggaaggtaaggttatgtttgtttgtttgtttaacaataaaacttcactgatttcctgcttcagtgaaggatcttaaaattgaccacgttgtgttatgaaaaccaggtgagatcctcatgcttcttaatgaccatttctacataactactctgtagttgtggcctgtaggcattaagttttgacatctgtatatattcatgaagtcaaaaccaaaattaaaataatgcatatatccactacccacaaaactttcttcctttccgttataattccttgcttttgttcctcacccccacccacaggaaaccacaaatctactttctatctctgtagattygtttgcatatcatctaaatggaatcatactatacgtactgaatgtttttctgactttcctcaattagcataatttttgttgagcttcttggatccgaagatttgtagttttatcaaattgaaacattcttggccactggttcttaaaatatttttctgtctttcctccccattagggactctgatttcatgtatattaggcacttgaaattgttctacaactctcttgatagtctgtttgatttcaagcctctgttctctgtgtgttttactttggaaagttcctattactatatattcaagttcactcatcttttcttatgcaatgtctaatctgctattaactttaccaagtgtatttttcatcttagatattgtagttttcattttagaagttcaatttgagtcattttatatgtagtccatgtctctactttacacatgaattttttttctctagcttaaaaaatctgtgagatatagttgtagctattttaatgactttatctactaattcagacatttggattgtttcctgctatggttttatagattgatttttcctctctttctgagttatactttcccacgtcttttcatgtctgggtaatattcagtgggataccagacattttcaattttatgtttttggctgctggacattgtcatattcctgtaagtattcatgagcgttgttctggaaagcagttaagctacttggaaacaggttgatccatttcagttttgcctttaaactcatttgtttcctgtctctgaaggtttgttgtcctacattgcttgatatccagtgttttgagagccattgttttatacgtttttgtccaggatttttgttgtttcaggtgcaaagttaaatctagcctgttattacatttctgttggaaatggaaatcttttgatattttaaaatgtctttatcttgcattttattttctttatttctcattcatgttttaaatatccttcttatcctaatctttcatctttttaactttcttctttttcttttttgggaaggtacttaacacatcaccactgcaaaatacagaacgtttgctgaatggcataaactataatgatcttccccaaatttcatatacatgggcatatacgaaggcatttaaaatatcaattagttcacctacctttattttgatgaagatattaaattttttttcacactgcaatggtattatacaccaaattttctttctttttctcctttagcaattgacgtatccatttcccgtactcaacatttcctctctttttggtttctatatttgttttctttatcatttcttttggttaattttaccaagtgtgctttgatttgagattcctattttattgtcacttcttcctacaggtatttctccagataaaagctcatggcattctgtcttttatcacaactctctttttaacattaatagaatagtttttctgagctaaactgcttttgttcagcagaaacatggcatggctgaatcatcactcttatctctttataagtgagctgtttaaggacaatagattccctctataggggttacgattgtaggcactgttctaagtgctttatatacagggtattaactcatcacattctcaaaacaactctatgaagtaggtactgtcatcattcccattttagggatgaggaaggcaaggcacagggattgagtgatctatgagtttagattagagagatgactctatgattttatgatatattgtttccctttgttgtataagtttattacatttctattaaaaagtgtattaatatgctatatggcaatctagtgtagcttttattaaacttctcatacatgacaactcacatagccagtcacatacctaaaaccatttcagggatataatcatgaacgggacaatctttcgtaagtttgcaaatcttttttgcctgaaatatatttgtgttttaaggttgatgagaggtagagaacaaaacctattattatatttacatgtccaaatttttgttacatcattttcagtataccaaactaaaatacacacatctgtcctttcttggtttggaatagatactgtggaaagtcgatcccgccatctctcacaagcagtggtaactcattgatgctggtgtttgtgactgactccgacctcgcyyatgaaggcttcttaataaactatgaagcaatcagtgcagcaacaggtaacaaaacagcattgcatactcggttttattgactccattgcaaaacagtgctaatagctaaaacacaatgagaatacatcatccgcaaacctgtggcacacaatgagagctatatttagaataaagggtagtgacttaaataccttccttattaaaagtagtgactagataagaatattgtgtcaatattaaatcttctaatgttggtaattgtactgtggttttgttaaaagaacgttttttcttcccttaggaacaatacactgaagttttcagacggtaaagaaatataatgtctccaaagtactctgaattggctgagataataagtgtgaatatttgtgtgtctgtgcatgtgtgtgtgkggggggkggagagagagagagaaatgataaagtaatgggagcagaatacaaatacataataaatctgggtaaaaagaattcaggagctcattcttgcatcttttaaaattctatcagaatgaaaagttaccaaagagactgaatacttatgttaagaaattagaaacagaataacaatgtataaaaattagagactaccgcatgaaattccagggaaaggaatggaagatttcttggcaaaatatgcatttctcaatttgacctaatgaagttaaacttttcagcatttattcctttcattgtatttttcctattacttaatttctcattattactatgccctttgcaaatgaagtataggaaacaaatcccttttgcaggcacagtctttgaggtaagatgtgaaccagagatgctcccagccccaagagcctgtgcatgggattgatgaaggagtcatatttcgttaggctcatgtttccctaggatgtgttgttttttagagactctgagctttccttttgcatcattgtattaaaggacccaaataacatccagcatagacccatagtaggcatatggtgaccatgcttccaagcatttctccgctttgggattaccccagcagcatggtacaattcactgagctccctccagaaagaactggtagcttttcctatgttgggacatgcaccctgtgacacactctggcatcctgagaaccccagatgcttatcttttaaagtccccactccctaaaataaataaaagtttaaacatctcccactcaaaatcttacccaatttcccatttatttctccttcagaggggctggccactactcttcatttcaggcaaaactctgcagcagttcaagttctatgttcaaaagcatggctttagatttgctccagaatcctgagtgtgagagaatcaatcaatacttttctcccaggtaggaacctctgcaggagcagttcattatccagctcaagtgcaagcacatgcgaaatggaatccctggcagttacaataggctatggtgtgtgattgacgtattcactggacttcattcaggtggttaacatccagtgaccaaaattggtttcttaagaaattatagggtgcacacaatttttcatgctgttgtagttttatctgtctggtatgtttggccccaaagcacactgaatattagatcaggatttggagcaagtcacttgaactctctaggccacagttttctcatctgtaaaattaaggaattggatttggtaatcttcgagagatgacttctggctttaatcatctatgaacataattttaatttggtgcatgaataaactggctgtatcttagataacatataatacaggcagggcctcctgaaaatgtggaaatctttgtaatgatatgcaaagtaagacatacctttgtaaaacaattctattaccatcctagcttgtaagrcaatattttgtgcagaaagaacccagagcagttaaaataattgggcagggaggwtattagattttaattctaaaagttttcagaaagataagatacacgtaaaataaaaatgagtcaggaaaagagatagaagcaaactggacaggaaaggaaactataaagaaagagagaagaaaaagcaagcaataaaagtgaaggggagacgatgttttcatagaaactcaaaagattctccagctggcttccctgtgtgataatcattactttggcctctatttggtctgcataaggctgaaatcacagacgagggagtgtttgctttctgtccctgggctgagcccggctggtcactgtgcccgcttgttgttggatgaactcataggtctgactaacacagtcaagccattctaaatagcaatcagatgacgagatccaggaagacacaacacaccttctgtttataattctggagcctgtcacagtttcccatagatcaagacctgagagatcggctctcatgcattgctgagggggggtcctgcagcattttttagggaagggctggtgtcaggagactgagctggtgttgggctggtgacaccaggtggtgggctagtactttaaggcagtggctagacctagaaggcagccagagtcagagtgagctgctggtgtggaaacacagagatgctaggactcattcttttcaggtgtcatcgtatgttggatattttctgcagaataaaatagcatcagggaaaagcatcaagggaagctcagtcatttgccctcatcttactttattgttctaacagaagttatttccagagcagtaatgttggtatttggttgttgatttctagctcctcagcccaacaggtgtgagtttgcctgctgaagtctttcttgtcttcatctgataaaggttaagtttccggatttgagttcagatacttttccatctgtagtttgtgccatgtggctatgatgtcagccccaaaatatgtgtttgggagaaaaaagattggtttcttgtgattactgggacttcctcccttgttactttgtttctgcctttatccagatgtgcctgggaaaacagaaagaaaagaactaacaagtacaggtttaacaggttaaaactcttacgaagttcttagaaactacaagactaagctttaatttaacgtattagattttgctcattcaaactacaaaatatttgaatcctgagagactataattgactaatgttatcaatttaaagtaaaattttatattctattaacatgtattgcatatacattaatatataatcctgctaagagggaactttaaaagtataaacagggacagataaatgtaccggattcattttcaactttaatattagaggaaaacctatgtaacatctagtccagtgcttttcaaactgcaattcatgactcattcgtgagtcatgaaattaatttattcggttgctacttgtgattgttaaaagtatggagtaggatagaaaggaataggagagaaagtatcagagtttatcatacaaagtaaggtgccgcttcatgagaactgtttgtagtatctccgcgcatgggtggctaacgtaaatgtattttttagggtatgtcaagaaagtttgaagcacaaatctattccagttaccttaatttttaaatgagggagatagaagtctaggatgttgaatttatcctcccaagaatacatagctgattggtttgaaagtcagactaaacaactgagtcccgtcttagaatccattgcttttgccatgtctaggttagctcttagaaacgctctaaatgaactgcatataacagctagtaacatttaattcagggctatcatcaaactgtggtggatttttcatatttcctgcaaagcgaaaaccttcacaattgtccagggaaatggccaaggatgatcccaacaacaacaacacaggattagagatgagccctactgggctttcttggcctccctccttcccagggcagggttcccacctactcatcagtgggtggttagtgctgttttttatcagtgatcctggaatgagctcagaagaggcatctagcagtgcaaagttaagaaatgatgacaaacatgcccaaagaggccttctttacactaaacgggtaaagagagttctgtttctattttaaaacttcagtttgggagtgtagtgttctcaaattctagtgttcataaggaatttgagatgggggattttcttgctataaattcaggcatctgggccccacccagaaattctgattaaaataggtctagggtgcttgttcgccaagcaattcaaggggttctaatgaaactttgtagtttatcaaggactctgaaagtcaagccttagcatgtgaattgctgtagaattacaagggagatacaatagtggattggactgtaactgctcatgatggaaagtactattcatgacacagggaaaggggatgctgtagggaggtcagaagtcttggtcctactctcagccttgatactaattaggaatacttttgtttgtttgtttttgggttttttttgttgttgtttttgttgtttgttggtttgttttttgagatggagtttyactcttgttgcccaggctggagtgcaatggcaatatctcagctcactgcaacctctgcctcctaggttcaagtgattctcctgcctcagcctcccaagtagctgggattacaggcatggtcaccatgcctggctaattttgtatttttagtagagacagggtttcaccgtgttggtcaggctggtcctgaactcctgacctcaggtgatcccccygcctcagcctcccaaagtgctgttattacaggcatgagccaccgcacccagccataatttggaatactttggacaactcacaagcctctctgattatttctatcgaccttgaattctgtattctttgctatgagagattcagatattttccctctggaaaaggtgttgtagtaagtcgattcgtcttttaaagatttactttcttactggctagtgttttctcataattttgtatgtacaggtgtcccagcacttctctgctcagttcrtttatcttgtttgttatatttcttactccttagaataaaaatgcaacaaaatgcttaatcatgatattctgagttccctacttgtcttcatccttaaattgacatttcctgtgtagaaaaaccagggattgtggccaggcagggtggcttatgcctgtaatcccagcactttgggaggctgaggcagtcggatcacctgagatcgggagttcgagaccagcctgaccaacatggagaaacccagtttctactaaaaatacaaaattagccaggcgtggtggctcatgcctgtaatcccagccacttgggaggctgaggcaggagaattgcttgaacctgggaggcggaggttgcggtgagagaaaatcgcaccactgcactccagcctgggcaacaagagcgaaactccatgaaaaaaaaaagaaaaagaaaagaaaaaccagggattgttaaagagaataggatttggaaagagggaacttgggttcatattttatcttggccatgtctgaagttaagtgtcttttagaatttaatctccaggaacctgagatctctcatctacacctctctaaaaagtgtggtgataatgcctggctgttttgcaaagttgaggaagacaaaatgagacattcaatgtgaaaaytacattagagttgtaaaggaccatgactttgccagatataaaatatgattctcaatatccaaggacaattttacaatagctactttgcttatttctatatgaatctgcactggtcatctgagagggaaaagaaaaagcaatgaccatgaccgcctagcagaaaattgtagcaaaatgttgagtttgattgagaaggcttcttctttcttaagggagaaactgaacctgtaattatatcttcccttgggtcttcactttgaaggatgctaaaccaaatatgtctgtggaagcagatgatggctcctgggttagctgtttatttagcacattcctagaatatcagaggtcatatggattcattcagaaaccaaacatttcataagtgatttcagaaagcatagcctaaagattgagcctcaatgtaattggatagtcacataaatcatcccataatgcaaagcaggaaggagctggagcagttccccataatctagagtctccctatgagatgcattcctctctccagaggatcagcttatcctatttctgtggctcaaattttatgggactgatatcattgttgctttgtggtttggaaggttatagatgtttctcattttcccctttgataatgagccaagtcctgtgttacaaaaacttatttgaaaatgtttagtgaaggcaaagatacattgtgagttttagaaaagtctagttttgtgatttttgtaatggtccacagaaggcatttgtatgttttttcatttctttctttacattttttttttttgaggttggtcagagagaaaaatatgtgagttttgccaacagttgtctttgatcctcagagatgtgcttttccattgctagttcagttgaatttaggggataggaaaaatgtactttcatttttcatttctttgtaaatgttcttagaccataataaaaggctaaactgatattggatatgaattttcctttggcaatacaagataaaataaaaggcatagatacatttttatctttgcattttgtattgatgtaataataagcatcatgccaacacataaatatccttgtatggaaacacattctaatttaatcatttgtgctttgttgaaaatcacaagaggaaaccaaaacttagtattgatatttttcagtattactattattctagaaggagccatttatattgtcaagggaagaaatgtaaacatctatagagttcagtgatagttaagaggggtttttaatctttcaagaaatagatgcattaagttcagagaatagtaatttttctctctatgaaatttgaatctcataaaactaccatcaggttttaagattaaatatcctattgtttaatacgtgtagcaggggtcccttcaaatatgatgttttatttctctatttcaattttatgtattctttattagatatctgaattatttattggactttctctagagagtgcaacctgtctgtgcacagaactttcaagcttttaacataatatggatttttccctgtaatttcagtaaatttatccataattttcagaattgtgtacacccatttaactacctctccattcaagctatcgaatacttctgtccctccagaagggatcctcgtgttccttttattagtttcctcaacaacctctatgtcagcaaacacacacctggtttctaccaatatagaatagttttaactgtgcaaaaggcagctgtgaacaggaatacatagtatgtattcttttgtgtctggcttcttttttttttgagacggagtctctctgtcacccaggctggagtgcagtggcgcgatctcagctcactgctacctccgcctcccaggttcaagcgattctcttgcctcagcctgcccagtagctgggattacaggtgcgcgccaccatgcccggctaattttttgtatttttagtagagacaggttttcatcatgttgaccaggctggtcttgaactcctgacttcttgatctgcccaaattggcctcccaaagtgctgggattacaggcgtgagccaccgcacccggcttggcttctttcatttggcataatgtgtctggaaatttttcatgttgctgtattcatgtgtttttttctttctattgctgactagccttccattgcatcgatatatcataatttgattatctgttcacctgttgttagatagttgagcttttttttcccagtttttagctattacaaaaaaagctaccatgaacattgacttgcaggttttttgtggacgtattcattctcttgcgtaaaatacctaggagtagaacttctgggtctcatatggtaatgataygtttaactttataagaaagtgccaaattgttttccaaagtggttatgccattttatattcccacctatatrattgacaattctgaaataggagttggggctccacaccagaccagatggaagactggctaaaacagggaagagacagaagcacctctgcataagacatgcccaacagcgccatgacagtgtgccattgccatgacaacacccagaagttaccatcctttttctagacatttccaaataactcaccccttaatttgcatgtgggtgtaaatatgactgcacaactgcgccaagctgctaccctcaacacgttgcctatggggtagccctgctctgcaggagcagtcacggagctggaacactgatacctcagtgaagctgattttttctaccaccagctcacccttgaattctttcctggccaaagcccaaaaccttcctgggtggagtcccaatatgggggcttgcctgccttgcagcagttcttttctccatctttcccaatccttaatattgccaatcttttcatttttrgccactggcagttgcatagcagtatctgatggttttattttgcatttccctgatgactaatagtgctgagtccttttcacatgctttttgacaattcatttattttcttttgtgaggtgttcattaaaaccatatggttcatttttgtttgtttcttattaatgagtcatatgttgtatattctgcatacaaatacgtcctttgccagataaatgtattgcaagtattttcttccagtgtgtggctaaacttttcttttccttatggtatcctttgaagaacagaagttcaatatatccttttatcccttttatggttagtgcattttgtatcttgtctgagaaatatttcactaccgaagttatcaggatctcccacgtgcatccttctagaagttgttttttttttgagacggagtctcactctgtcgcccaggctggagtccggtggtgcgatctcggctcactgcaagctccrwctcccgggttcacgccattctcttgcctcagcctcccgagtagctgggactgcaggcgcccgccaccatgcccaggtaattttttgtatttttagtagagacgggtttcaccgtgttagccaagatggtctcgatatcctgaccttgtgatccgcccgcctcgtcttcccaaagtgctggaattacaggcgtgagccaccgcacccggctccttctagaagttttatagtttgagattttatacgtgttctatgatccattttgcatcaatttttctatatggtgtgagttatgtgtccaagtgtgtttagcaaatggtatttaattgttcaagcaccatttattgaaaagattctccttcacccccactcccactgaattgcttttgcatttttgttgaaaatcacctgcctgtgttcatgtgtaggtctgcttctggaatctctatttcatcacactgctgtacatatttacccctttaacaatagaacattatattacttaatgttacataatttcatattgtatattaaaatctggaagtataaaacctctagattggtacttatttttcaaaattgtttgggctatcctagattttttgtgtctccatattcattttagaatcagcttttcaatatataaaaaaacttgagaatttgattgagattgcattgaatttacagaccaatttggggataaaggtcatcttaaattcagccttccaatccatgaacatattttacctctccatttattcagatcttccttcatttccttcagcaataaagttttcagtgtagagtttgtgcatgtttctattaaacttgttatcaagtgtttcgtgtttttatgctattataaaatgacatgccatattatatatgctattttaaaattttactttctggttgtttggctgatatatgcaacataaatggatttttgtatacatatcttgtattctgcagtcttgtttaactcagttattagttctaatgacttaaataaatcctttagtatatactacatagatgacaataactgtgaataagttaaataagttttattttttcccttctctctctctgtccctctttctctgtgtatgtgtattgctgtgatggctagaactttctgtgcattcttgaacagaaagggtgaggttggaatgttggcctttttcttaatcttgacaggaaagcgtttagtcctttaccacttaagtatgatgttagctttggattttccatagatgccattcatcagtttgtkgagttcccttctgggcatacttgctgagtttttatcctggataggtgttgaatttttctgcatcttttggtatctttcaaagcttttctttttttattctgtttaggtggtaaattatgttgatttagttttctactgtcaaaccaatcttgtgtaatacatcagaactccacctggttctgatctattataacttttacgtgtattcagaattgttatgctaaaattttcttatggatttttgcatcagtgtaagacatactgaactgtaatcttcctgaatttctttgtctggtttggtataggagtaatattggtcttgttagttagaaaatatcttctcctctattttctgagtttgtggaatataaacaatttcttaattgtttgatacaattccaccagtgaaattatttgagcctgtagttttctttgtaggaaggttttatattacaaatttaatttcttcaattaatagagactattaaagctttctatttcattttgagtcagttatgggaattttgaaagaattcatctattttatgtatgttgtcaaatatatttgcacagttttttgtaatggtgtctttctattattttaatgtctgaagattctatagtgacatcccctcttcattcctgaaaatggtaatttgtgttttttttcttttttctttgatcagttttggtagaattctatcaattttaataattttctcaaagaaccaatttttgacattgtttattttctctattgctattgcattttccatttaattgatttctgttcttatattatttcatttaattcttgccttagttagcttttctctagtttctttagataaaaattaactacagatagatagatatagatatagcctttaagcactacttcacttcacctccccagttttttttttttttttgagacggagtttcactctcgttgcccaggctggagtgcagtggtgcgatctcagctcactgcaacctccgcctcctggtttcaagtgattctcctgcctcagcctcccaagtagctgggattacaggcgctcgccaccatgcctggttaatttttgtatttttggtagagacggggtttcaccatattggtcaccctggtcttgaactcctgaccacgtaatctgcccaccttggcctcccaaagtgctaggattacaggagtgagccactgcgcccagccacctcccaaattttaatgttttattttcagtaacttccagttcaaaatattttccaattatcttgtgatttcttctttgttctatggattatttgcaaatgtattatttaactttcaaatatttgcaggttttctagatgtcttattgatttataatttcagttttattgtggttaaatgatatactttctaagttttcaattgtttaaaatttatggagaattgtgttacagccctgcatgtggtctatgctgctgaatgtttcatgtatgcttgaaaaactgtgttgtctgcagttattaagtgtagtgctctctgtcaattggctttaagtcggctgagtgttggtcagattttctatacccctattcatctttatctgtttcattttcggttactgagagaaaggtgttaaaatcttcaactctaatcatggttttatttttttctttaatttttgccttttcactttccttcgtgtattttgaaactattacttcatgcatgcacatttaggattattatgttttactgataaattgtcccctttgtcattatgaaatgtctttctataaatctaataatattwtccttcttgaagtcacttttgtttgatattatttcagtgatttcagctttcttatatttactgttcatatggtatatcttttttcattcttttagttacaacttagtttcaccattatatataatggcatcattatatataatgtgcatgcatagtaaaaarcatataattgggtcctgctttttctgtgttttagttgaagtatttagaccatttacaactaatgtaattatttttatggttgaatttaacataccattatggtagttgttttccattcatctctttttgtgttgccattattctgtcttcattttggtttacagaatattattagtattccattctatttccttcattgtctttttaatgatacctttttttttgtatttttacattaggtctaaaaatatactccttaacttataagcaagttttcttagagttaatatgcagctgctttacatttcataccttccaattcatacctgacacttcatattacacaaattcccctttatacttcacaagtgaaatactgtcatactagtgtaattccatgtgcctatccttctgtgtgctgttttagttatatcttttacttctctctgtgttataaattcaccttactattatttttgctttaaatcactaattctctctctctctctctcttttttttttttttttttttttgagactgagtctcagtctgttgcccaggctggagtgcagtggcaagctcccagctcactgcaacctccaccttccgggtttcagcaattctcgtgcctcagcctcccgagtagctgggactacaggcatgcaccagcacgcctggctaatttttgtattttttttagtagagacagggtttcaccatgttggccaggctggtctcggactcctgacctcaggtgatctgcccacctcrgcctcccaaagtgctgggattgcaggcatgagccaccgcacccagcctacttctctctatattataaattcaccttactattatttttgctttaaatcactaattctcttttaaggagataatgaaaagaaagcctatcatttatatttatacaatgatttatcatttccagtgttcttcattccttcttggagatattttctgtttggtatcattttcctttggcccaatggatattattatttcatacagtacaagtcttccagtgacaaattatgtcagcttctgtttgtctaaaaatgttacactctcgttttttaaaaaagtagttttgctggatatttaaacctgttttccccatctcaacattttaaagatgtattccattttcttcttgcctccattgcttctgtttagaagccagctgtcatccttatcatgatgtccctgtatgtgatgtggcttcccccccgccccaactggcttctgtgttttccttgtttctgttttctaatagattcactctgacatgtccaagtgtagttttcttttatttctcctgtttagtattgactgaactcctatatcttactagacatttttcataaaatttaggagaattttagccgctatttccttctccttttttggcccatttttattaccttcttcttctggttctctaattgtatgtgtgttaacctatttgttgttttttctttgtttttttaaatatctgtccattttcctggagttcttttttctttgttctttagattaaattatgtctattaatacatattaaagtttactgacctttttttcttctgcctacagtttactgttaaacttgtcatgaagttttaatttgaattagtgtaattttaagttatataattttcatggttccttttaataattttctccctttttgggccaaaatttcatatctgtttactttttaaggctttttctttaagtctttgcacatatttttaatggctgctttaaagtctttctcttttaaatctaacacctggatcatctttgaatcacaagatgacattttttttctcaactatgaccacatttttcttgactactgatgacatttcttttcttgatttgattcatattttctcattttttgttttgtttttttaagacggactctcactctgtcgccaggctggagtgcagtggcatgatctcggctcaccgcaagctccacctcccaggttcaagcgatcctcctgccttagcctcctgagtagctgggactacaggygcccaccaccacacccagctaattttttgtatttttagtagagatggtgtttcaccatgttggccaggatggtcttgatctcttgacctcatgatccacctgccttgacctcctaaagtgctgggattacaggtgtgagccactgcacctggcccatattttctctctttttttttaatatttgtaatagttttgggttttatagtggacatgatagattgggacatgatatgggggtcccatatcatgtgggtaaattatgtgttgtagacactctgtattatcttatcttcctctgaagctagtttgatatctagctgattactttgtatctgcataggtttatatctgtacttgctaaagaatatttgtgaacatccctgtttctcgagcccctctaacttgctaggtctctacctccaacttctatgattcctgcaggtcttgttaagacttatcctttggcccggaagttctagagagccctactcttggccatggtcttcacttgtaagatatggccttttaggtgtctcatttgaatgcctgaggtgttaaggaggtatccccattctggaatgggagagaactctaaatgatcttgtttccgcttccagcctagtagcagctcctgtctgacatgctttctgaagtctcaccttatgtattctcagcccaggcttagctaagaatccatgggaagccctactcagatgcccggctttcctctctatatacttcttcttctctgtagaatttccatatagttccagctgctttggcaactctaatctttgcatcatcagctcagtaggactgtcattcactacttggacttcagctcccttctgtggtcaggaaattctgcacaggtagaaagccaaggaaatcaagagtcgtacatcatgagtttcctttctgtcaagaatcacaatcttgtactgcagattgtccaatattttgttcagttttacagttcttaaggagagcagctagtttagtacagttgcttgtcatagctggaattaaaaaaatattaaagaacctcagccaaccaggatagagtacaggaagaagagagagagaggaaaaatgaggtgagaaaaatagaagtcgtaggattggagtttaggggtagtttgaaagagaagaactgaatggagtagggagagtgggaggaacttagatgcatgtaccagtccccttcgtttccaacacatcatgtaataatatttcaacaactacttactgggacctcatctgggccaggtactacagtgatagtaaataatggttaataaagtcttagtcatatcccaaggtttagtaaggtaaatatactcacataaaaacaattacaaaatatgtttggggttcaaattgctatttgcataaaattttattatgctaaataaattaattctgcttggttgggaaaggtttcagccaaccttaaatgatgggtaagagtgtatatgttaaactgtgtattgkcaggggttgttgggtggcgggttaggtaaagggtaaagcatttcagacaaagtgaatggtgtaaatatcattggaacacatcaagaactgtagtttacttttgtgccagcaayagaaaagaagcttggtgagtaaatcaaaatttcagtacagattaacagactcccaccagttgttccagaataatcacattcatgtaagcaagataaagggaaactacccatcattattgccccaaaatgtcattaattcaggttcctccacctgagacctaatcacacttaacattctcccacagacaagttgcattagagatatgcaagacaattgtatttcccytccaggagtacagtgagtaagcaagaacaagtgacgacagataatttcctctaaatatttgatttactggccaaagctctctgtgtgtgggtcaatgagtctgtctrttctgtcaactcagggatactgggtcattgctttcatttgatgtcctttttttagcttagtaagtttcattrctgggtctgaaatattaatagaccaatgctatactcctccccgctctctttatccctcttttctgcctttcctgttgtctcccttctgtctgtcttattcccttcctctctaccttcctttccacttgtggaaatattttggcagactacagagaagcatacttttctatacttttggagttaaacataatctttggtgttaaatgtcactgtgaattccttcaataaagtaaagccttgattgcttgctgtttaaaatagagtaaaatcaaatatctggcgaatgcccattcctttgagagctacacacagatagtagaacctataatatgttctatgcatctctatgttttcaataccaatgattcttcttttctgagcatggggattatatagcagcaactagggaaacagcataactaaacatccttattattattattattattttgactcacaatgaaacacaatagtttattgtatccaaaacctttcagtaggagacctctgtctactcctataccctagatttaggttatggctggatgcaattggaaatacattaaaaatgcatttatttgctgggcatggtggtgcatgcttgtagtcccagctgctggggaggctgagacaggagaattgcttgaactcggggggcagaggttgcagtgagccaagatcccgccactccactccagccttggcaacagagcaagaccctgtctcaaaagcaaaaacaaaaacaaaagcattcaaaccagattttctttgtaaaatatttcagatttggagggcataggagattgagtgggtggtaataaacacagaatcgactgaatagrtaacgttaaaactgttaaactagaaaagtttttaaagaagatatttatttaggacttcaaaattgtccaggtactatgctaaatgttttataaatgacctaatgtcttccttataaagtaaatgaccaccatttactgagtgcatatcatgggctaagcccttgtaatgcattatctttaactcttaaaccttcagtcaaaggtagcaatcctcttcatttgcgagatgtgagaactaaggcttagagaagtacagtaactctcccaaggctgcagagcttgacagtgtttgagagggttttcattcgagatcactctgatccttgagcctgggcccttattcttcaccccgtggtggaggtacctgctttgtcatttctcataaatgcatgctttggtgaaaaccactttaaagggagcttatgaaaaggcaagattgaattatttctaggccctcctgcagtggatcctaatttttaatgtttatggtaatttgcaaggattagaaaaacgtaacactttcaagacttaaagggttgtttactcaagatatatataacaatttcctctccatagcttagatttagtgttggtaattattttgtctttaagattacaaaaactttgtttcagaatgaagtctttatttgcacattccagaatggcttattgaaaatcaagtataggcacaaattaatgaaatacatattactggatgtattataaacatatcaatattttctattttctctcttatggtctgtttctgttcacagcatgtttgcaagactacacagatgatttggggacattcacttctccaaacttccccaataattatcccaacaactgggaatgcatttatcggatcacagtgagaactggccaactgattgcagtgcacttcacaaacttctccttggaggaagccattggaaactattatacagattttctggaaatcaggtcagcacttttatttatttcattataatcttttcattatttattctcattaataatctttcctaggaagattaaggaaaaaaatatggaaattctctgcaaagctccctgctgtgcactttcttgcaagaaataaagtttgtcatttggagcctgacttaggagaaatacaggaattgcataagattctgtggttattttgaagtgattattttattggaaatacttgaaaataaactccagattttatgtgggcaaagaaacagatgtgctactactctgaaatgatgtaacttgctactgttgaatacctactttaattatgtaaaatcgatgtaaattttaggctgtttgctgttcatttaatctaattatattataaaatgatggcaggatagcaatcttaaagttttcacaaagttttcatgttcaggtaataaaagtctaggcttgtgaatttcagtacaaggcattattctttcattatcatcattttgaaagaatgtgtttaaaaagttatatttgcagtaaaagtaagttagcttatatgttactatctctccatgccactactttgagttaaattaggctaatcattctggtgggcatctatatcaaatgttttatttgggattttaaatctggaatcttatgtattataaatgttattctataatataaagtaaggtattaaaataataaatcataattggaccctatcgtgctaaaatgacataattttcttaatttacagcagttactcactggactttgatgttgaataaatcccttttttgttgtttgtttcaaaaagctacagattataaactagaattaaggccccagaagtttttaggaaaatgctatttccaraattttgctaagtatatcaaatatgatatattacatttcaaaaatttccawatcagaaggaaaacgttgaaagattctctgtaaaatacagcagtatgtttatatagttaatagtatagtttctttatcgtgttttctctgacacatttgccagaggctttattcgaaagggtgaagattaaacatattctctcagtttgtgattggttatataaaacaccataccagctatgaatgwtggttattctttgttaagtcattcaaataygatttttaaaaatttaaaagtgaaaatcgtgttttttagagtaagtgtagtgtttgagagaaattacttcatccaataaactgctaatgtttgcaatcccaaagttcaaattatgttaaatgtttatacagtaatattgtcagtaacccaataaattttaatttctgtattctgccagagatggaggctatgaaaaatcaccattgctgggaatattctatggctcaaatctacccccaacaatcatctctcatagtaacaaactrtggttaaaatttaagagtgaccaaatagacacaaggtctggattctcagcttactgggatgggtcatcaacaggtaaatagcaaagagctgtcttttactggagaagccaatctgattggtttcttgattctgggattgtcatgctctgtccctcacttgtccatgtttgcccagctgtatttaaacttcaatattgcaaataattttaaattaacagcagccatttctttttaacagacaaagggagaaagttctagtttctttttatcaataaataagaatcctggttagaataaggaaattgcattaatggaaattggggctgggtgctgtggctcactcctgtactcacaaacactttgggaggccgaggcagggggatcacctgaggtcaggagtttgaaaccagcctggccaacatagtctctactaaacatagtctctactggccaaccccgtctctactaaaaatacaaaaattagctggacgtggtggcaggtgcctataatctcagctactagggaggctgaggcaggagaatcgcttgaacctaggaggtggaaattgcagtgagtcaagatcatgccgttgcattccagcctgagtgacccagtgagactccatctcaaaaaaaaaaaaaaaaatagaaaaaaataaaaattggatttttaggctataactactctttcatgatgccattttgctgtgcaatttgatttaaaggatagtagaatggcaccagtttaatgcagacaaaaagattcaatttccccagaaggaaaggggtgtgtgtcattccacttctttctcctgtaggttgcgggggtaatctcaccacttcaagcggyacgttcatatctcccaactacccgatgccctattaccacagctctgaatgctactggtggttgaaatctagccacggcagcgcatttgaactggaattcaaagactttcacttggagcatcatccaaactgcactttagattacctggctgtatgtataatgtttccatcatattgttccctgctcccatctcacccaacgcacaatgcacttatttttattttcgagattcaggaaaggggagcatctaaaccgaacatccatataaaaattcaaacaaaataaaaacataaaagaaatttggtgaaagtgaccatcttcgaagtactcaatggctcgatacactaagtatttaaaatatattgatagactattaagatatggtgaaaatctcctgaaagggattacaggatttattataatcattatttatgtttttccacatatgcattgaaaaatcacaatttagaagacagttttggcgaagtagagaagataatatgagtcattccactaggayttttcacagtacagcaattcaccattgttcatttgttaaaaatctaaataaaaatgtattgaagtgtcatgaatcataaactatggaatcaaaaaacaaggaggacagttgacatcagctgtggcattacaatatgtattgggctttcattttcaatattcagccttcagtgtaagctcacacgcttattactgctgcacatgtccacagcttaattgcctgagtttatggcctgagtttataaatacctaaatataatttwtaaggttattttatttcatggctattcttttgtgatgtcatatatataacaaaaaatatatatttattatatataaagatatatttattttatatatatttatgtttacatataaatatttaatacatatataaatatatgtatttaatgcaaatataaacatatgtgttgaatacatatataaaaatatatgtattaaataaatttattttataaatatattatatataatgaatatttataatattttatatataattacatatatttatttataatatatatacataataaatatatatattttttcttcctcacttcttctggattatagtcctttacataatgtttatagtctcaaccatctaacattcaaaatattttcttaaaggtatatgatggcccaagtagcaactctcatctgctaactcagctttgtggggatgagaaaccccctcttattcgttctagtggagacagcatgtttataaaactgaggacagatgaaggtcagcaaggacgtggcttcaaggctgaataccggcagagtaagtgtgaataccggcagagtaagtgtgtatactggcagagtaagtgtgaataccagcagagtaagtgtgaatactggcagagtaagtatgtatactcgctgttcagtgcctagagtgggccttcaaattcttgaaacaaactgaaataagtgtaacgcattggtgtgagcaattgaacttcatcttagtttcttctgtgaatcgtttaactccatttgagggagaaataygtattaaatttaatctcatataactaaaacatctggcaaactatagaaacttagaagagtatttaatatgctgagagagttgcaattcagtgaaagatcagtgtaccagactaatgactaatagcttttcatttgcctcacacattgcaatcttgcagtgtacattatattattccaatgtacatagtattctatcacactagtctctaccttaaaaagtaccttaattttattagggaaagctgtggtccatgtgagtcatgcatggaataagcatgttctttacagtagaaaaatctggccattgtacagatgccattttaaatctacttttcccagatagcaacatgatggaattaaaggaacactgagcaaaatgtcaaggggcctggggtttgttctggctcctaacccttgagaaagtcacttttctttgtggtcccatggtttcttcttttagaaaaggagattaaattagatggtctctaaacctgccttctagctctagaattaaatgctttttgaagttagttccaaaatggacattcaagaaaacaatattttcttgaatttgttatttgatagagacttttactttatcaaagtaaagtctaggttttggaaacataattctactgaatcaaaatttatccataattttacacaattatcttttcccacagaatcaaaatttatccataattttatgtaattatctgaaagtggaattaaaagtcacaaaattattaactgtatacacaatatcccttgaattaactgaaagagtaataacatttaaccttgattatgtatgaattttaagattcacattgatttatatctggggattaggctgaatcctagatagttttgaatattaagttttaatatatagctttgttcttcagaaatgtatcactagtacataaaaaggtctcctaagttctatcagagatacatctgttttactatgtaatcatttatctaattttattactgctgtgctaatctatttctggttataatcagattgtttaagggtttcttttttttcttttcatttctgagatatttttctgtcataatttcagaatcctgaaagtgtaaatgagtgcacataagaggcaaaatcagagcaaactagtgagattatctgtaaaatttgccatgggaaattggagatttacaaatagtataaggtctgagtgctgagagtggcccatgtggtttactggaatgtattttcctgggccctgtgttgcccctagtcatcgaggcacgtgatgcctatctgcctaataggtgtaccttctcacagtcttctaaaacaataagattattctttaaaaatcctttatggacaaaactgtgacctaaagattttcaaacagaatgggtttaagtattctccctgctccaacaaagcaatattttgaagcgccacaaatgtacacttttttaaaccaaagttataaatggtgttctacccaccttcagaaagcatatcgtagtaggaatacatctatgaatcacactttcagagacagctcattccatataatgtttatttcccgttctcttttattgcacatcatagagataatatattccttgtttaagtcattaggattggctgaactgggcacccaggattagacatacttagaggtatctggtttggttttgttgaaaactcagctcaagaaaatgccaccattggattgaagactttttttctgtaatttcacattttcctttcttctttaaatcctttctactctgtctattcgcttggtacttcctgatgactaactagagggagaacggagcctttactgtgaatttcatgcagacttttgaatgttcaacaaagccatgttgttactggtttttagcattcccataggattttgggtttttaaactgttgaatttaaaagtcagaatttctgtcccttccacgtgttaacattaaaaaaacagcagcacagaacgtcgaatgcgcttctctaacaaacaaatcagactgatccctgaatataaccaagttattctgctctccacaaattcaagggaatttgatgcctattttaacatgactatttaattttcatgactctttagtttgaattcacttcagtattatttcacatttcttctaaatggaaatcctttcactatgaaaatactgcaccaaatatatatgtgtgtgtgtctctgtgtgtgtatatatacacacacatatatacacatcatatatgtgtgtgtgtacatacacagatgatttttatttwttttttttaaaggaaaatctcatcttggagcacttatgaagtatataatagtggttcttaacagtcatttctttttccagcatgtgagaatgtggtaatagtcaatcaaacctatggcatcttagagagtatagggtatcygaatccttattctgaaaatcagcattgcaactggaccatccgggcaacaacaggcaacactgtgaactacacatttttagcatttgacttggaacatcacataaactgctccacagattatttagaggtatgtattataaagcttgattgatcactgctttttcagatcaagggagatgtgtcaagttagaatccatcatgctttttagaataaaatccctaactctgccccacgcatctataacacaccaaccacccatggtatttgaacaggtatatttcatatttaatgtattaaattgtgaatacagagaactatctatgtttttaggtttcagtgtaacttctggactcattgrcctcatattacttaacttacatggaaggagagtaataacctctattttttgttggttgtttttatgtttgttctctgtgtataagagatcagaaaatgtttgggtatcttggatttatttaagatgtcatttttctagtatgaggtatcatggttttaattgttgtttttatttttaaatgtaagttcatttcagtatatttttatttttgtaaaattgaagtttcaattgttataatcatgaccactagtaacatttattcaactgtctgtatgcaayttcaggcaataaatcttgcttaaatattaggcaaccttgaatataaggtaatatgttatttttgcaataagaaattttaacttaaaaagctttttgataacttgcatatgtaacttttagggctacaaattgggaggttattttggcatctacgtttcatcatcagtaaaataactttttgagtcatctaaggcattatctttatttctgtctatattgttaatatataatacttcaaaaaatccacatataatgttttcactagataccctttctgaagtgataagtacttgctctgataacaggacattttttttcccacctgccctcctacctgcagcctagtgacttaaggtagttgtttttaaggtggtcagtgatttttagaagtcttacttacaaagacttcaacatccattgctggcaactctggggtcatattcccaggaaaaaatatgttattcttgtaaaatgttcttaattgtgtttttacaagttgtataggaaaactagcattggttgaggttggttgaggttaacatatattttccaaatagcacttttgtttatgaaaacaaagagtgacaacaaagcattctgcactttgagagactctgtgaggtcctaactataaggagattcccttgtttttcagagataattttttgggaaaaaattttgccttatatttacaaaagtacaatattacagaaatattagccatagtgtttacccattagaaagttttgtttaccagtattctaagaaaatatgacacaacatgaaacaaacttacaagcacgtacttggcaatggttttaaagtccaccttccttgacctggagttcaactggtcttcacaagcttaatgataccaggatggtatcattaagatactactagaataggcatccatttcttcacatggtgagaccttgtttgtgttttagaaaaagcagaaaagttgctttcaaagccctttgtttataccgtgaacacagcagttggtcatacctccttttaccagttaggactattctgattcccactggactgtgggcttctcgaaggtctgtgctgtctcctactaactttgtaacccaggcacttattatacaggtgggacattacaggagttcagtaagttcaagttgaattgaatatcacagccatattttagtatcagtctaatgataactactaatgaatgagaaagattgaattccaaactggcgtttttgtacgacctcctacacacgcagtgcaatcctacaaattggagcacaaaccaaaataggactcatgatcttgccgagcgttgcacgtataacagtgtgctgggcaccataatcgtgatttggtaaagcrtaatggagaaagctacagaaaggaggatgcttttgaattgggctttaaaggaggctttggcagaaagagggggggaggaaagagatgaaacatttccaggacctgaactccatttctttcgactcatttgaggatgaaatggcaacaaaaaggtgtttaaaaactcaaattaaaaaatgcttgttccagcaactgcagagtagctcattagasccccttatggatgacgtgtctgtcatgttatggtcatgccatttctcttgtgcaacattgacggtgaaagagcaaaaatacaaaatgagaaccagaagttcagaaaggccttccaaaaaaacggcgctgttgccagagggaggagattgttttccatctctgtgagccaagaggccagaccagagcaatagctgcaatagctggtctatgatggaaattttaacacacaaacaaccatttacagagagaaaactcacacacacagaaatctagcttccattattttaatcgcttctgggttttttcaactgacttccccaaatcccaactggatgcctgttactagagccagaatttagttattctgaattaataaaatggaaactacaaaaagacttaattacgtgctggtcagacactatcccgccttgatgagaggaatgggtttgaaaagatcccattggaaaccaaatgcatcctttattatttcaccctctgggcaaaacaaaatatttcagatctggaaataaaatatacagtgggagaagggaccatttgcttaaaggagtgagaccatttgcccgtgcaaacatggggaatcaacctgaagagttctggctgtattttacaacttgatttcagtcttccatttttattttgagtctgagtctccatgcagaaaaggagatttcaaacgagtgattgaatatagaaatggaaatgatagatttgggagaaatcaacatggagatgtataggaagcccagggtatttgttaagtcaacagggagcatgtgtgtagtgagaagaggaagtaggaacactaagaggtgattgtggctgggcacggtggctcaggcctataatctcagctactcaggaggctgaggcaggagaatcactagaacccgggaggcggagtttgcagtgagctgggatcgcaccattgcattccagcctgggtgacgaagtgagaccctgtctaaaaaaaaaaaaaaaggtgactgtgtcatgggagccaagggaagagcagtcgagagaggttgtggttcagaagggtcccttggagatcaatgtgactctggtcagagcagtgtttgtggggcgagagcaggaaccagacagtgtaaagaggtacaaagaggagagtgagtgtagactgaagtctaggtccctgaattctgaggctstctgtaacaaaccagagtaagtgatggcttcttttctccaatccttatccttcatttccctaactggtcctcatctagttcacgtgtgtgggacacactcctttgcatgttctcttgtatgtcagtgcctctttaaatgtggccccagaattggatgcaacagttcaactaaacctggctaggcccaagtaggttggaaccgtattatccagttcatatatttctggtggtctatgctgaagttaaatggggtttattgtagctaagtcatgatattggcctatatcaagatttataatctccatatcacttttacatgaattattatgaatttatgattatatgatttttaagaatctaaacagagatatttttcctaataaatcagatttgattttgtctgagaatcccaacacatcatgacctccctaaatcttcattcattgcttttcagagcattattcatttgcatacagactcattggccactgacctagtacttcttcaaaaataattgataaaaatgtcaaacaagattgcatctatttcaaatactcttaaatgataagttcttttggttaaaattgatctattattaagtgcttttggaatagcactattcaaactactaggtaataaaagctaatatttattcagcatgtattatttgccaggtaattctcacagcaaccctgtattataagaaatattatccccattcgttaggtgagaaaagtgaggcagatataggttgttcatattcagaaagattataagtgtcaaggccggctttctagcaggcactgtaactccacaccgatgctctcagccataacaccacataccccgggagcactctcacagtgtcctgtcaccctcacagggatcatggggaagtgttcctgctkcccccaagtctaccattctattgacactgccgcaaagagaaatcaatgttttgcatgactccatagataagcaggtgccatttattataatcacctctttctttgcttcatgttgacaaattatttttagtgtctaatttagaatttttccaaaaattactgttaatcttactgatctacgagattctagaatgaatctttccccatcttggaagctggaacgttttcccttcagccccctggcagccctgctggttctccttgtctgggctcrcactcttggtggtggcaccgaaacacaatctgagccacatgaagaggacaggcgcatgtgacaggctggttactttgagaaggctcacacctccccacacacaggagaggctgagaagcctggagaaggtgggaagccaagagagtgaggcagattctccactcccacttcctaaggctctgctcctgctccctgactgttcccatccattcccatccctctccccaaaggcttcctctgagtttcagcaacctcggaattttagcttcaacaacatgaccaccccagccttgaccctacaggatcatttacctcaagtgcttgcatacaaccagactttcccttggtgacaaatccccagcacagggagctcatgtgtttgagctcgacagcaaatgcatgggtctagcctgcctatggacgatactcattagggcagtgtagccaagccctctagccggtgatgttcacagattatgttctgggcagaagcagaacttgtgagcaggggcatagattccgctggaatgctaaaactttttttttttaatttaactttcaagttcagggtatgtgcactaccctgatagtagtacacataccctgaacttatttattatgtaggtaaacttgtgtcatgggtgtttgttgcacagatcatttcatcacctaggtattaagcctagttctcattatttttttggatcctctccctcctcccaccctccaccctcaggtaggccccagtgcctgctgtttccctgtcctgtgtccatgtgttctcagcacttagctcccacatataagtgagaacatgcagyacttggttttctgtttcctgcattagtttgctgaggaaaatggcctccagctccattcacattcttgcaaaggacctgatcttgctcttttttatggctgcgttgaaaacattaaccatgaactatgcacccatgaattcaccaagattacaaaatcagctctgtaatcactatacctttcagtgctgtggcatataattcccttaagcctggaaaagttcattgaaaagagttgactcttttatcttctaaactggaattccatgtctcttcttccagtttcaaaatcaaactaggcatgtttctacctcctcttcattgacatcacactctcttctgaaagcatccatgccatccttgtttccctctttcatttgccctagtcacagccttaaaattagacattttttctaatgttcaacaatatttttctgtgccatttcccaaagtttagctagttcgtatgtgtacccataaaatggtcagaaagttccatggagcctcttggatttctgcttagattgatttctttagagggttctccttttttgcmccccccaaaattattcctgattttgtagtgagaatttagtttttcagaatttgccaattttctagaatgttctttcctttttcaattgcgttttcatttgtttttttttttttttatccataggtttatatcttgttttgaagtttgaatccccaaaaccttagtccggttaagtggtcagccatcacaggctctaagttaaggcaaggtgatcactgtctcctattgtcttggtgacttccatattaacaaccacttctttgctagccagaattagtccagagttgcacttctcttcactgtctcctttatatgaagagagcatataaagaattcaacaaatgctacattttttgggggaacaagacatctcatgggtgtccagattgttgaaacagtctccccgtcgccactcctgtagatctcttttggtacattagtgtttatagatttcctttacaaaagattgcagtctctactgaaaagaagctgaggtgggaggataaagtccttataactggctaccaaatctggctgcattccagaatcatctggggatcttgttagaaaaatttattcctagtcctcatcccagacttaaccaaatccttgaggattccccaagagcaagctttgcacaagcccctggtccagcacttgagaccactgttcatagcccacttccaccaagatagcctgttttatcctcacttcaatgctctctcctggggagggaaaagtatcttaataggcatcttgttaacatacatttgcctgctattaaatgttactttccagtgaggacttactcttccattgctatggctgagttatgtattttatctcaccaaggcctggtcatacagttgatattatgtttacctcattatattaaaaatgtcagattcactttacagtttttgtattctgattctaaactttctcccccttttccttatcgggcaccttgaccactatcatcttccattaaatcatttccttattccttccccttttccactaaagtccatttcaagtcctcgtgatagtgtgggggacttcartcaaaggcatttccctccagtctttataacatgcatttcatctcttgccaaatccttgctgatgtcatcctgttcaccccagatgcttatatcacagtttgttgcactcccgtatcctcctttcagttgcaaaataatgcattccaagaggaagaatggataaaaaacatcaccagtatccctgaatcttgcagtgtcacatccatattctccatgtctacagcctaaacaacattttccatataccacgactgagaaacatcgggctcatgggatattgtcaatacttaaagtgatgctagctgttatggagaactcatacattctcagttgcttactgcaacacaggttatttctaatcacatcagagtaaaaggcaggtgttcctggcttccatgtggtagttcatgaaaccaaaggaaggggaagtcaatttgcagaagccacataactgtctctgccacaaatgttggtagatgtttcacaaatagagacctatattctaataaatctgcgatatgccaaattaaaacacaattaagcagggtttgttgttttgttttgcgtttgctgtggtatttcctcaggctgtcactatcctaaatatgcattcttcattcctttatccatgtatccagtcagtaggatatattttagacacttaggctatggacatgtgactgttttagcatcagttttccttgtcatgatggaggaaacacaccttaatcaatttatcacacaataaaaatttaaccacaggcagcgttaagtgctgggagggacaattatagtgcacccagaaggcatgagatgggaactgagctcctttgtgggtcaggaaaggcctccctgaggatgaataacacaccaggtgccaggaggcttgagatgtgagggactggaaggagagcagtgtgaggctctcaggtggacagggacctggcctgcagagcagggtgggcacattaagagtttcagagacctcctggagagcagcaggaggtctttcaaggatgtggtcagatctgcacttttaaaacaatcactctggctaccagaataaactggagggaggtaagagtaacggtggagacccagtaaggggattgctataggccaagggagagagaactccaggtcttcaccattgctggggaggaagcatgagatcgaatgatttcagagcacttaggaggtacaattgacagagatggataacaacaggatgaaggaaagggagacatcagaatatagcctgatagatagaactggacgcagggaaaaccaccaggggagattagtcccaaagagattatccttgcccagaagtctgattaatgaacatctattggacatttgtattccatagaacattctgaggaaaacattattctagagatattttccaagtttatttcattttcccctcatacaaacaagcaaactttgaagttcatgaggcattagagagttattcgcatctcagatgttattttgagaattacagtaatatttgtcattaatggaatgcccatcatgtgctagacastactaccaatactttgatagatataattgtctgtcctcatagtagtccagtaactgagtataagtatgctcacaggagaacagggattgagatggggaaccatactcagtgcaggaagtgtcatcactacatgaagtgatgaaactacgttcacactcagtgctgcacgaatacagtgtgggctctggagtccacctggctccaaagctctttaccagctgtgatcttgggcaaggaatttaacgtctggctgctttggttctctcgtgtgtaaaatgaagataataatccacacacctggaaaatattgagtcctcaggaaatgcttattactcccctccacgccccttctggagagagcccagctcctgcctggtcattcagcttcttcctgggacacttcaggaaatggtttctcacccttacaccagctgacctccatctcttgcaaatgccatctccattccttgtgccctgccagttaggagcagtggctcctccctggcgaggtctatcttcctctccaggcagagttcacattttgttttctttctcttccgagttccctaactcgatccatggacttctccataagggctttgctttctctctgtgctctccgaatctgtttaaaggcaaatttcttctgtccttggaaagaccttgcatccgctctartaagygaagcgtaaatcagtgtttgtgtttgcagtgcacgtcactgctggtcacatgatggcataacagattccaaacaggtgccaaggatgattcttcaatttccaaattgcttggtttaaaggtaaacgccagtctttagctccctattgaaaacagctccaggcactgtgctttctattgttctagaggggagtcactggaattagaactgcctcagccagcactcttctatctggtgactaccatgggatgctaatgacaaagatgtagtaagtcctctagcactcgttcgcaagagaatgtcttctaggcacccagacatatgatagaatgtgctaaattggtagtctctgtacctgcttcagagtgaagcaggtaacttcagaatgaagtttaaacccaaactccactacttagtagctaggtgaccttgggcaagttccttagtgtctatgtgcctcactttccctttctgtaaaacggagtaataagagtcaatgaatccatatatgtaaagagccaaaacaaggtctggcaaatagagaacaaatctataaatgttcactgttattatttgcactgatgctgatgtaagagaaacatctcagtaaggtatagagaaattcacaaatagagagccttcaattctttaggttgagatataattaatgattcatttctcaagacatttaattttcctyttgttttctgcctgcagcctgcatggttaatgcattttgacacttctcactaaggataaaygacaaatgataaaaccaacaatttttgtccacttattttactcaaagctccgttaagaaaaataatgaaaaaaattttaatttcagtgactaacaggagtgttcgtattgtccctatcattttaaaaattgttttggttactctctattattacagagaataaagactttctgtatcctggagtttaacaactcttattttattttattttatttttgagacagagtcttactctgtcgcccgggctggagtgcagtggcgtaatcttggctcactgcaacctgtgcctcccgggttccaatgattctcctgcctcagcctcccgagtagctggggccacaggcacccaccaccacacctggctaatttttgtatttttagtagaaatggggtttcaccatgttggtcaggctggtctcgaactgccgacctcaggtgatccacacacctcggcttcccaaagtgcagggattacaggcatgagccaccacgcccgaccaacaatgcttattcttaagaaaagaactgccacagaaggaaataggaaaaattcttcttcagtagttgatgcctttcaaaatattaaattactaaacctctacctacctcagtttccagaactctaaaatgaagataacaatactacctgcattacagagctgctaggatttttaaattagaataatgaccagcatggaataagtgctaatacatattatctatggttattttaacataaacatagtctcatggattatttttttgtgctctgaagcaggagaccccaatctttttggcaccagggactgtttttgtggaagacagtttttccacggaccgggggtggggtgggagggtggtttcaggatgattcaagtgcattgtatttattgtgcattttatttccattagtcttacattgtaatatatagtgaaataattatacaagtcaccatcatgtagaatcagtgggagccctgagcttggtttcctgcattagacagtaccactggggggtgatgggaaacaatgacagattatcaggcattcgattctcataaggagcacgcaacctagatccctcgcgtgtgcagttcacaatagggttcatgctcctatgagagtttgatgccaccagtactggtctggggactggggctcttgctctgtagcattttgtggtaaataaatctgtggtttccagagcagccttcccagttgtaattaacatcaattggccccactgtgttgaaagcagtgctgcttctcctgcctcccagttttcctacaaaagccactgggattgtagataaaatcctgttttccagttggcgagatgcagagaagcagatgagattttgtctgagcagcggtggatctgagccgactttgattatggctccaccgccaacgcttcctgggcagatgagtcatgcttcctggaactgtctgtcagaggaagtttgcttctgggacttttgcattttgcttagagcttagagataagctattacaattctaagttcagctgctattcaaaaacatgcataaaagctgggaagagtttaccaaacatttcaatttataacttgataccagatatgagtctagcaccgtactaagcatgatacctggattcaaaaaaagtttagaatgaagtatatccattagttagcgaagccagatgctttgtagtgtcgttgagtttagcatgaggcattttagaagaaattttggttttaagattgcctgagtaaaatgtgattttttagttataaaaaattgaaagaagaaatgttatttcagtgtgatcagaatccctttccttaaaaagaaatgctgatcttttctgaccatctttcacaatgaaggattttcgtatgattgcattaatttgcagcagttaatgaaccaacgttccaaccttcaaaagagcctctgctctcagattcaaragaaactctgcgtgtttcctctcttcaaacatgaaggacagaattaggatgaataataatcaaacctaaaataatttctgaactaccctgaagcagtaaaaattccattagatgctcagaacttgaattgtcctatgcacactgcctttcctggttgacctcaggttgctctgctcctcagactggcgaaaggcagggcaaccgaaaggtctcttccactatcagacaggctcatggtatgaataagcatgcattgagcaaaatgctaaattttaaacactggtaatcacagttgtgggtttcagttaactatattgactttctactttttaaaatgggaaagatttccaattgcaacattacagaattttgtttaaacacgtctttaccctgcagttcctacattggctctttatttatttatttattattttttctttctttctttctttttttttttgagacagagtctcactctgttgcccaggcttgagtgcagtgttgcattctcagttcactgcaacctccgcctcccagattcaagtcattctcctccctcagcctcctgagtagctgggattacatgcgcccaccaccacgcctggcgaatttttgtatttttagtagagacagggtttcgccttgatggccagtgtggtctcgggctcctggcctcacgtgatccacccacttcggcctcccaaagtgctgggattacaggcgtgaaccatcgcacccggcaggctctttatttaatagactttcttttcctgatctcactgtcttcagggagagcccggatggcagtcctctggcttcttccagctcaaaggtctatgatttcacgttgttctatgaaccaggttcttctctgttcctgagaccatctgcagcaggtggtgagaattttaagaggcwtaataataataataataataataataataataataaatgtttagtgttttactgtagcaggataattggcagagggaaggctgaggtttatggaattaaattttcatgtatacacaggagagtatgcttagctttcaaagcatttcacttaccactagggagggatttaggagcccttgctccatcagtgactatcgaaacatatgtttacatgaaaccgtcagtccctgaacatctgaagacattattatttttaaaatttttaatttttgtgggtaattaataggtgtatatattatggggtacatggtgtgttttgatacaggcgtgcaatgtgtgatagtcacatcatgggaataaagaaataattttttgtaaataattagcctaattaataataaaaatctagttatgataaaaggaagcattataggcaaaatatgattttaaattaatgctggagcagattaccttacatggtaacatttcagtggattaatttttacatatmaccttgagatacttaagaaaagattatggagatagacaatttaatatttttagtaggccaggtgtttatttgacagtctaaaagggtatgaaattctgagattggagaagcattactaatgcatatctctactgccatgtcaataggtccccaaagatattgctttaaaaataaatttatcagatcacaaaggaatttatagtcattataggaaattgggaaaatgtagaaaaagctagattaaaaaatcctaaattatatcattattactaatatttggtggtattgatttcctgtcatcgctccttgtatatttattttattttaatattcgaaggagattattcagtacatactaacccataatgacttttttcacctaacaatagcttgtgactatttccccatgttatttattatgtcattttcaacattgctcatcccatcatcacaatacagccaccaattcctgttgtgaaacacttagaatcttttcaaatcttcaccattagaaacagttctgagataagtatctttgtagttaaatgttttcccacacccatgattggacaatgatttaaaaaataaaaagactcaaattgtggcttctaataggagtaatatatagaaagcagaataaaaatgtaaattctagtaagagcagacagcaactagccaccacatagaaaggaaacgctggtttttatatgagacagacctgtaactcagggtgacaccaagtaactcaaaatgtggtatttcgatgggttttttgctctcatgcaaagcccaacattatgagtaattgttacttttagatgatatttcatatttcctgccccaccctgtcagcacatggcaaggcggctttttctgtgcctatgtcagggagcatgctatgagtggccatgtgccttatggaggggacttagcctcccaagggccatcttggagtcggctgggatcaaccatgctctgcttatcagccttcctctacatttgcctcatttatccaccatgatttgattttgcatttgcccccttgggctttgcttatccacaatggaagcgctgtatctcctctgtgattcttattatttatttatttatttttttttttgagagaatcttgctctgtttcccaggctggagtgcagtggtgcgatctcggctcactgcaagctccacctcctggggttcaagtgattctcctgcctcagtcttccaagtagctgggactacaggcgtacgccaccacacccggctaattttttatatttttagtagagacagggttttgccatgttgcccaggctggtcttgaactcctggcctcaagtgatcacccgcttcggcttccctaagggctgggattacaggcgtgagccaccacaaccagcctctgtgattcttgctttgcaatttctactgttgttacaggaacatttcaaagcccttcaaatttaaagtaacctraacttggataaagttccaagtttttccaggagatgtgagtgcaaacctcagcaacaacatttttaacaatcaccctaatgaggcctctscacagatcctgctgtggtggttgtttggggtggggaacatctgagcagatgccctgagaattccctaggtcccatccttctggatctccagtgattcagcagcaggaactacagggctgggtaggacccaaaggggaagggaggctgcaacaggaagagatgctgctcacttttagcatgagagccactttgcttgccagtggactctatccacctcaccgtggcagccttaacagcctctggtttcctaactctctttgctgctgtcccctgcatgatctgtcctcccgcaatcccttccacacacacagcatgcttatctccaccccacacaggatgattcgccttggtttctgcatggctgtccgggatgcctcagtctccacaatgcccaagttgtcatagcaacacactgcgaggattggcctccacctcctcactgaattcatcacttccccatctgccctaccagtgacgatttctgtgaactcttttatgtgagtcagctcctgttctctaatccccaacatctttcttttctcatagctattttgggtggtttctctggaaaaaaatgttgattccctttgcctctgacaaagagttagagtaacaatttgagcacattccacatgccaggcctcatagcaaaccttttacgtggtttatctcatttgctgttggcaacaatattatgagataagtaccattatggtgccagatttatagataaagacattttagcttgaagaagttcaataattttcacaaaattgtgttctctaaattttagagctgggctatgaacacagagcctggctctggccacattgacattagtcaagtacattctacaataaaattgctttcctgcttgtgattgaaatataatcttctattagtgacactcacttcaaaatgccactctataaactgattgagtatagttctcaaaaattgaacgatcatcttttcattgagtagaatttttattctatagaaagaataggggattctctactacacccaaaatttctcctcacagcagatgaattatttcaattacatattaagctctaaagaatagaggttttatggaatttgcaaagatttataattggaaatggaccaaattattctccagaagtttctccatgttttaatgatatcatcctaaagaaactcttgagttgctttttctacatgaactatatttaattaattcttaaaattgatctcctataaaaaagaattttcttccagaagaccttccaggaaataaaagaaacaacatttacaaacagtatgaattagatgtcaatctaaaacagaaagggctgagttttaattgtcactcactgtgattctaaaatgagtttggggctgggcatggtggctcgcacttgtaatctcagctctttgggaagccgaggtgggcagattgcttgagcccaggagttcgagaccagcctgggcaacatggcgaaactctgtctctacaaaaaatacaaaaaaagtagctgggcatggtactgcatgcctgtagtttcagccatcaggaggcttaggcaggaggattgcttgagcctgggagggtgaggctacagttaaccttattgcaccactgcactccagcctgtgcaacagagcaagatcctgtctcaaacaaacaaaaaaatagttaagaaaaaaagttaatctctacatcccaagctcatatatataagataattacttgtaattttaatttattacagttttaaatttttagccatgaaacaatttagcaagcaaggcacttgaaagacatatttttgttcttggagatcctgcagttcataaagttgatttctactgaggggacaggtggggtgtctgggtctctgctcacttagaacttgactttcagtgactcctaagtaccctcaatcttacaaaaaaattggatctctatcagtgattgaccacacgtggtgtctttagtgttatatcctcccctttgttatgggtccttcctatttagaagtccacggatcacttcctattgcaactggagtctgaattcactaatggtattgtaaagtatgtgccaaattatcaaacccgcacaaaggaagtagaaactggtaagtatggctaaggcaagagatttccttcctctctgagtgtgtcaagaggagttgagatatttgggggtagggtgggggtggggggacctaagccackaaaatcctaaatgaataatctctttaagagaataacaaaagatttcacagaggaaggttttgtaatatacacatctccgcatctgaagatatatttaatggccaatttgaaaatgtaagcattattttagtaatttagaaaaatacccctaaacacagttatagaaattagatctgcatattcaaggtgagaatcgcaatctttcttagtttttactagtttcctttctgtaactcaattagaacttcaagtattgttcactctgagtagatcttcaggctctctaaaagcagggccactccagcttgcttgtcagtagttgcaatgagtcacagctggaacgtcctgtggttaacattctgctctgaaaacagaatcagaatcagtgagacggctttccatggtaacctgtatttgtatactttgaaaaatgactgttcctttttgtgtggttttgggtggtcaatttgcgcgggaatgaattgtagaggtgacgttacccatctgtgtgaatataaacaaaaaacctgattttattaacggcaaactttaaaaaacgaggtatgagtttttttttttttccttttcgagacattgttctacacatttattactagattggacattatatttaagcattttcataaatgtctatttgatgcttattttaatgcataattttctccccccaaaggcaaaaagaaactaattgtcattcatcagtgttgccccccaaacctactgcctagcccctccacccccacccagtacttttacaatgtgttattaaagaccactgaacagctgagatccaggggtctccttcaatgcgtaatcccatccagaaggaaggaaaaaaaagaaatctctttaagtcacgtgaaaatgccacrtttcttaatcttgcagagctgacaggcaaaaatgctatgctgttcatgaccttgtgcaggattgaaatataattycgcaacatgctgcgacctagtattccgtaagacacatcgagcttagggtgattatagttatggagaaatcttacctatgttttgttggataagggttatgatgacttagcctgggctcagaggcctgacagaaatgaaataatttatgctttggtcactaaattacaatccaaaggttaagatttggggagtgaaagatggtagagcatttgcttgctaattactccactacttgggagcagtatgtttgtttctgtgctaattagtttagaactgtacttcatgccctagaattaagaaaaactctaaagctgagatgaatctcctgcagggaagcagggatttagaagcacaggctgcaaggttggcctctcgccctccggtttctccgcctgcakgagagggtgggactgaacgctaaggtgaaaagcttctgttccgtttcgtttccctcttcattttctgttgctttattcttctcttattctcccctattcattataggggaggcttctgataaatgtgtagaataytagaaacttgataataaatatacacattcaaagcagcagtamgaaaaacagaaaaaaaggaagctacagcagtaagcctgaaaaataaaactcatctttattcatttgcttaaaatgcttaggtttagtgctttggggtgaatgacataataggcttctgagcttgtctttttaaaaatatctgctgaccttccctgaaatctcacaagcacttatgatgagcagccgatttgagaactcagcgagacaggccaaggtttaaaaatctgcgatttatcataaccttaaacaaggccctcacctggttctcccttctacggagtggcacaaagggtccaaatcctttatggtctaagaggagcctgttgaaattgaggattgtatggcactactacctatctaactgtacagagtgcaaataatcgtgcagattgggtcctaagtaaaataaatacagctggcgggggaaatcactgcgttcattcattggagatgcatggggaacctgcctttatcaaagccctgctctgggcagtgaggggaaggccagaggtggtctgtgctttaaggcgactcacaatcagtaggggaggtaagacacacaagcccataacaagaatgcctggggatgtgatcatttccacaaaagaagcacagatgaaaagcaagggctttcaaaggcagactaatttatgcctgactgcagggattaggggyggctccatggaggtgctttgtaacatttggtggtaaagttctccacactcaaatcaatatgtttcaaacaatatttcatgtcataacattttttttcaatgaaaataatttgatcagtctggaattcattgaatccagattatacatttatgcacggacacgtgcaaacacacagacactcacacatactcttaagtagatgtactctccaagggcatcctcgaggaaatccatgagtccattaccaggtattttatgtttcgttgtcatgggcagcttatcccaagggtaactggaacaaagtgtttaaagggaacatgaaggcgattaggtgaaaatgtaatggccttagtcctgaggaagccagtcttgttggattgccattatctttctcaagtgaagagatatagtagagagatttttgtgttttttaatttttatttttcagtttggagatatacagctgataaaatcattaaatgaggtaggttaaggggacacaaccttgcaccctccatttctccttgaagatgtataaatacctcaatggaaaaatggacgaagacatcagtaaacaatttacaagagaagaaatctaaatgcccctaaacatgaaaaaaaaaatccttcaatgtcaaagtaattaaaataacacaagttaagacaattacaaaaaggcagtttttcactgtcagtactagtttaaaacatgatcrtcatcataattgacaaagctccactgaaagaaacacctctgttaactgcttgtgggaggataggttggtataaactttctggtaagaaatttaataatattttataaagagccatatgattatactgtttgttattccctttctaggaatcttttaaaagaaacatttgaagtatcaaacagctatttatatcagcaaaagattggaaatatcttaaatgaaacaacaatagaattataatataaatacattatatttgtggcattttacaccaaggtttacacaattaagtgatatgttcaatgaaaaacaagaaacacaattaaatacatagctcaaatgtataaacacatatatacacctgcacaaataggtatattacacatatatacaaatgaaaaaagtatcaagagaaatttttggatttaatgaaatattaacagtgtttgtctttagtcgaatcaatrtttgtattttcctttttcatatatttctaaaatgtctgattattttacaggtagcatttattttaaaaattacctcttgaagggatggctaccccattttctatgatgtgattattatacattgcatgcctgtgtcaaagtatctcatgtaccctataaatatatacacctactatgtacccataaacatttaaaaatatttttaaattatatcttacaattataatagctgctattcattgagcccccctatgtgttgttaatatgtgaatgcctactatttccgtattctgagcctgaattatactttggacttgctaggttgacataaaaccaaaagttactagttgggtttccaaatttattgggcttaggaatcagatccatctctaataccctctctatgcaatyatcaatttttaattcttatgttgagttctgtgtactcaacccacctcagcagatttacctctaacttttgaaccaaggaacagcttttgctacttgtgtagacttggatttttccatcccacaaaccatgtgtttttatatgggaaagtttctcttcaatttcagctctatgatggaccacggcagatgggacgctactgtggagtagacctgccccctccagggagtactacaagctccaagcttcaagtgctgctccttacagatggggttggccgccgtgagaaaggatttcagatgcagtggtttgtttacggtaagccaggtgctgatctcagttgtatttgcagttgctatttggccaagaattttttctttttcagttccaaacttagaaacaataccatgaacaaataatggaacccaggtagtaatctcatgcaagggtttaagaaatatacttagayattggtggaacttggagagttaagtctgttaggattaagagaggaagtgacatcaaagtggaaagaatttggttaattgtaggtgtagtaataaattgccttagataaagaaagaagcagaatgaagtttctagggatgaagagttgaacctgggtatagcaagctaactgcaagttggggtgggagtatctcaggtgcaatggaatagaatgagacttaaggctcaccttgacgttaagcagagaaagggtagggatagactagaaagaatgaaagtcagacagggatggggaaaaggaaggggtagggttggcctgagaggaggagaatttgagctgcgatgcacaaagccaggggcatgtgttgtacttgtcaaacaggaaggggcacatctggatcccacctacgaattggtggttcaggaagcaggtagggatcatcattcctctgaagatgaaaggtcttctttaacaagagatctgaaatgtcttcaaatctcaggtgggccaatctgcaagtggagagccccagagcagtggttcccaaaatgtggtccctagagagcagcgtcagcattacctggaacctgttagaaattcaaattcttgggccccatcccaggcctacagaatcacaaactttgaagtggagcccagtaatctgtgtcttaactggtctccctggtgattaaagtttggaaactactgagaggtgaagccggctgagcttctgggtcaggtggggacttggagaacttttctgtctagctaaaggtttgtaaatgcaccaatcagcgctctgtgtctagctaaaggtttgtaaatgcaccaatcagcactctgtaaaaacccaccaatcagcgctctgtgtctagctaaaggtttgtaaatgtaccaatcagcggtctgtaaaaacggaccaatcagtgctctgtaaaatgtatgaatcagtgctctgtaaaatggaccaatcagtgctctgtaaaatggaccaatcagcaggacgtgggcagggccaaataagggaataaaagctggccaccctagccagcagcggcaacccactcgggtccccttccacactgtggaagctttgttctttcactcttcacaatgaatcttgctgctgctcactctttgggtccacactaccttaatgagctgtagcactcactgcgaaggtctgcggcttcattcctgaagtcagcgagaccatgaacccaccggaaggaaaaaactgyggacgcatctgaacatctgaacaaacaaaatccggacacaccatctttaagaactataacactcaccacgagggtccgcagcttcattcttgaagtcagcgagaccaagaacccactggaaggaataaattccggacacattttggtgacccagatgggacaatcaccaagcggtgagtaccactggacccctttcgcttgctattctgtcctatttttccttagaatttgggggctatataccgggcacctsttggccagttaaaagtgactagcatggccgccagactaaagacacgggtgtcaggctttctgggaaacggctctctaacaacccccaactcttcggagttgggagcgttggttggcctggaaccagcttccrcttttcctgtacttctgggctgagctgagggttgacagagaggaaagccattcagctctggggtcccaacaacaagttggttggccctgcagccatgagtaaaactctcaaagtcatgtcacccaagcaagacttgcccatctatcctatctatcctgacccttgcctcctgggtcctaatgcctgtcagacaaatttcctctcgcctctcttctctgaggctagtccygcttctaaaaaccactccctgtctctgttgcttttctaggttctcctgtaagaatgatttctaatataaactccaggactctgttaccttctttaggcacctgggttcaccaatcagaaagacataatytttgcccaaagccccattgtagggggtactatctggaattttaggatccctcctcagacaagcaggcctatcaawagctattcctgaagctaggatatgggtagcatcagaaattgtatccttcctattcatataagtgaggacaaaaggcatcactcttccaactctggagatcccttcccttcctcaggatatggccctctgcttcatttttggggcataacacctttatacgatgcgggtaaggtcccagtactaacaagagaatgcttaggactctaacaggttttcaagaatgtgtcagtaagggccactaaatccaatttttcttggtcctccttgtggtctaggaggacaggcaagggtgcaggttttggagaatacattgataagggccactaaatctgaccttcctcagtcctccttgtggtctaggaggaaaactagtgtttctgctgctgcgttggtgagtgcaactattctgatcagcagggtccagggactgttgcgggttcttgggcagagggagaaacaaaacaaaccaaaagcacgggcagttttgtctttcagatgggaaacactcaggcatcaacaggctcacccttgaaatgtgtcctaagccattgggaccaatttgacccgcaaaccctgaaaaagaggtggctcatttttttctgcactatggcctggccccaatattctctctctgatggggataaatggccacctgagggaagtataaattacaatactatcctgcagcttggccttttctgtaagagggaaggcaaatggagtgaaataccttatgtccaagctttcttttcattgaaggtgaatacacaactatgcaaagcttgcaatttacatcccacaggaggacctttcagcttacccccatatcctagcctccctatagctccgctccctattaatgataagcctcctctaatctcccccacccagaaggaaataagcaaagaaatctccaagggaccacaaaaacccccgggatattggttatgtacccttcaagctgtaggggaaggagaatttggcccaacccaggtacatgtmcccttctccctctctgatttaaagcagatcaacgcagacctggggaagttttcagatgatcctgataggtacatagatgtcctacagggtctagggcaaacctttgatctcacttgaagagatatcttgctattgttagatcaaaccctggcctttaatgaaaagaatgyggctttagctgcagcccaagagtttggagatacctggtgtcttagtgaagtaaatgataggatgacagctgaagaaagggacaaattctctactggtcaaaaagccttccccagtatggatccccactgggacctcgactcagattatggggactggagttgtaaacatccaatgacctgtgctctagaaggactaaggagaattaggaaaaagcccatgaattattcaatgatgtccaccataactcagggaaaggaagaaaatccttctgccttcctcaagyggctatgggaggccttaagaaaatatactcccctgtcacctgactcactcgagggtcaattgatcctaaaagataagtttattacccaatcagctgcagatatcaggagagggctccagaagcgagccctgggtcctgaacaaaatctggaggcattattaaacctggtaacctcggtgttctataatagggatcaagaggaacagacccaaaaggaaaagtgagatcagagaaaggccacagccttagtcatggtcctcagacaaacaaaccttggtggttcagaaaggacaaaaaatggagcaggccaatcacctgggagggcttgttatcagtgtggtttacaaggacactttaaaaaagattgtccagtgagaaacaagccgccccctcgtccatgtccactatgctgaggcaatcactggaaggtgcactgcccctgagtgcagtggttctctgggcaagaagtccccaaccagatgatccaacaacaggactgagggtgcccagggcaagtgccagctcatgttatgacccttattgagccccggktacatttaaccattgagggccaggaaattgacttcctcctggacactggcatggccttckcagtgttaatctcttgtcctggatgactgtcctcaaggttttaccatccaaggaatcctgggacatcctgtaaccaggtatttctcctacctcctcagttgtaattgggagactttgctcttttcacatgccttcttgttatgcctgaaagtcccacacccttattagggaggaatatattagccaaagctggagctattatctacatgaatatggggaacaatttacccatttgttttcccctacttgaggagggaatcaaccctggagtctggacactggaaggacaatttggaagggtaaaaaatgcccacccagtccaaatcaggctaaaagaccccaccacttttccttatcaaaggcaatatccctcaaggcctgaagctcataaaggattacaggatattgttaaacatttaaaagctcaaggcttagtaaggaaatgcagcagtccctgcaacaccccaattctaggagtacaataatcaaaaggtcattggagactagtgcaggatcttggactcatcaatgaggtggtggttcctctatgtccagttgtactgaacccctgtaccctgctctctcaaatgccaagggaggcagattggtttgctgttctggacctcaaggatgccttcttctgtattctcctgcactctgactcccagtttctctttgcctttgaggataccacagaccacacrtcccaacttacatggatagttgtgccccaagggtttagggatagccytcatctgtttgctcaggcactggcccaagatctaggtaacttctcaagtccaggcactctggtccttcaatatgtggatgatttacttttggctacctgtttggaagcctcatcccagcaggcgactctagatctcttgaaatttctagctaatcaagggtacaaggcatctaggtcgaagacccagctttgcctacagcaggccaaatatctaggcytaatcttagccagagggaccagggccctcagcaaggaacgaaagcagcctacactggattatgctcaccctaagacattaaaacagttgtgggggttccttggaatcatcggcttttgctgactgtggatccccagatacaaggagatagccaggcccctctatactstaatcaaggagacccagagggcaaatactcatytagtagaatgggaaccaggggcagaaacagccttcaaaaccttaaagcagaccctagtaaaagctccagctttaagctttcccacaggacaaaacttttctttatacatcacagagagagcaggaatagctcttggggtccttagactcatgggacaaccccacaaccagtggcatacctaagtaagaaaattgatatagtagcaatagtcagaggctatcaaaataatacaaggaaaggatctcactgtctggactactcatgatgtaaatggcatactaggtgccaaaggaagtttatggctatcagacaaccgcctacttagataccaggtgctactccttgagggaccagtgcttcagmtacgtacatgcacggccctcaaccctgccacttttctcccagaggatggggaaccaattgagcatgactgccaacaaattatagtccagatttatgcagcctgagatgatcttttacaagtccccttagctaatcctgaccttaacctatatactgatgaaagttcatttgtggaaaatgggatacaaaaggcaggttgtgccatagttagtgatgtaaccatactgaagtaagcctcttcccccagggaccagcaactagttagcagaactagtggcacttactcgagccttagaactgggaaagggaaaaagaataartgtgtatacagatagcaagtatgcttatctaatcctacatgcccgtgctgcaatatggaaagaaagggagttcctaacctctgggggawcccctattaaataccacaaggaaatcatggagttattgcactcagtgccaaaacccaaggaggtggcagtcttacactgctgaagccatcaaaaaggggaaggagagaggagaacagcagcataagtggctggcagaggcagggaaagaccagcagaaaggaaagaaagagayagaaagtcagacagagagacagagagaggaagagagagacaaagagggagtcagagagaaagagaaagaaagagaaggagacagagagatagaaagtcagagagtgagagagaagaagagacagagagacagagagagaaagagaaagataggaagtcaaaagaaggagacaggaagagacagagagaaagtcagagagagagagaggaagagacagacaaagtcagagaaggaaagagaggaagagacaaaggagtcaaagagagagaaagggatagaagtagtaaagaaaaaacagtgtaccctattcctttaaaagccagggtaaatttaaaacctataatagataattgaaggtcttctctgtaactctgtaacactccaataccaccttgttgtcagtgtaaacaagggcataacctgaaagcactgaggccactgacaacccatagcattcctatcaaacatccttaacccagcaagtttcctaacaggggatctaaatcttaattaccatacaaaggtcccaccagacataggaggarctcccttcaggacaggatatagatggttcctcccaggtgattaaggaaaaagacacaatgggtattcaggaaactcttatggaagcagagttaggaaaattgcccaataattggtctgctcaaatgtgcaagttgttttcactcagccaaatcttaaagtacttacagaatcaggaaggagccatctataccaattctaagttaatatggatggaatgaggttttattaatagcaaagaaaaattaaaatcccaaacttacaaggttttctactaacgtagagtttgctaaaagttaacagtgtaacatgcattatcctactaycacacactctcaaagcatttctcagacagtttgcaagaaataacaaaatctgtccagtaaggatagtaactacaatcccaaatagactcttyggcagcagtgactctccaaaactgctgaggcctagaccctcctcactgctgagaaaggaggactttgcaccttctttgggaaagagtgttgcttttacactaaccagtcagggatagtacgagatgccacgcagcatttacaggaaaaagcttctgatatcagacaatgcctttcaaactcttataccaacctctggagttgggcaatatggcttctcccctttctaggtcccatggcagccatcttgctattacttgccttcgggccctgtatttttaacctccttgtcaaatttgtttcctctagaatcaaggccatcaggctacagatggtcttacaaatggaaccccaaatgagctcaactaacaacttctatcaaggacccctggaccgacccactggccctttcattagcctaaagagttcccctctggaggacactacaacttcagggccccttctttgcccctatccagcgggaagtagctagagtggtcatcacccaattcccagcagcagttggggtgtcctgtttagaggggggattaagaggtgaagccagctgagcttctgggtcaggtggggacttggagaacttttctgtctagctaaaggtttgtaaatgcaccaatcagcgctctgtgtctagctaaaggtttgtaaatgcaccaatcagcactttgtaaaaacacaccaatctgcgctctgtgtctaactaaaggtttgtaaacgcaccgatcagcactctgtaaaaatggaccaatctgcgctctgtaaaatggaccaatcagtgctctgtaaaatggaccaatcagcaggacgtgggcagggccaaataagggaataaaagctggccacccgagctagcagcggcaacctgctcgggtccccttccacgctgtggaagctttgttctctcactcttcacaataaatcttgctgctgctcactctgggttcacactacctttatgagctgtaacactcactgtgaaggtttgcggcttcattcctgaagtcagcaagaccacgaacccaccgggaggaacaaataactccgcactacctttaagggccgtaacactcatggtgaaggtctgcagcttcactcctaaagtcagcgagaccacgaacccactggaaggacgaaactgcggacacatctgaacatctgaacaaactctggacacaccatctttaagaactgtaacactcactgtgagggtccgtggcttcattcttgaaatcagcgagaccaagaacccaccagaaggaataaattccagacacactactgtsttagagtgatctagccctggaacatgtagtgcttgtgggtctcatagcagtagttctcaaccatgatgctagagctcattggtgtatttcaatcaactggaaagagaagtggagttccaagattataccaggaaccaagcatagacatctaagctgtggccctgctgtcaaaatcagggctgagctctagctgagcacacatgaatgtgtgcagtggttgactmttaacattgttcacattctggtgcactcattataggaatgtcagagctacttataactgaatagccctattatacacttaggagtgctaggcgttctgagattataaactgggctctgagtgtatgtctgttaaaatatgtatggggctttcagtatttaaaaatagtcagtggtcatccacagagctacttgcagcttgaaacgtacattaggaattcccaaagtaaatgagttgtgataactaagcttgtagaagttctggaccttcctcttcatcaagtgagtagatatttatatatttatttatttatttatcaagataggatcttgctctgtcatccaaactggagtgcagtgtcctggtcatagctcactggagccttgagctctgaggcttaagtgattctctcacttcagcctcttgagtagctgagactacaggtgtgtaccactgcacctggcatttttttttttttagtagagttgaggtcttgctatgttgcccagtctgatcttgaacttctgagctcaagcagtcctcctgccttggcctcccaaagtgatgggattacaggtgtgagccactgcacctggcccaagtgggtagattcaacctaagtcaactcatggatccgttaaatgcagggattggattgattcatctctataatacagatgatctgtagtattccgtgattctgaaacacatgattctaactagagacagtgtgaaaagagacagaaaggtcaggagaatcctgggaaatggcccagaatttcaagggctggggcattctccagagcatacgtgctacccagatgctcctgtgcacatgaaccctggggatcttgttggatagaggatggggtctggggcaaggcccgtgaatctgcatttctaacaagctcccrggtaatgctgctggtgctgctctatggaccgctctgaggaacaaggtgagagcaagtgttgagactggagaaatgagatggtagaaagacagtatccctagagactggagaatccttctgagatgttgaaagggcacattgtactgtttgttttaatgacagtaggataatagcaagatctaaagcagagagaactttcccccagggacagaagtgtagaaggtaagaaatgttaaccaggaagcctgggctcagggccctggagagtgttctcagtcctagatgcaccattggaattgcctgggagttttaaaaagtgcccatgcctgggttccaatatccagagacaggattcagttggtctgcagtggggccctgactattgctaatttctaaatgctccttaagtgattcatccgtacagtcaggatggagagtttgggagggcagtgattttgctgattactttctcctaagtggctgcttcctctcccctccaggctgttctagccttactagcccaaggccactctaaggagcttgattgaacggtcatggcaggctgtgcccagattactgtatcaatgggctcttccagccaatgtgctgaatattctggtgaaatctctgagttttatgttgggaacatttttttctaccagttctacttggaatctgtcttcctttgggagagtcaaaggcaccctctgtctattctgctttcctgtttactatttcaaaactttctcccagttgctggaaacttggagccagagttatgcaacaaaatgttgccagctgggaccagaaccgaaatataaaattgttttttaactctgtgctgctcacaatatgtaaattatacttgggaggaaacttctggaaaggaatttttagtcatttagatctgtgcaaaattgactatcatattctacaggtatgcaatgccacaggtacacagagttcaatactctgcatctgaagtaggtctttagtttgagataacctgagaaggggagcccacagagagggcgagctcttccatgggagaggtcccgccatttttgatccattggagktaaatgcaagacgtaaatcatgatgtatcattcacgcatttgttcattccacagacactaaggatgtcttttgtgccaggtactgtgctgagacgggggacacagagtgactcagaccagcaggcctggtttctactctacagagctaggctaggtgggagaagcagacatcacgcaaaaacacacttaaataaatagaaaatcaaaaccatgagtagtgccaagcgggcacacacagggcatctgacttgggcccagcaggaggtcagggatgatctccacgcaaatgagacctctgaaccaaaacctaaaaaataagcaggagttaactaggcaagcaggataaggaaaaggattccaggtagaagaaagaccctgtgataggagggagyggggagagcccgagggacctgagaagtcaagaggatggaactgagtcgaagagaaacagcgctgccaaggtggctgcagagctaagcacataatgtggctaagcgcgcacacacacacacacacacacacacacacacacacgagcagggattctgcagccatggggccaaaataaatttaaaaattactctcaatgctcaagacacacacacacaccacacacacacacacacacggggagggactctacagccacaggactaaataaatgtaaaaattactctcagtgctcaagagacacaccacacacacacacacacacacacacacaccacacacgggcagggactctacagccatggggctaaataaatgtaaaaattactctcaatgctcaagtgtaattgtaattttttttttgagacgaggtgtcattctatttcccaggctagagtgcagtggcgcaatctcagctcactgcagcctcagccttttgataaggtgatcctcccacctcatcctcttgagtagctgggactacaggggtgcaccacttcacccagttaacttttgtattttttgtagagatagggtttctctgttttccaggctggtctcaaactcctgagctaagcaatttgcttgcttcggcctctcaaaatgctgggattacaggcatgagccactgagctggtcataacattcttaaatgcatttgtgtgagtgtgtgtaacatatcagaaggaaaataattagaaaggcttctccttgcacagccccgcaagggatgttctcagaatcaggtggagggctcaggacagccccgctaaygctggtcctggagttgctcttcgtgccctggccaggtcaagtggctttaaactcctagcctcttttcctcagaatcctatcaccttgcaatcccttccccctgccccaccctccccactggactcttttctaaactgtgcagtacgatctccaaacaccaagcagagagttcaaacttggcagcgacatcatttcctgagcactgcttctgaggaagagttcctacacacttcattcatttccccagttcatacacaaacgcatttacaaaatatgcttctttgtgaacgacacaaaccttctattggctttaagaaaacggatctacaacgaggctttatctgtgggctctttctgaacatggccatgcagacatgagacaaagtaacattgcagggccttttatgcgggtcctcaaagagggccccaccctggaaataaagaaatggccacagttgccctgtctctaatcggttcatggtattcagccttgacagcattgtccagcggctgaattcagccttggaggcctccatctgggttgcagggggagggggtgggggataggggtggggaatacagaagtttccgcaggctgtgtgaaaagtggcctcccaaccagctgcacagaccccctcgcctcttctggtcgttgctcccagaagccttctttcacttagtgatggaatccagcatacaaacaaggtcaaggagctttgtgagcgagagagtgacatttgcaaagggagcgaacccttcagctgggagcttgcaggagcagggctaaggggcatgtgatcaggaggtgatgtcacccaggatttccacaaaggaaaaagtggccttttctttgggaagatagatgacatcagcctctcaaatgggggctgggtccattttatcttccttttagctattaaggagatttctcaagccttgagaagtttcagaaattagaagagaacattttaaaaaccgtgtcaacatcttttatgactggctcggtttggatgtaagccagtgccttcttractacctgtgggcatgaggcactgtaccaaagggcttttaaaaaacatctttagagcactggcagaaaaccgccatgaggtcggcagtgtttctcttaaagttagatctttgctccaggtctctttctctcgagtggtctttcattagcctttgtttatcactggtctttcgggggaattccttctcattcaaaaattttattccttttgtgacttagagtacatgtagtacgatttctgggaggttcaccctttaaagacaaaggttttatcttttgtaattctgttatccacttgtcttgtgtgagagaaaatgccttagggtgtgagggtgagtaagctgggctctaggagaagatctgctggacccagcctataatgaacaggcagctacaactgtgaatcatgttaattacatgattatttatatgtcaattacacataacctctgccagcagatattttttgagaagaagtttttcattcattcaaccaaccatccagcatatattttgggcttgttgtctaaatatagagagtattaatttgcttgggctgtcgtaacaaaaatgccacagattgggaggcttaagcagcagaagtgtgctgtctcctggaggctggaagtccaaggtcaaggtgtcggcagggttggtttctcctgaggcctctctccttggcttgcrgatgctgccttttccctgtgtcctcacatggtgttttctctgtgtgtgttcatcctgatagctctgtgtgtccaaatttgctccttataaggacaccagtcagattggattacagtccattcagcttcattttaacttaattgcctctttttaaaggccctatccccgaggacagtcacattctgaggtctgggagttagaacttcaacatatgaattttggcagagatacaattcagcccataccagaaaggaaggagatcacattcttgactttggggagttagtcatagagtaggcaaggcaggtaaaccaagtgtagaaatatatacataatccaggacgccatgggaacacagaaaaaaatagctaggacagcctgcggaagttcaaagagacctccaggcagctttgacatttgaactgagttttaaagaatgggcaagaattgatcagacaaatatctgggagaggaaggcttttctaagtagaagcagcaaggygtgagggcacaaaagttttgcaaagagcaagtccttcagctagaccacacattctctgcattctccattggggcagtatcaactccaaggaggtaaaattggctcttggtagggggattaagaaattcttactctttaatgtataaagcataaagatatacagtacataacagatatgcaatatacttgtggtattaaattttcatggttgagaatttggaaaaaaatgtccgaacaatctccttagggggctgataatgaacaaaaggtgagaaacactagggaaagggagtgatagaagttgacgcaggacacgttatcagaaaccaactgataggaaacatcacaagaatttggattttatcctgccatcagggaaagaccaccaatggatttttaagtgggaaatttagtgatgcaaacagaagtacactttagaataagagttctggcaagtagagggatgcccaagaagaggaagagactgagagtttggtgactagtcagagcagggagaaaggaaatgagtagtgggtgaggcagcgtattaaagagctgtttagggctgggtgcagtggctcacacctataatcccagcacttcgggaggccaaggcaggtggaccatgaggtcaggagtttgagactggcctggcccaccccatctctactaaaaattcaaaaattagccagctgtggtggtgcgtgcctgtaatmctagctactcaggaggctgaggcaggagaatagcttgaaactgggaggcagaggttgcagtgagccaagatggcaccactgcgctccagcctgggcaatagagtgagattctgctaaaaaaaaaaaaaaagagctatttagaaggtaggatgggcagatctgatggtggagtagatgtgtgtcaatctgggagacagaagaaggaatcatggatagctcccgttttcctgcggtrtatgatttggtgcatggtggtgccattattcatagataggaaatcccagataaagaccatgtttgggggaaaattgtgagcttctatttgaacatgctgaatttgagatgttcaggggatgtatcctttcagcaattgctggtgtcagtataaaaattaggtgaggttttgggccagagaaagagactttggaataaactacatgttggtgaatttggagttgtgagcatgatgaaatatatatccaaaactgtgcaaggtatttttaggcatatgaaagaaataccacgttagtctttgtcttcaagctgagcatgatcagttaggaagcaggtgtagaaaactaacagaagtgctgaactgtgaggtgcctattgcaaggctagtaaggaggctggaagtcattggggaaaatcttcacggactctgtgagattttagagcccttgaagaatgatcaggacaagaaatgacagatggtgcctggataagcatgagccaagaaagagagagaaacaagcctgatgtaatgaagacagtgggatatgaggcttcgtagacctcctgggctagattctttagaattctcaaagccagctagactagtgtgaacttaacgtagtaaggaaaagggaaccactgttgttttagacaatggagtgggaaatgtcaagggaggagattacaactggagacatcatagatcacagtgacagaggcaaccccaggggaccattctgggtcctggttactaagagcgaggaatagcggtctgcagagacaagacaactgatgatccaaggtgagtaacattctgatgaatcctcagcaaagacactcaagggctatgtggccagtgctgtgataaatcctggcacagaaaatattagatcaattgccgcattctctcttcctaataatttcttcaaagttataactttgaaatacagactcatgattacctaagttttccagtttgaaaatgattttagggctcttttttgttattgaacaaaaaacttttgttgaacgaaaaaattttattgaacaaaaaatgttcaatttaaaatttttattattgtgtgtccttgctgccacgtggtgaaaaaattcacaacaatctggaagtatgatgttggcaatgaaagtgatttatgaattgtggtcagcaaagattctagcgcaggttcacagggctgggctgtgaatcacactgtctggttctaatctcaggcgcagaccttctctccgtwggtaatggaattgctttcacagtgtcgcttcctgctaggctgtgatagacataatgtcacacagagagaaatggtaaagcacccatccatccgcctccaaagtaacctcaagaatttgatgtcagataaggaaatcctgcttggttttggtagaaatttaagtaaaagagaagcttttaaaaacaactagctctgtttaagttaagagatatttccctaaatgctgactattctttctctcacatttatacatgctatatcccatcctgtttatgatggctttttcagcctatttgatattttgggcttttgtctttgtgatactcttaaaatatttttaagcatggagactggaaatgagttccttcttagtgtggaaccaaagcacaggtttctgcatcgtgatactgagtctgatttgtatttatgacaaattttcacttatatcttttctgcaaagaaattcttaatggacgatgctcatttctaagaaatctgtttctaaataactccttgttgtaaagttgggatagtgactaagaaaatcccacagctcttttggccttgacttcagagtttctccagcaaggtcccaatgatcagaggcagcattaaagctgtgcatatgcagacctttcagaatgagtggaaaagctcactcctgacatttctgcctccttgacgacagcagtaaatacacatccacacagttgaccttcatctcatgttggctctgagtctcttcaccagcaagggcctctcaggagtctcgcctccccattcccatgtcgccactgtttgaaaaagttggagttctatttctattgccactctttgaaacagttataaaaagaaaaaaaaataaccctcaaaccaccatgaccttcccaaatcacagattgcacaatttgtaataacagtccttgagatctgggccaaagaaagggctttctcgaaacttctgtttgtgttctggttccctggcaacaatatccccaatagaggaatgcatgtactttgcaggggattccacactttttcgtatgacacaaaaaccaaaaccacacttttttttttcagtttcaaatatcatagcagccaaaaatgaagtgtagaaacttgagttctaagccaactcagaacaaatgtgacgttcagcgtagaacctgaatttttgtccccagaggtttctcttttcgaccattgacttaaatgttgccatatttgtttcaaacattacatatccaaggacttgttttgtgtgaatgcactgtgtactcagaggaacagaggaagcagtgccaggtggcagcagcattgtctcacaaacagaacaaatctggtggaggacagtaactaccacttataagagttagtagaatttgataatctgtagatcagtaatgacaataatatactctgtccctgatttttttctcctcctagttccacaggctactcaaatatagactattttgaccctgtgtaccaaaataatgmaattgaaggaatgcaggataaataatatagattttaccacctaaatgtaatcttaaatttgtctgaagatattatgataaaaataaactatcttgccatgtaaagagtgaatgaaaatatgattaaacgcttagtgcattggtttaattgacatctcattcactattactgttgttgatgttatcattttaaaacatgactcaacatgtgtaatttaaaaatatgatcttgagaagtgaagccagctggacttcctgggtccagtggggactcggagaacttttctgtctagcttgaagcattgtaaatgcgccagtcggcgctctgtggctagctaaaagtttgtaaatgcaccaatcagcactctgtaaaaacagaccaatcagcaccctgtaaaacggaccaatcagcactctgtaaagtggaccaaccagcgctctgtaaaatggaccaatcagcaggatgtgggcggggccaaataagggaataaaagctggcctcctgcgcaccagtggcaatccactggggttgccctgcacgctgtggaagctttgttcttttgctcttcacaataaatcttgctgctgctcactctttgggtccgcactacgtttatgagctgtaacactcactccaaaggtctccaccttcactcctgaagccagcgagaccagaaacccaccgggaagaatgaacaactctgcacacaccacctttaagagctgtaacactcactgtgaaggtctgcagcttgacacctgaagtcagcaagatcacgaacgcaccagaaggaagaaactccrgacacatctgaacatttgaaggagcaaactccggacacaccatctttaagaactgtaacactcactgttcaggtccgtggcttcattcttgaagtcagcgagaccaagaacccaccggaagaaaccaattccgaacacaatctcatgtctcatcccaataattttcttaaatgagcattatcattcccttattatggatgagaaaactgaggaagaagcctgagacaagttaagtgatgtgtccaaacttacacatccactaagcaatggaatcagaacacaaaactcagtgtgtgatgtcaaactcaaaggccgtgcaataagtagcacgatggtgcctgaaagcaaatattttttccccacagcttttcattgcaaaaaaaggtcaaatgatattgcaatgcaaagaaggtcagagcttatagtaggtaattttataaattcccgtaataataaatgtttttaaaaagatgtgtgcaatcttacccaagtaaatggtgatccagtttcaaaggcttcccactaagtgacacaattcattctttctttaggttcaagtagcaataatatgtgggttggggcggaggggcgcattgctwggcaaaagacaagttcgaaatagctgatgttatttgcaatccttaaacacaatttctgctttattactcatttataaagtgctgttctggagctgctatatatgttgctgatggaatccaccgatctgggagaaaccacggagatcatctggtcagttgccaaggtttagttatacaaactcgcttacaagagggagaagttatattaaagtgaagagtaaaagggtagctgctcccagaacaacttggccrggctagagtggaccatgggaatggggtggagcatgtgaggatttgggtaatttagttgtttttcttcccctaagctaaggacccaggctggctggatgcaggatttgccctgcgaggggcctgcagcatgggatgttgtaatcagagaaaacaaccttgaggctcagatttggacagagtttaaagggtcacagaacaccactgccatggacgtggtgctgcccacctgtgtccatttctccgggtggagtcctctcmctgcagagggaaggttagaggttggaggaggtgagggaaggaatcagggagaggcctgcaatgtaggtccctggaggctctttgagcttttccctgcaagagccctgtgtaccaaaataatgaaattgaaggaatgcaggtttgaataatatttctaaatagaagtatgactgttgaacttggaaactgcctacagagaacatgttttctctgtctttgtttgtttgagggatttcataaagaagctttcagtagccttaggcatgactgcttatttcagggaaggttagtacagttatcttagtctcatttctttccttgtacctttttatactaaactttgtttagaagtcttcaatcatttcaaaaacatccaaggagagggaaaagagattgatcaaatgattgatttctcctgaagaattgtaagcaagggatttctactgggaaaccattttttaatttgattgaaattagtagcttaaaaggaaactgataaagttaatcaaagtgaaaagatgacaagattggctaacttctctaggttaagacgaaagatagtatccttttgtatacaggaaattaaaatttatattacacagaaactccaaaattatggcttctttggatttctttctctttgatgatgtactaaagggaaacacatcagtatttagatctaggccatcttagatagtcagatggctatgacagtcttaactttgagtatttatatgacatcttgaataggaatgtaaaggtcattatatagcggtccacagcattgatttctaagcttcttgtatctgttttccaagtcactgacttcatgcaataacttattctttcactgttttttattgtatctctaccattgaaacccgatgctctactttatatccactgctgtatagaaattagtcgaataaaatggattatcacaaaatatggggcaaggatgaagtctccatggaacatgaaactttctaaacgttcattgactctccaacactaaaaatcgttatgacttaactccctggttcttgggtttacctgtttcttcctgatgtgatacctggccctgtatttgctgctagttttctcaacaatagaccttttctgttttcatgaaaatcttacccttgaccaaccatcctctaaacctcaagatgacaaataggaagtaataattacaagatggaatacagaaagtttacaaatgtgcactccttgaataccacacaaatagttgttaccattttgtacctacctgggagtttggccacctcaattatcagggaaagaatgaggatacattagcttcttagggctactgtaactaagtaccacaaactgggtggcatgggacaacagaaatttgttctctttattctggaggctggaattccaaagtcaaggtgttggcagggtcatccctctgacggctctagggaagacccttccttgctgcttctagcttctgttgattgatggctgtctttggctttctaagccttgtagatgcataactccaatttctgcctctatccacacatgaccttcttccttcttggtgtctgggaccaaatttccctcttcgtataaggataccaagaatattggatttcagttccaccccaatccagtatgatctcattttaacttgactgcatctgccaaggccctttcctccaaaaaggtcacagtcacaggttcctggtaggcataagtctcgggggacagtgttcaacccaatacagggacaactctctcctctcctggagtcacgatgttttgtcctcttcttccttttcactctcttctttcttccttcttttttctcaaggaaattttatgttccttggcctttatattacttgattttcttctttgatttcatctcgtgatcactccagtttgtgtccccttcctcacagaatacatgctatctgactaaatccctcagaaaaatccatctgcacatgcttcatgtccttatgaatttgaggagctccacccttggccttgtgttcagagaggactagtgaccctagtaggacagatgcctatcacttggccacatacctgtgaaatgttggggaattaactggtaacatcaaaccaggaattactgactttttgtggttctcattacatgccagtcacctttggacaactttggccattttaaggagcacatattcctgtccacttccccaccctccctgacctgaaagtttctgttcaaaatccttgtaattacgtttttttatgtttcatagatgtatcggaagtgaggcctgtatactcactccaggaaatagttcactttgccttgggttgggccttccccagattctgagctcttagttaccaattcacatcacacctgccttaccaaaagggtccttgctggcagtttctcttctgtgtcctcccttcctccacaagctgcctttttttttttttttttagatggagtctcactctgttgccaggctggagtgcagtggtgtgatctcagctcactgcaacctccacttcttgggttcaagtgattctcctgcctcagcctcctgagtagctgggactacaggtgcctgccaccacgcccagctaattttttatatttttaatagagacagggtttcaccatgtttgccaggatggtctcgatctccagaccttgtgatcggcctgcctttgcctccctaagtgctgggattacaggcatgagccactgcgcccagcccacaagccgcctttttacacaatgaaggcaaactggccttgccaatgaagcacatctcaaggtcttatagagcagaaagagtttttattgttaagttatagaaaaaaagctattaaaatataaattgagcattttaatgaagcacgtgaacatcctcactaattacttttaaaatttaattctctttcactgtgccttggcttttggcttcgttttaacagcaactgttgatttcccaggcatttcctttaggaatgaagggataagggtgggagggtgtcggtgatgaatcacttctctcttccttttctgccatcctctttgggctttagccatgtgtatttcaagatgttattcctcctgatgccatcagtttatggcatatagtttcaggaaaatgccagccagcaaagcgctgactgcatttgagcagtcgccgggcaatacagcakttactttttaaattttgtgccttggattccatttagctgtttcattactggtttgcttttattaaagctcttatwaaaaaaacacacagatacgaacttaaagatagtacctacataggagattattattaaatgtttcagtactggaattttataactcatggcttgttttggacaaaaaccaaaacaatattagtgaagttcttttatgaaggtattttaagttatctacacaagtaagcaggtttagcaacagcttgtaactcttggttgttatgagttcagcagatcaatgtgcttcctgcagataaagcaagcacttcctttcggcagatgagtgagagtttggaggaaaatcaaggcaaacagatgatcagtcaccagctctaaaacttttataaagattaactctttaaaactgaaaaacataggcttctcttcagggcattattttattccagttcagctgatgtctaatgatgtattctgttagattttgcctcaaagtcaattaaaagatttttgctttgtttacgttttccaggttgctatggtgattgtcttyagtggagggacaggacagtaatgagggcagcattcaacattgttagttccgtgcctttgagctgaagttctcggcaaggcatgggggagagagaacacagaagtggaggtcaggatcggggagggtgggtgtcacaatagggttttgtacccacatctgccattcactaagtgatatgagcatgttccacagctttcttgaacctcactttgctcacctctacaatgggcctgacatcattgttacctgcctcccgttgtcatgattaatttcaaataaaataatgcatttcaaataaaaataattcaaataaaataaaagcacttgagaactgaactaccataaaaatatggattgtcttttaaaaaatttttgtgcaccttaatgaaaaaccaatttcttacctcttctctagctattcatgatagctttttaaccagtaattcctcttctagctccaagtctttgtctcaaatctggggataaagtcttgtgaggatacaaaacacggccaggtgtggtggctcatacctgtaatcccagcactttgggagggaaaggtggatcacttgagcctaggagttcaagaccagcctgggcaatatagcaagatcctgtttcaaaagaaaagagtaaaaaaaaaatgtaaagatagaatacacagcatgtgtgaaaggattatgatatgcacaacatttagctaaaaactttggattgtttcattcattctatgtaacaaccctatgaagtaagtattcatacagctatagatgaaagaaaggttagattacttacctaggaactatcacagccagtttaggaacccatttgtctgaactacagcccatgcttcctctgttacactataatgtttccaaaagttttgcaatctaacatgccaattaagcagttctaaaatcgtgtctactccatgaaaactttctcttaccaaagtgacaaagagccactgtgtctatttctctcaaaactctttattcctcatgtcactgttcctttcttggttggtattttcatctttttcatttttgagacggggtcttgctctgtcgcccaggctggagagcagtgctgtgatctcggctcaatgcgacttccacctcctgggttcaagcaattctcctgcctcagtctcctgaatagttgagattacaggcgcatrccaccacgcccagctaatttttgcatttttagtagagacagggtttcaccatgttgggacaggctggtctcgaactcatgacctcaggtgatctgcccaccttggtctcctaaagtgttgggattacaggtgtgaactaccacgcctggctggtattttcatcttttaaattatcttcttttatcttcttttgaaaggcttttctaaatcattgtcatctattttagattatgaatgaccggtgttaaaaacttctgtatttcttttacattttattgttcattcaaccagacaggtaaccggatgacgacaaggatgttggtggtctaaacatccctgcctgtgttatttcctgatgggtattggtttatataacttctttcctctccagacttgtgtattctccatctctttttcccttccctgtttgttatccctttgtcatgcatccagagtcgcaaatatgactggtaatggcaggatgagttatttattcttatttgtaacttaccagtgattaacatgtaaaggatagaatagtattcaggttgttttcttcaaataaaaacttattgaaattactcttagtaaactgaaggagaagcaaaaagggtttaataacttgcaagaagacatgtgggcaataacactttttatgtctataaatgtctttctttttttcaagagatattaaatatgcttggcttctatagcactgcttgtattatgggcagatgctcaataaacacttatgagtgaatgaaggaataaataaatggaaytgggaagctattttacctctttcaaattttagaaatacgaagacagttaagtttctaccgtaattaccagaattacaacgtgcaggtttgttacatatgtatgcatatgccatgttggtgtgctgcaccctcctagtactgtataattttgaccagaaagtaccactaaattaatctatcctattttgcatttgctgtgaacttttaattcaaatgtttccttttgatatgttaatcctcagaggtagtgagagcatgaaggagaaaaagaaaacttcagagatttcaagccctaactgtttctttccctctttctcatgatcatacaatatttttcctgacagagtatcactkataaaattgaaatttctcagctgggcatggtggctcacacctgtaatcccagcactttgggaggccaaggcgggtggatcacctaaggtcaggagttcgagacaagcctggccaacatggtgatgaaaccccatctctactaaaaaaaaaaaaagaaaagaaaaagaaatttttctttaagaagcatacatatatgtgctattaacaagatatacttaaaagtaaaattttgctctttttattaaagaaaaccttgtggattatttgctttaaatactaggaaaaaagacattgtgggtccatataactatactgtaatttttttaaagcawtactgaatgccccgaatctgtattaccattccagtttacagcgacaatttaagggtattagtatcctgttatttgcgaaggaattcacaaggaaaygtaaaacaattggaaaagacaatggaaaaatgttacacagagttttatgtgaatcaactaagataaaaaaattgaatcagattggctgatgaacgaatgctaaataaaaatgcagaaatgagctatctaaactttcatttccttcttatcttttatatcatgtggccataaagttattttcctctagattttttccattggataatttatttgatactactgatagaaagaaccatctgagctgaaaatgcaagttgagaaaaaaatttcagtaacaggctttgcttacctgtaatgtattttagtaaaaggtggtacatcttaacacgagttacatgaggcactgtgttgtaccactccggaagcatcctgttatagaatgtcctgtgagcggtgctccctggagttgggcattggtacaggagatacggacaatctgtgatgattttggcttcaggaatatttgccatgtgttgttgtagtcggacaaatattttctcatcttttacggtacttgtgtttttttaagattcatcatagtctctaaacaatgtcagcacatctaattttaaacagctttttcgtaggctttagaaataaaagccggaactttttaggacacaggaaagatattgctctgtgcaatacatttaaagtctgaaaacgcagaggttttcaagtgaaaggagactgagaagtcaagaagatagtagtgctttgagctagagtcagatttctctgccgaatcaagattcttagaattctcagtgcttctcagtgcagtggggaattctgcacggagattttttttttaactccttaacttttaaaagcttttcttctaactcactgtacaggaggaatttgcatagagtggacagtagacaagatctcagacttggtgtcttactttagaagccatggtagtttaatgttatgtgaaaaatgcacgtttactcataatggagtgaggaggcactgttacttttattttattttttattattatactttaagttctagggtacatgtgcacaatgtgcaggtttgtcacatatgtatgcatgtgccatgttggtgtgctgcacccattaactcgtcatttacattaggtattcctcctaatgctatccctccccccttcccccaccccatgacagaccttggtgtgtgatgttccccaccctgtgtccaagtgttctcattgttgaattcccacctatgagtgagaacatgtggtgtttggttttctgtccttgtgacagtttgctcagaatgatggtttccagcttcatccatgtccctaaaaaggatatgaactcatcattttttatggctgcatagtattccatggtgtatatgtgccacattttcttaatccrgtctatcattgttggacatttgggttggttccaagtctttgctcttgtgaatagtgcsggaataaacatacatgtgcatgtgtctttatagcagcatgatttatattcctttgggtatatacccagtaatgggatggctgggtcaaatggtatttgtagttctagatccctgaggaattgccacactgacttccacaatggttgaactagtttacagtcccaccaacagtgtaaaagtgttcctatttctccacatcctctccagcacttgttgtttcctgactttttratgatcgcacataaaaagccttgatgaagaataagagaaggtaattggaagaatttaccaaccaataaagaatattaaaaaaaaaaaaaaamagaaaaagaggcccagaaatgttaagagcaaaaaatgttttgttaatcaccaaaaattgctgttggaaaacaagataatttcttttctaattgtgtctctcataagccttcctcaaattttacctcttctgcaaagttttctcttcctctccatactgaaatctctgtctgaattcctgcaaacgatttgagagcctgtgyggtatagtaatgaagtattaagatacaaccagatcacctcagttagtatcctagcatcaattaaccttggaaaatccacaccacctctgtttgcactgatttgctcatttaagaattggatcctaacagtacctacctcatgtggtccttatgagtacggaaacagaaaacacatggaaagcccatatgaggactcaatgaaaggtggcattattctactgtgtgccgcaggctacagcatttgattatttgttgtcatggtctgcctgaatggctttctaaggcatgacatatcaagattctgaaacacatgctgttgtctttttccttggttggatttttctatatccattgtatttttttaatgtaaatttgctgagttaggaactatataatttacttgtttatttcttacagtctttggtacaaagctaaggatttttagcccttaaaattctagttcttagatctgcacgggactgcagaataatgtattagctacaaggacactgaaggcccagggacctgaagttcacgaccacggctcacacggtccattgtacttccgactatgttatgtaattcttaccttattataataaagaaaatctaaaattagaatgacttttttttaaagtacgaaggtttgatatggtaagaaaaaggatcgagcattattgtactaaattatatataatccagtgtttttgaaaggataaacttaataagttgtagccatgatttttttctcattgttttataactgcataattataactttattgtaacttaacggttttctcctaaattaagcattgtatatttttgatggcctttcggtgagttgaatttggaattattttccaygkgctgttgcccactttgaactgactgaacctttctgttttaacaggttgtggtggagagctgtctggggccacaggctccttcagcagccccgggttccccaacaggtatccaccaaacaaggagtgtatctggtacattaggacggaccccgggagtagcattcagctcaccatccatgacttcgatgtggagtatcattcaaggtgcaactttgatgtcttggaggtaggaagtgagatggttttttcagcacattccaaagtttggggtagaacargaaatcactctgccaagattccgaattctttccagtagtcagcagtgttctattcttagacattttaatgagcatcagcccttcggtgatcatttggtagacatgggattaatgtgtggtttgggttttcctgaagcaatgcctgagggccttgcagcagctgagttaggaggtaatgccaggaagccrgagcccaggacgagtgagtgaaggaaaggaggagggggaaccagcagagggagcccctgggggcaacttgggctccatccgctgggaccttctgaaggaccacagtggaggcactggtccgccaactctggttcccattggtaaggactgcacttgggatggctaacacctcacacttgcagtctgagaaagctcccccagaaagagcattcgtgtggcggagcatagagactgggcactgccaacaagcacagggayggcctaccagggctgccgctgctcttcaaggggccgccagggccatctgccgcagagcgcttttgtaaaaaaatggccacctaggtagcatgaggcatttgaagatgaaaattttcccagcacttctgcgaagggtgtgtcttggatcattaaaacagtctttgagaatcttgagcccaaaagtttattataatcaatgtttaattgcaggaatttagtcattagaatatgtgtgtgtgtgtgtgtatatatatatatattttaaatatatagctttaaaatattttgttgtagtttataaaattatataattcattataattatataaygtactatatagttacattatttatgtaatattcttatataattttataacatatatagatatgtcccagatatatgtaatatattatgtagtatattatatacttacactataaattataataattaatmattacaataattaatatttattataacagattattatattatatattttaatgtaagtatataatacactacatattatgtaatatgttatatatagttacatgtatgtaacacatttattatgtatactttgaactttgacctgtctgcaaactttaatatcttccaaatacacacaaaaatcctgtgacctcagctctagggactgctgtagcacagcatgacaaggattctatatccagtagaacctaaattccatgaggctagatgtttgtttgctttgttttactgctatattcccagctccacagagtacctggcaaagagtaaacactcaatagatgtttgtggaatgaatgaaagcatcaacgtctctgattgtcacaccataataatgcacatttagggcactgtacagaggaatttttacctccatgttctcatttaaacattaaatcgttccatgaggtaagaggggaattttattcccattttacagtggtcaaaactaacgctcaaaaagrttaatgggcttttccatgaccacatggaaggggagtggaagagctaataactgaagccagtcactgctcaacactccagtaaatcctgagaccatagatgggtgcagggtgcaaggggtcgataygaatagtatggacgttacaggaaactttaacaaaaactttaattataaaacaagttcttaccttgaaaagaaatggaattatcccctcagtgagagtcactaggaattacttttagtaattcatcacttttagtaatttagtaaagtcatccttctcagtgagagtcacaaggaattacttttagtggctctaaaagacttaccatttctatctctgatttcatttactgtagctctacagacaatttactattgtaattgtaaatgaaatcagatagaactggaaagtcttcacggaaggactgttgccaagtcatgactccatctcagaggagaaacaaggtgcctcctgaaattcacactcacagcacaaagtaggactagcatccatgtgcagaatgttcagatggcctcgctcgcctgcaaggatattgcttggttgcataagaccccttatcacttacaaagggctggaggtggatcttccacagctatgtgcaatgttccaaaccctttattttcatactccaaagtgcatgtgattgttgcccacttggcaaattataaatgggccaattgtgtttcgggttgtgtcatacccattacgggagaaagtagagacaggggctgttccctacaagcaggcctggggcctcagggacgaaatcagggactccaggcagaagcggctttcaaggagagccctatgcctgacagaaatggctgtgagaagacgcacagtctgcttggggcttatttttattatgacaagctgacattgcagtggcctcccgtgttccaccaaaagcagggtttgggggactgttctgaggctcttaaatatttggggaaagtttttttctgaaagctaaaaggagcaaccctctgacattttgttcaaaagccttgttttgcttttctgcaaatgttcatttggaaaacgctgtaataaaattgggctaatggtggtggaatggtttttttcacccctccctagctgctgataacatgttagtagtgggtttaaaagtttgttacccatgatgggcatgtgatctaaaaactttgctgactttctcagcctgcatgtgagtgtagtcaagtggggccttacagccactaagtattgggcttacctgggtttcacaaaatttattcagaagccatttttcccttgaaaaatcagagtccggaaagtggcccattgcaaaaagcagcagctgtttggttactcataaccccggaatgctgacttgattgtaacaataaatggagctaacagagcagaaagaaatgttcaaaacagattaaaaccataggctttgaaatgtcctccatcctgagcatttgctaaaacacatttttaaatctctgatcatcagaccacttctttttcccccaaagtttagtcatatgctgtagttgaatgaaccatgccctgaaattctttccatctttttcttcttttgaagagtcatgtactatcggttttatttgtggaagccagaaggaccattgtttcggtcatggaaacactctgcctgattttactttaatctctgagaaagtctttagagagattctgaactggcattaggcagaaaaggaaatccactccttggagcagtaaaccaggacaattgcttggtgtggacagttacctcagtctggcctctctgcgataggcttttgtgagctcagccttgcaagaagggaagtaaataatgtccaaagtggcagtgtttattcttctagaggcttctgggtccagccaactcatacccattatgtttgtgatctcaaggggatgtttgagcagagaaaacaaagaatattttgccgacgtgcgagttttctttgttagaacttaacacttggcgttcagtggtctttccaaatatgtgctgttgattgggcttgggtgattgggagcacatgctgtcagtttcatgctgtggggactgtgccctaggcgagggggtagggagatcttgaaaatgggaaagaaagctggctctacacaccatgcaagcttgcttctgccatttgcatatgtgtacgtgtcaggggccacacagggctcttcctaaagccctgcttttgatgggacttggggggagtgcacaaacatcagctcctcctaataaaaataagcctgaagcagtcggtatgcttcattcctttgcaattactgtccttgtgctcagccctctgtgtaacagccgtttcattcattttggcctttaccggatggctggggggaattaatcagacaaagaaatcattatagattcaaatcacacactcctccccaaagtaggcttcttgttctcactccctctccccagagaacacttgagtgattttcctatcagtcagcagtgggtcctgagggtgggcaagggccgggggtgctgaggaatgggggcagagtgtcccgaggtgggggaaaggcacagagggagggtgggagggcgctgtgcccagatccccctgagagccgccttcctggctctggtcctgagtgcctgtacatggatggctgcagttgcagttatgaaggtctcagataccaactctttgaaaactgtctcccaaagatggtctttcttttacaaatcgaagtttgaaaagacctgaagatgaggagtcagcatcttctatttgattcccatcctgccttcgccaccctccccagccccacacatacacacaggagataaacaggacccagaggagactgagaaacctgtctgtgaggcctcctggaggcctggcctaggctmtccttgcctgcaagatgccctccgtgagcccaaggagactctttccagaggactatgtcactggggtattggattccagtcagacagacagtttgggagatttggaggagcctacgtggtctgaagtcatgtgtgatagatctagaagtgaaacaagagagttccctgaccaccccgtcgcaggacctgtgacaggggtgtggcacatctgttcggctgtggtgccctcaaaccccttatgggagggggagcatgcagattggcaggtgcaggaacccaggcaagatgctacccacagtacggtctagtggtgggtgcctgtgactctcaaagcccycatgggcaggctacagtattcttttagctctgccatccacagagggctcaagtgttaaccagctcagtgactcttggtacccgacttcctgtctggcatccaggaagaatcaggtcacacacggacttgaaggatggtgaatgtggggattttattgggcgatggaggtagctgtcattggaatggatggggaactggaaaggggatggagtgtgaagatgatcttccccatagagtttcgctgtgctgtggatgatcaactgtctgaccatccccggccaaactcctctcaacgttcagatgctccttctctctccttctctgccacgttgttcttctcctcctctgctcttctattcatctgcccatctgctcgtggagcctggagttggaggtttatatgggtacaggagatggggacgtggcaggccaaaaggcaacatctgggtgtggaaacaagaatgcctgttcccgtttagggccgtgggtttccaggcttggggatggggcctttgccagggaacctccctcttctacccagtgtttccctgtctgctgtctatatcagaaggagccatctggagactaaggcagagtctagggcaatccctgagcagaaaagtgggatgcacttagtcaggttcctgggcatgggcgtgctgggagcaggcacagggagggtgcatagcatccccttccttaggctccaaaacacacccagagagctggtatttccactcctcctaaagaagcatacgtgttatattcaatgtgtggtcttagaaaacattcagtttgcagggtaggtggaaattcctaaaaatataactgggatattggtagccttcagtgaactcaactttcataacaaaatggctttatgctaagactaatcatatgtgccagagttagaaaatcagacatttctttttttaaaggtccccctaaaattcagaaaatcgacttaatattgtatgatctgtaatgtttctgctagagaaagcaggaaagcccacaaagacatgaaaaagacaaaaagaggagatagggaagattctggaataatctactccgtcctcctctgcaattctggctgatgaaacaagcaggcattttatgggtgattgaacttgtgtgttcctaaggcacagggagtgcctttgaaaactcagctcaagtttatagtgcatccccacccagggaggctgagatttcaatctcyaataatcatagaacccaaggagccgggggtcaaaatgagccagagcaagggcctgtaattgcttaaaatattttttaaagtcttttttcctacatcccatgttagatctatggaggccccgatttccactctcccagaatagcccaactgtgtacccagagatcacctgagaaccccatgcaggtctccagcactggaaatgagctagcaattcgattcaagaccgacttgtccataaatgggagaggcttcaatgcgtcatggcaagcagtcactggaggtgagtgagaaaaggaggtttcctaaagtacttaagccgagccctcgttaaatttcatgaaatgcttgggaaaacgtatgaaggctacacactkataacttagtgacatcccaaagggcagcctactgagacctgacatatacccttccctaaaatacgtgataaagtttaacttcctaagggtcaccacatatgtgaaagcaagaatgtaagtgtgtaagtccatggtgagagcagaactagggtgataggccagacccactctccaagggctcrtacctcttaaccagcctccatacctcatgccatagtacagacctttagattcttggcaaatatcaaacttgcaaacattaaatttgtgaatcccaaggaattactgtgtgttctatggtgactttctgcccaagattttaggyagtctaaataaattgcctrttgtatatttttaaactatarcaaaaatctatggcacaaaatagtgtaacagatgttagcatatgcaactactagagatagccacatttgcagaatgcttactgtgtactaggcacttttctaactattttatgaggattatctctagtccttacaaccaccctgtgagggaagtccgcttcatatcctcatcttaccagtgtggacactgaagcttagaaaggttagtgkcttgcccaaagttccacagctagaaaacgtcaaagcacatatgtgattccagactaysttatggccacacttcttcaactctatcataaccaaggtatctatataagagctctcccctaaagttaattatgtaggaatttaaataaacacacacacacacacagacacacacatttagtgtttagattacccctgaatgattctccattattagaaaatagtgccaaagttttctattattggcttatattatcataaatccaagaaatggtgggtcatagagaagacattgaactaacaggtatttgataacatcaaaggaattttwaaaaacctaagtaactgtactatatccgaatattaaatttttaaagggtagatattaaattatttttaaatgcatgcactactagattatcacaattctggaaggaaacatrttattcttccagtatgctatatttttagaggacartgaagaagcagcattccatggctttgtgaaaacgtgatttcatttgcgtttccttttaattatttttaaaataaattttggcatctgtatttaaagtgtttgaagtattytcttagtatcatccatgtcatcccttcttattctgttgggataaatggcttaatgtggatatcaaattcttcagtgtttttagcatcgactaactgattcaagcaaagtaatgtattgatctatacaaccaggtaatggattattttcgagcatccatgattcctctcatgaaataattgtgttccccacttccaggttgtggtgggattttccaggctcccagtggagagatwcattctccaaattaccccagtccttataggagcaacacagactgttcttgggtcattcgggttgacagaaatcatcgtgttctcttgaacttcactgactttgatcttgaaycacaagactcttgtattatggtaagtgacataaatttcaagcattgtctccagtcaaacctcggtcaaaacactgccatataagcatatttagtgaatrtattacttatgggtgtttttaatgtcgawtcataggaaaccaaactattggcaacttaaaatataaggacatttattttttacctaaaaacaaatcaggaagtagataatctctaggttttttagcaagtcagtttctgcgctaccattattagcctgttggcttttcattttgttgttacttcatkgtcaaaaaatggctgcagtggtttttatctgaatgtcctacctgagtctacctctgaaaaaaggaagaagcaatagtgttaactatttctgttttgtttgtgtttcttttaataaggaaagcaaattttccaaaaaagcccctgatatatcattagccagaactgactacaaaagagatccagaaagtatcrtggaatagatttatcataaatgttttagatcaattattattattaagcatctgggattttcacaggattctgcttctcttgagacaaggatatcttgatttgctacttgaacaaatccatgttctgatagaacaggttgggagatgggagtggaggagaaggaatatggctatgaattggtcagatgacaaaaagagtttctgctactgagatgggarrgtttcctkgactcctttacaggacttgcgaagggggtggcttatttgcttggctgcctmgctgaattcaggagggagcacacgaatagacgaatgcaggaaccggggtgaacgaaccctagaactggctggtccctcmtctctggtggragcaggctctgtgcacggcccacggcagcgtccaagcttsttacaatgctcttttagctctgccatctcggagagggtgtctgcgaccccaaragccccaaagggcatgtgttgcaatcagtgctcttttagcatttgccgtccatggacagctaagtgttaaccagctcagtggagggtcagggtgacagccttttacaccctgacctcttgggtacccaagttcttgtccagtgtccaggaagaatcaggtcacacgaacaaattgaagggtggtgaatgtggataactttattaagaggtagaagtggctctcagcaggaaggcgagcttgaaagaggttggaggaagtgggttgcaggagtctggccttccttggctgaactcctctctgaccatagtctccgatgtccagctccttcttctcctcttgacgttcagacacttctctcttctgtgtgtgtgtgtgtgtgtgtgtgtgtgtgtgtgtgtgtgtctgctgagtctggggcttggagttcttatgggcaccagatgggcgcagggcaggccaaaagrcaacatttgggtgggaaaacagggatggttctcactttgagtggcagatccaggcttgagggtggagcactcaccagggacctcaacctcttctaccaagcattttcctgccttctggcccatcactactaccaacacttttaatgaattcctacctgaaactaatgctttgcgcttcatataagagtgaatgaagttctattttgaaggktttttttttctttctgtttttaaattttttggctacctaattttcttttattattgttattattattatactttaagttctgggatacatgtgtagaagctgcaggtttgttacataggtatacacgtgccatggtggtttgctgcactcatcaacccgtcatctacataaggtatttctcctaatgctatccctcccttagccccccacccctcgacaggcaccggtgtgtgatgttcccctccctgtgtccatgcgttctcattgttcaactcccacttacgagtgagaatatgcggtgtttggttttttgttcctgtgttagtttgctgataatgatggtttccagcttcatccatgtcccttcaaagtacatgaactcatccttttttatggctacaaagtattccatggtgtataggtgccacattttctttatccagtctatcattgatgcacatttgggttggttccaagtctttgccattgtgaatagtgctgcagtaaacatacgtgtgcatctgtctttatagtagaatgatttataatcctttggktatatacccagtaatgggattgctgagtcaaatggtatttctggttctagatccttgaggaattgccacattgtcttccacaatggttgaactaatttacactcccaccaacgagtaaaaacgttcctatttctccacatccttgccagcatctgttgtttcctgactttttaataattgccattctaactggcgtgagatggtatctcattgtggttttgatttacatttctctaaggaccagtgatggtgaactttttttttcatatgtttgttggctgcataaatgtcttcttttaagtgtctgttcatatcctttgcccactttttgatgaggttgtttatttttttcttgtaaatttgtttaagtttcttgtagattctggatattagccctttgtcagctggatagattgcaaaaattttctcctattctgtagattgcctgttcactctggtgatagtttcttttgctatgaagaagctctttagtttaattagatsccatttgttaattttggcttttgttaccattgctcttggtgtttaartcatgaagtctttgcccatgcctatgtcctgaatggtattgcctgggttttcttctagggtttttatgattttaggttttacatttaagtctttaatccatcttgagttaatttttgtataaggtgtaaggaaggggtccaatttcasttttctgcatatggctagccagttttcccaacaccatttattaaatagggaatcctttcctcattgcttgtttttgtcaggtttgttaaagatcagatggttgtagatgtgtggcgttatttctgaggcctttcttctgttccattggtctgtatatctcttttggtaccagtaccatgctgttttggttactgtaggcttgtagtatagtttgaagtcaggtaacgttatgtctccagctttgttctttttgcttaggattgtcttggctgtacaggctcttttttkgttccacatgaaatttagagttttttttctaattccgtgaagaaagtcaatggtagcttgatggrtatagcattgaatctataaattactttggacattatggccattttcatgatattaattcttcctatccaygagcrtggaatgtttttccatttgtttgtgtcctctcttatttccttgagcagtggtttataattctccttgaagagatccttcacatcccttgtaagttgtattcctaggtattttattctctttgtagcaattgygaatggsagttcactcatgatttggctttctgtttggctattactggtgtataggaatgcttgtgatttttgcacattgattttgtgtcctgagactttgctgaagttgcctctgtctcagcttaagaagattttgggctgcgacgatggggttttctaaatatacaatcatgtcatctgcaacagagacaatttgacttcctctctatttgaatatgctttgtttctttctcttgcctgattgctgtgacctgaacttccaatactatgttgaataggagtggttagagagggcacccttgtcttgttccgggctacctgattttctaacaaaaagtttttcatctttcatttgtgtatatcaacatttcattcaaatacaaaccagattctcttggttactggatctttcaatgttagtgtcctgatagtttcctacacaagatccaactggctagcttctttcaaatttaacccaagaaaactcaaaggtttgtttacatttttccaagtagtccattttaatggtatgatttcaatattattttacaagattaggttattaatgaaagttaagtttatttatcactgtatattaaccatccaaatgagtcttcagagtctaagttggctaagcatcatgcagactgaaagcgtagaacatccagctactctcctgacaaagaccatttygaaattttggatgacatttacaaacatctttctaaaagtagccartggttcatgaggtagtgtgaagtttctgagtgaatatctgagagaggtgtgagtccagtctttgggaccattttttcctgcagggcctttactgatccacaaaggtttagcagctcttctgagagcctctcaggacaaagaggaccaaagtttgagtccagagctttgttagagtggcagtcttggtaagccattcgtatcttaggtaaaatgaaaggaaaacagccttcactgagactgcattcaatatttgagttacctgagtgaatccccaaaatctgaagccatgaaataatgagagtgaatcttgtatttctcgtgcatctaggcactggacatccagcaaaagcaatttaaaatcttcttcaaagagagatattaacattctagacatcatttctacctataatttttcatgtgtaatagccgattaaataagagagttccctgacctccgttacaggacattcaacaggggtgtgtctcatctgttcaagtgctgcakgttcaaaccccttatgggcagggaaacatgcagacaggggtgcaggagccggggagagtgcttctggactccgggccccatggtagcatctaggggtgggtgcctacaactcccagagccctagtgggcatgctacagtgctcttttagctctgccatcctcagatggcttaagttttaaccagctcagtgtcctcttggtacccatcttcttgtttggtgtccaggaagaatcaggtcacacatggacttgaaggatggtgaatgcaggggttttactggatgatggagacagctcccagtgggatggatggggagctggaaagggggtggaaagggaagatgatcctccccctggagttcactgtcccatggccgatttcttctttgactgaccctggctgaactcctctcaatgttcagatgctccttctcttctctctttctctgctgtactgctcttctgctcctctgctcttctatttatctgctcatctgcttgtctacttttgaagcctgggtttaggggtttatatgaatacaggataagggggtgtggcaggccaaaaggcaaaatttgggtgtggaaacaggaatgcctgttcccatttagggccatgggtttccaggcttgagagtggggcctttgctggggaactgccctcttctacctagtatttccctgtatcctgtgtgtatcaccaacacactatcaaagatagtcatgtacttgaggggacaatataacaaaaatgagatgtaatatgagtaagagacaatagaaacaaatccactaatatgccagatagtaaagttacctggcacacttgctrtacaactgtgattactcaactcatggaaataaaagtcaaactgagaactttcagcaaggaactgcatactatagaaagtgacattgcaatatgaagaagacccaactacaaatttgagaactgataaataccatagctaaaattaacacctcagcagaaggctttttggggggactaggcagagatgaagagataaatagtgactacagagaaacagtgaactggaagataagtcaagaatctactcagaaaaaagtatggataaaaaaaggatgaaaaatatataagagaggttaagacacatagarsacactcagaaaatatataacacacasttaattggagtctcacaaggaaaagagagatatatggaacagaagcaaactttgaagagctactgactaaaatttttccaaaactggtggaagtcatcattaaaaaaatagaatctcaaggaacccaaacagcaaagcaggataaatagaatgacgtacttttctaaaaaaaaaataataataacaaagataaagagaaaatgttacagtcagctagaggagtaggtaggtggggaacagattgcttgttagaaagtagagactaaatgctgacttttcaaccaggattggaagtaaaaaaaatttttttaaagacaatagactgatatattcagattaaagaaaaaaaagtaactaccggccaggaactctatgctctcctaaaattcctttaagaatgaaggtgaggatgtgtatggtagatcacacctgtaatttcagcactttgggagcatgaggcaagaggatcacttgagcccaggagtttgagaccagcctgggcaatgtagtgagaccctgtctctacaaaacagttaaaaaattagccaagcatggtggcacagacctgtaatcccagctacttgggaggctgaggtgaaaggatcacttgagggtggaaggcaggagttgcagtgagcacagatcttgccactgcacttcagcctaggcaacaagcaagaccctgtctgttaaaaaaaaaaaaaaaaaggaataaaggtgaaataaatattgaagcaaaagaagggtcttggcctggcgtggtggctcacaactgtaatcccagcactttgggaggcctaggcaggcagatcatgaagtcaggaggtcgagaccatcctggccaacatggtgaaaccccatctctattaaaaatacaaaaactagctgggtgtggtggtgtgtgcttgtaatcccagcgacttgggaggctgaggcatgagaatcgcttgaacccaggaggtggaggttgcagtgagccaagattgcgccactgcactccagcctggcaacacagcgagactccttctcaaaaaaaaaaaaaaaaaaaaaaaaaagaaggtctttaagagaagtttgaatgggccagagacaaagctacttatagttttgaccatggtgggtattgctctaccccttgtttcctccctcgtctgcatggtgttcttttgtttgatacagtgcagaatccatggaatttaacatacaaagtgtgtcaccaaaccaaagcctaggtcaacagcatgccagcatggctaggattttccctcttgtggtcatgaggagggttttccacctacatgggacataaacacacagacaaggttttctatgaacactgccrtatttcagcatgcagctgggcttggcttaacaaagtgcagcaggaggaaacagcaggagtgaaacctcaaatgtgatcgggtcttaggcacggagatggaaaataaactcaaaaacaagtgctgggaggagtttgggctggtaggtaaggcaaaatataaaatgtaataatagtccaaacaagttgtcagaatcagataatgctgtatgaagtacagttgactcttgaacaatgctgggattagggtcrttggccccctgcttccctgtcgtgcagtgaaaaatctacatacaactttcaagtcccccaaaacttaactactaatacctatgacggacagaaggcttaccattaacataaacagtcaattaacagatattttatatgttttatatattacatactgtattctttcaacaaagtaagctagagaaaataaaatgctatcaagaaaaytgtaaagaagagaaaatatatttactatttattaagtggaagttgatcatcataaaggtcttcatcctcatcatcttcacattgagtgggttggggaggaagagggagggggcgctagtcttgctgtctcaggggtggcagagacggaagaaaatctgtgtttaagtggacccaggcagttcaaacctctgttgttcaagagttaactgtaggccgggcgcggtggctcacgcctgtaatcccagcactttaggaggccgaggcggggggatcacgaggtcaggagatcgagaccatcctggctaacatggtgaaaccccgtctctactaaaaatataaaaagcagccaggcatggcgggaactcgggaggcagagcttgcattgagccaagatcacgccactgcactccagcctgggcgacagagtgagactccctctcaaaaaaaaaaaagagttaattgtagttggaaaatcccagccagtgggcagaagagacattagaagcaaatacctctaagaacccaggcaagacattaaaataagaagtgagccacaccgatagtgtgagtcagcacagtgcttcagctaagaaatctagctctaatatagggtggttctggggctgagcctggactttgtgatattctagctgtgttctttggaagaaagttaacctttcagcttcagtttccttaatggaaatggggataataagaggacctaggtcagatttattgttaggtatttgagataatatagatgacctgcttgctgtcacatagagagttctccacttgtgctagccattatgatgctgctgatggtgagtgttttgggggaggttcatttaatgaggactagaagaagagacagcgcggaatactaggagcagaaatgcacttagaagtcagagtcagacatgcatgcccgtgttcatcgcggcactgtccacratagcaaaggcatggaatcaacctagatgcccatcaatggtggatgggatgaagaaaacgtgctacgtatacaccagggaatgtgacacagccacaagaatgaacaagaccatgtccttttcagcaacatggatggagctggaggccataatcctaaatgaagtaacacaggaacagaaaactaaatactgcatgttctcactcaggagtgggagctaaacactgagtacatatggacacaaagaagggaacaacaggcgccagggcctacttgaggttggaagctgggaggagggagcaagttgaaaacctacccatcacgttctttgctcattacctgggtgacaaaatagactgtacaccaaacccccatgacaggcaatttacctctatagcaaacctgcacatggacccttgaacctaaggtgaaaggtttttagaaaaagaagtcagggtcaggacttgccgtctgtaattctgggcctcaagctcttaagcagaagagcccactttcgaatcttcctcgtagtatagcacctaggatttagcatatctagggctcagtgctctggaatcattgtgaaaatggccgacatcattcatttgggcctggaagccagggaagcgttcacactggaggcgacatttaagtggcagagtctcgccagtagaaatgcagcagtgaggccacgaggggaggctgcaagggaaggatgrggaaatggtgcacgcacatttgggaataaaaaatgagagtgttgtccctggagcgtgaagaaatgcyggggagcatgtggagaccaaggggctacagaagacatctgagctctcttctgctccagttaagaatttgaaattatcctataggtagtatggagtcagtgaaaattttctgtaaaacgggaataacatactcagagctgtattctacagtgacaacaggyagcagtgtgtgaagaatggcttggcagagaaaaagaaagatggtagcatgtctgtttgggaagcaatggaaaaagcttggatcagaggtgataaggtctcatagtaggcagtggtcttgggacacatggagagcgcagggacacgtggagaactgtcacggtggcagtcactagaattagaggctaattacatggtggtgggtggggctggtgatagagatggtggggggaagcctatttgcttgaagaatgaatgaatggccgggagtgatggctcatacctgtaattccagcactttgggaggccgagacaggagaattgtttgagctcaggagtttgacaccagcctggaccccatctctgcaaaaaaattaaaaaattagcctggccaagtggcacatacctgtattcccagtaactcaggaggttgaggtgggaggatggcttgagcatgggaggtcgaggctgcggtgagctgtgatcacaccactgtactccagcctgggtgacagcatgaccctgtttcaaaaaaaaaaaaaattgtgaatgatgaggccattaactgagtaaagggagtagatgatagtgagtttgacttgtaaacttttgggtttaaatattatatagtttgacataagagttcagagcttgggataggatctgagctagacatatacaattgaggataatttctgtatattgggtggttattaaagttgtgggagtaggtatgatcacttttaggagtattttaccaagagaaaggggccaagccaactcytggggaaacactgccatgtaacgggtggatgaaagatcagaggagaggaggctgaggaggtgcgctgagtgcttggtggagaaccagaagagagtggtagcattcaaaccacgagggaagctgaatttcaagggtgggtgatcaaaggtatcaaatcccatgcaggatgccaacgagcgtgaggattgcaacaaagcccctggattccgtctttaataacctgcaaggagcaggattgtggcgggtggtggtggaagactcaaggtcacagtggttaggaggtgcaggagcttctgagcttttccccagagttacggaaatgagtggcataaggagaaaatgggcagtaaccaatgggttaaccaaaatcagtggagagttggtttttwaaaaaaaatggagaaatataagttgtgtgaagagggcaggtggaaaaagagcagctgaatgtgagagccaggcgaacagtagagaaaatcatgttttcagsacagagacaccaagaagcgccagattggttctatgaatgttgtaytttttagaataagaaattgaaacccatggcttggcacaagatttttctgatttataaattcattatgttaaaaattgcataaattgtatacaaactaagtcattttttcttggatgatttataaatcaactttacaaaaagataaggaagttttaaaagaaaacaagactgtccaggtaagttggggtagagatctgctatatatttgccaaatgtgcccacttaaggggacaggaggtctgcagaggtttggaaccagaccaggcaatgccctggcaaggctggaagcttgttagttagttgtccagggattcatgaaggccggagttgaagcaccagccctctatctttacagccagatggacactggacgggaaacgtaccccaaagtccaacatcttacataatatctctgcagtctcagttcatataaagccaatccttcattttggagacattcaagttaatgtcctgktcctrttgcttagacagagttattagcaaagagaaaaatattcagttgccagtgatgctgtcagataatgttggggttcaggagatttttaayagagttcaagtgtactctttaaataccagtgaaaattatgctggaatgggaccagccatcctgttttttcaaaacttctataacaatttgggttgttagaagaagaaatagtaatttagctgtatgttaaatatgatttcacatatgattaactgtcataaacctatagatacatagaatgttaaggttggaagaagaaagcttagagttcgtttgctgttgtcacctaattttttwaaaaaagacattgaggtggaggtggggcagtgcaaaaaataaaaattaattaaaaaataaaaaagatactgagatccagaaatgtcagggtcaaggctaagtagaaattaacagcaggatcagcactaaaacgaaagccttatgcttcctacgaagtgaataagtattttggtaaaatataaaaattgcagttatgtacaggawacggaatggcagactagaaaaatagagggagaaaataaayttagggtcaggctggagccactttgattttttttttttttttgagatggagtttcactcttgttgcccaggctggagtgcaaaggcgtgatctcagctcactgcgacctccacctcccaggttcaagcaattctcctgcctcagcctcccaagtagctgggattacaggcatgtgccaccatgcccggctaatattttgtgtttttagtggagatggggtttcaccatgttggccaggctggttttgaacttctgacctcaggtgatccacccgcctcggcctctgattacaggtgtgaatgctgggattataggcgtgagccaccgtgcccagcccactttcacttctatatctgataagcccagccttcatttgtcaatagaaggaaaagtgttaagaattcaaatatgaaatggaaagtgtccttgctttgaagtcaggaggtcagggtttccttcattactttccccttcggtgccaaatatgtaccagacactgccaggygcttgtttctggacgtgtaccacccctcaccctcttcatggcttggggttcttagtttgcttatttagaaaatcaggtgcctggggaacagaagcagaaagaagaaaactaaggaagaggattcagttaggagttgcatttgtgggtaagaaaaggaggacaagatggcagatgaaatggccactgagggcccagtgacgtcagtggtggtttcatcctcaaagttgaagtcaacctcaggcagccaccaggcttcacatgatctctgggttacaagactatccccatactcttctgggaatacaatagaaagctcttcttagagtaggcctagtccctataggttccaaattgaggcaagctaagcccacatgtaacagccattactcttggtgtcatggaaacaaaggcaaaattcgccaagtagaagaaacaaatgaacatttaaaaatggaacagtagactgggctcagtggctcacgcctgtaatcccagcactttgggatgccaaggcaggcggatcatgaggtctagagattgagaccatcctggccaacatgatgaaaccccgtctctactaaaaatacaaaaattagctgggttttgtggtgcatacctgtagtcccagctactcgggaggctaaggcaggagaatcacttgaaccccggaggcggaggctgcagtgagctgagatcgtgccactgcactccagcctggcaactgagcaagactccatctaaaaaaaaaaaaaatggagcagtaatacacagcctccatcctctttcacagaacccacagcagtagtctttatatcrccaaagcaccaatgtttttgatgcatgaattgttaatagatgcatagmtgaataaatgaatttttgtcatctctgctcctgcaatgctcagtgctttggtggaaaatctcagaggacaccatygggaatgtgctgtactgagttcactccctggcattgttattgatatacaatcttcgtgttgtgagccacatgagcacttagataacatcacagaagtgcgttttctagaattgcatgctgctataatgagaaaagggaaaaactggattttttgacttctrttgaaattgtgatggcatcgagsggagctaatcaggaagctggacttgmaggcaggtttcaacacatttggtaatatatttgcactttctgctcagtcaccttcaagtgtctggtgtaattaaccttgggctctcctcaatgacacatcaggagcatttcttgctaaggaagctgtgggacccatcggctgggcatggccttgtctggtcagcacrcaagtggcttcattacgtttcctttcacgaaggctgagtattaaagtgacctctgrctgacagttwaattgcttaattagagcctttcttctaagtcttcgattcatgtagctctgcaagctcttattgatctcctagaaaggctgcttgtagctcagtgtgagagcaggaagaggaaagtccgttcagcagcaccagctggcccctggagattcctgacctctgcttccagcatcctctttgctcagatcattggaatgtctgctttgtgagaatcagcaaggagcagctcaaagcaagccgaccatggtccaggtcctgcctctcatttggaggaaaacacaaacgagggctaacagagcctggtaccaaaaagcaaaagcaaaagcaatatgattagtaacttctgaagctttttgtggctatctaggagaaagaaagaaaagtgtctgatgtgatcyggaaaaaaaaaaaattccctgtgctcccacccaaagctgcaatgtctgttgttgttccattattcgacaataaaatgcagggtggaacagggcagatacctaacgcagcatcctcttttgttgtatttttgtaatacaccacccatgatgtgtttccttttaaaacactgatggtttccaaagcagagcaaacagacacaggaataatagaactctgggtttcaaagagatgatggaaacaagtcttctttaaatatttactgttttacaaacaaatccatgacagaaaccagtctctctctctcccctcctcttcctctctccctctcttttcctctctctctctctcttttcctctctctctctccctgtctttctgtccctctttctttccctcttcctcttgctctctctccctctcttcctctttccccctctctctccctctgtctctccttctctctctctccctgtctctccttctctctctctccgtctctccttctctctctctccctctgtctctccttctttctctctccgtctctccttctctctctttctccctccttctcttcttatctttccctttctttgttcytctctctccctctccctttttgtctctttctctctctcctccctgtatctctctctcactctctctttcttccctccctcctttaygccccacsacaggaatttttgtttccatctgatacttgaggatgatctttttcaaacgtttatcttgtgacttgcatttgtattaacatgcttagctactttgcttcctggtgcgggtgtcttattaacaaccaaatgctgagccagtgctttgaatctgcaagatgaaggaagagttgagttgaagccacagctctcaatctgtggacacgggtttggtttggcttggtttccatttcagctcagactctccttaaatgtttatttgtgaaagtaaaacgagcatcttagatttcttctcatgtcaacatttccaggaatctttgagtcagtgctcgcaacaactgcaartttttagagtttatagtctcttgtaagatgtgaagactgagtgggagagtgtagmacaaagaaataggggtgaacgcatcgtgatatgagatgtggggttgtgaattgaacttagtattgaatttccaaggagcgtaactggaaaaaaatcactgacaaaggaaactgatgcttcctccttcctcagccccaagaaragatgctataatgagtaatattttcatttccttccgcattcacatttatgactgtaacagcttgtataatttcctgagggatttccctccctatcacttaatgtttcctctattttggagaagttcgtattccaaagtggsaattccattagcagstataccgccatattataacatgtgaaaatacctcatggactctcratcctcaaaatcactttgcacctccatgtgaattatctctcctgtgccctaaatgtcttattcttcaccacatttttgcaccctgctaagatcaaaggcaatccagggcaggagacctgtgttaccatctggagttaaaaatgtagcaaagcgggactggcacagtggctcatgcctgtaatcccagcactttgaaaggccaaggtgggtggatcatttgaggtcaagagttcaagaccagcctggccaacatggtgagaccctgtctctactaaaaatatgaaatgtagctgggtgtactggtgcatgcctgtaatcccagctactttggaggctgagacatgagaattgcttgaacctgggagacagaggctacagtgagccgagattgcaccactgcactccattctgggcgacagagcgagactctgtctcagaaaaaaaaaaaatgtagtaaagcataagggtccaggtgagaargaggccacactagaccagagaatggcggttggaccagagaaggacaaggaggagcttyatatctgaatccaggaatagaatcaagtttatgtggcaacgatagaagttstgggtttatgtattgaccccagacactgygctctttgttacccattctgctaagtgagccatgctgggaatcccatgcacgttcactggaatggaatgcaggacagatgccaaccacttggaaagccacrggagcccartayaagactttctcaaatgctactgaggatgcttgattgcaggttcagatgcaaaggatgggggactcccaccctatttccagagctgctgtggttttctttcttggagaccgtgaatatctcacttagcttcacagaatcatggtctctcaacattctaactgaatgaatacaacttgatttcaccttttctctaggtttaatcatacttggtcggacgtcagacagatggggtttgtatattggctctgcactgctaagcgtgtgattgggcaagtcatgtatgttttcagagctcagttttccctgctgcaaagtggaactgttaagaatcaaatgtaaacaaatgtatttaaagtacctatcagtgtctggttcagataagtatttgctgctattcctaatttttctattacaatgactcctgcttctattactattaackctatgttaaagatcttaaggaatcttttaaaaaaattttctccctgagcaagatgaaacttagtaaacaagataaaaaatccagtagaaaaaaattcctcacttcctactttccaacaatctcagggaatatattcctgtttttttttttttttttttagaaataaaaatacagatattactgaggaagctacaattcatttccccctcaktcatgaggggtgcaaacgatgactgacatttcagtcaggtggtcacgagccatttaatcaccccagggttttgattacagcagagaggggcagccgctgaagtgctctgcatcacgtccaygtcaatcacgtggtctttagtgcttaggcaaagcatgcgtgattactggtctttatttcgtgcaatttaaaaatgtatgctcagctttactttagtatgtgatgttacattttagaaagcgcacgctgtgcactgagttgttttgagactgaatggaaggaagacacaaatggaaggcaggggaaatttcagggtgttgtagtggcctaggcaagatgtaatgaggccccacaccaagacaccagagagggacatggatgaagtagagggaaggagccaagcgatacatcggacaaacagatgttagaacatgctgatccactacatgtagcagggatgggggcggttccccaaacggtctggccgttgggtacatgcttccggcatttactgtggcaagaaatgtaggtaagggagaaatgagagggacaggaagagggcttcagtttgagacactgattttcggggtttgtggaacatggaagagatgatgtctacgatacagttgtctatacaagcctagggcttaggggagagggctggggcacagttgtagatattaggcaatgaacagatgctttggagatcttaaaacagaagccacgtccattaaacttgatacattcctggcggcagcaagaggctagattaactggcgttagtagccatctggcttgggtactgcagtgctgttatatgaatagtgccctttcatgtctgtatgtaatcacttatgcatccgagtgatgaaacactaaagaacttttaatatagattttatttttaaaccttacatgctcctcatattaaatttgtagaatacagaaaagaagaaataagaaattaatgccatccttagtattacaatatagatacaagctattgaaattttggtttatttccctcacaaacacacacatacaaatatatacacgcactcatgtacacacaaacatgcatagttaagataatattatatataattttgtatcttgcctttttcacttcatattattcgaaattttcttaaatagtttctttggctagtcaatgaaatggacgtgctgtaattcagttagccacggtttattattaaccatttggattattaatgggttttttcttttcttgttataacaatgctatgaggagtatctttatatgtgaatcttagtacatttcctattatttcctttatatagcttttcttttctttattgaacactctactatgaaatattttaagtatgtagagaaataccgactatataatgcatacaaagtatataacatacaaaaacttctccctgtccagactggccaaatcttcatattttgccacatttgcttcaagttcttttgttttctcccaaacagaaatgaactgttcaagacacaggtgaagtcccacrtgctcctatcattgatcccatgccctgttccccgtcccagaggaaactgctaatgagatttctggtttgtgattcccatgaaggtttttatagttttttcattatatgcatatatccatacacactatgaaatattattttgcatattttaagactttatgtacatcatgtcacacgctacatatccttcttcaacttgctctattcactcattattctgtttttcacattttctrcattgtaatgcatacagatctaatgcattcttttagtcactacacattctattttatatatgcaccacaagtcatttgcccattctcctgttaatgaacatttaagttgcttgcaatatttttccttagcaactttttgtaccgaatattcttgaagcaatatctgtatgtaaccacctaagactttctctagtgtaaacctgcagaagtggaattgctagcttttaacttttctgtatgttaaatttcgttagaaatttatatatgaggccgggcacagtggctcatgcctgtaatcccagcactttgggaggmtgaggtggatggattgcttgaggtcaggagttcgaaaatagcctggccaacatggagaaaacctgtccctactacaaatacaaaaaattagctgggcgtggtggtgtgtacctgtaatcccagctgcttgggaggctgaggcaggagaatcacttgaacctggaaggcagaggttgcagtgagcaccactgcactccaacctgggtgacagagtgagactctgtctcaaaaaaaaaaaaaaaaaaaaaagaaaagaaaagaaaaaagaaatgtatatatgagaatttctggaacgaaatgagaaaaacttaccttcatacttgtaatcagtttccacaaaactttcaatacattgtcttatttgatctttacaataaccttatgaggctgcaaggggagtttacctaccctcatttttagatgaggtctctgaggtggttactgcaaagagcagtacagcatgtgacttgaatacagcactggacagcctcattcttcggaagcctttgttcttcattccacacccgcagacttaccccagaacttaccagcttaagacaacaacatttacagtttccgtgggtcaggaagccaggtgccactcacctgcrtgcttcctggctcactcatgtgaatgtacacagggttcagttccttgcaggctgttggctgaggcctcccttgactccctgccacacaggcctckccacggagtatctcagaacayggcaccttgctcaccagggcaagcaatagagaggacaagagagagtccaacaagacagaaagtgctagcaagagggcaggaaccatcttttctcacctcattatggaggtgacagactatcacttccattgtattctgttaattagaacmaatcacgaggtctatcccatacgccagggaggagattacacagaggcatgaataccaggacgtggggctcactgagagctgggtcagaagttgcctaccaccccccacccctacaatctccagttggaaaattttcayttcttatctctcccactcctacctacccatatttctggacaacccccaccccaccccttggttctcttttcttttttgcctccatagctttctaattccctacttcatttcttacacagcaatttagctcccactttgtctcactttgatactagaggctaacatctatcacatgcttactacatgccagccactctcctaagtattgtatcttttaacttattcttgtgaacagtatgagctatatattcatattaatccaattttgcagattaagaaatttagcaacagatgagaaagcaaagagaagggggcaacttgtccccaacaacataaaataacacctcccctactatactcatgttctgagagcctatgaagatattttcgtcaataaagattgcttttccggccgggcgccgtggctcacgcctgtaatcccagcactttgggaggctgaggcgggcggatcacgaggtcaggagatggagaccatcctggctaacacggtgaaaccttgtctctactgaaaatacaaaaaaattagccgggcgcggtggtgggcgcctgtagtcctagctactcaggaggctgaggcaggagaatggcgtgaacccgggaggcggaggttgcagtgagtcgagatcgygccactgcactccagcctgggccacagagcgagactccgtctcaaaaaaaaaaaaaaaaaaaaaaagggattgcttttccctctaaaaggaatcctgccaccaacttttaaataatgcaacatgcttttaaataatgcttatttatargacaaaggtgtgtatgagaattaaaaagttccctttgcttggcttctttattttcccacattaccgttctttagaactatgatcacaggcctccagaactagaaatgccaccaggaagggatgttggtctcacacttgaatggttttcctcctgtgtcacttgacatgtgacaaagttgaacacatgttaactttagaaatgatggacatttatgcaaatctcctcaaggtatcgaagcatcaggtatgaaaattaaggccgggcactgtggctcatgcctataatcccagcactttgggaggctgaggtggcaggatcgcttgagccaggagttccacactaggcaatacagcaaaatcccctctctacaaaacatttaaaaattagccaagtgtggtggtgcacacctgtagtcccagctatttgggaggctgaggtgggaggatcccttgagcccaggaggtcaaggctgcagtgagctgtcacaccactgtatgccagcctgggtgacagggtaagaccctgactacaaaaataacaattataatactaattaaaagaaatttcataaatgtttggcttagttctcacttctggctagagctgaggatgtggaggggacttgatagcaccataatatatcatgtgttcagaatactctgggccttggggacgggtccaatgtcctctgcccacattctgcctctgccttctctcaccctgttggtgaagggcccctgggagcggagtgcatgacattggctgtgccctgtggttgggccccttcattctccttcagacctggcatataggaagcctgcccagaaagcagccgagctgacctccgtccccctgtgactarcctcttacccacaattgtgtctactatgtgtttacagcattgaatctatgagggcaaggacagctgtttcttaactmagggttttcctcaaccctagttctcaatttttagagaccagcaactgtcatacatattcatttattcatttgttcatcaaacatttattgcctgtatgtgccaggttctgtactttttaaaaagtctcctatttttatataataaagttaagctttttgtttttgtgggggttttttgtttgttttgttttgagatggagtcttattctgtcacccaggctggagtacagtggcaccatctccactcattgtagcctctgcctcctgggttcaagcaattctcgtgcctcagcctcccaggtagctgggattacaggcacacgtcactacgcctggctaatttttgtatttttaatagagatggggtttcaccatgttggccagactggtctcaaactcctgacctcaggtgatccacctgcctcggtctcccaaagtgctgggattacaggcgtgagccactgcacccggcctcatatgtattttgaatatgtgtgttagtatcttggcattttataaaattctggatattttacaaaaagactggtcaacttttctgtagaaattaaatgaccactccattagatctgcctctgttttaagagcttcggcagttagaattctctgggggacagtggccactttttattttgtggcttcaacttcaaatttttattttattactatcatctagaaatgaattagttgacatgtacaaagttttattttgtttgtatattgccctgacttttaccacttaagtaacgatcagaaaatcaatgctgaggcctagcaaactcttggcagtagacttaagtaagaattatatgttatattaatatatgtgtatccaatagtaatatcatttgctagctttgccttgggaactaaatggaagttaaggtgaaattcatatcgataatttttatgactttagaattgtaaatgaatgggagcaaggtttctcatattttcttccttgaagtgcttttcttgtggaattttataaattgaaactttaaatgtgagttgttttttgtctttttttttttttgagacggagttttgctcttgttgcccaggctggagtgcagtggcactatctcagctcaccacaacctctgcctcctgggttcaagtgattctcctgcctcagcctcctgagtagctgggattacaggcatgtgccactacatctggctaattttgtatttttagtagagatggagcttctccatgctggtcaggctggtcttgaactcccgacttcaggtgatctgcccacctcagcttcccaaagtctgggattacaggcgtgaaccaccacacgaagcctgagaataatgatttgatattataagtgttaaaaacactcaaatgaaagaatttatatttcaaaatctgttaaaaatattctccctccttgatagcctgaggtttcaaaatttcataaaatgacaattaggtacataaaacttaataactataatgctacggtttgaatgtgtcccctccaagttcatgtgctggaagcttaatacctcctctagtgtcaggaggtatggcctttgggtggtgttcaggtactgaaagccttgccatcatgaatggattaatgttgctataaaaagggcttgcaacaacaggttctctctcttctgcacttctgccacttggtgacatgatgttcctccccacaagaggatgcaccattcaaggtaccaccttgaagcagagagacccggctgtaacttgctggcagcttgttcttggacttcccagccttctgaactgttagaaataaatttctgctctttataaatcacctggcctcaggtattctatggtatcacaaagaagcagactgaggtgtgtcatgagcwttttaaagagaagtaacatggtaaatctagaatttggagagagaagacgctgctactcactagtgatgtgaacttggatgacttactagcctacattgaatgagacagtagtttaatagcttagcacttgcctccctgtctttatttttatagaaaatcacacaggttaggatgtttgtgayggagcttgtaaaattataacatgctcatcacatttggggtgtcattggtatataatttgaattccgggacacatgaaaaccttctttttattgagatggagtctcactctgtcacccatgatggagtgcagtggtgcaatcgcagctcactgcaacctctgcctcctgggttgaagcaaatctcatgcctcagcctcctgagtagctgggattacaggtgcccaccaccatgcctggctaattkttttttgtatttttagtagagacatggttttgtcatgttggccaggctggtcttgagaaaaccttctatttttgatccattccttgtgaagtattacttcagccagatgaattttagcagaggtcttgtaattccaggacctcaggggctgggggtaggggaaatagctgggaagtctgtaaagcttctaggtgtgcccctttcaaaggacccccaaggaaatgggtgattcgggtgattttctgaagatttcagccttaatattttagtttacttttgttccccttatttcctcttgtcccttgagaggattccaaccactcagactgaaaacaaggactgtgagagggaagaaacaatatgtacttattccttggacctttgaatttcggagaaaatttttttaaaaccagaagagtcttattttgtgagtccatggacttgcaaaatcttagagttttttcttttttttttttttgagaagtctataaacaccatagaacccattgttccactagtttaaaaaattaagaaatgctagacacttaggttgattccatattttggctattgtgactagtgcttcagttaacaaggaaatgcagatatattcaacatacttatttaatttcctttgtctgcttatcccaggagtgagactgttggatcatatggtagctctatttttgattttttgagaaatgtccatactgtttttcataatggctgtatcaatttacattcccatcaatagtgtgtaaaggttcccttttccccacatccacaccagcccttattattttctaattgggattaagtggtatttcactgtggctttgatttggatttcactggtgattagtgatgttgagcattttttcatttacctgttggtcatttgtatgtcttctcttgaagacaaaaagacttatcaatggatgaatggatttttaaaatgtgatatatataaacaatgggatggtacttagcaatagaaatgaacacaatcctgtcatttgtggcatcatggatgagcctgaaggactttatgttcatggaaataagccaggcacagaaagataaataytgcatgatgtcactcatttgtggagtgtaaaaatgctgatctcgcacaagtacagggtagaatagtggttaccagaggctggggacggtagcagggaggaaattatggggagatatttgtcaaagggtatacaattacagttaggtaagaggaataagttctgatgttctataacacagtagggcacccacagtaaacaatattctggtttataaatattatagtgtgttaaaagtaactagaagagaggattcttaatggtctcaccacaaataaatgataaatgtttgaattgatggacatgctgaataccatgatttgataattacacaatgtatatgtgtattgaaacatcacactatccctcatacatgtgttcaattattatgcatcacttaaaaccaaaataaaaaataaatataaactrtatatattcataaaattgaatcttaaacttttataaaaatgaaaaaatgctattctaaacaaataaatgaataaattatcttgagagaagtaaatagtctgtgccttaagattcaattggtgtattctccatactctgtaaccacagatgttctaagaaggtattcattatcctttgatattaaaactaagacagtattaatagaatattactacaagcttaggacactgtatctataaccttaggacagcataaaaccaagtatagagataataaagacttgaattaaaccaatggtggtgatatttgagagtagactcaagtatgaatgtagtaagaggttttgtagtgatggtttaaatgtcattttgtctactgtttacagtgttcaacgtgttcaaaggaaggattcatactagattggaaattataatttgaattggttagaaaaatggaatttagtttttaatcaatctttgttgaatgaaaatcagtcatcaggtttcatttattggagatatatatatatatatttaaattttgaacattaaataataaaaaagaaaagatttgctgctccagaacagacccacatttgttttaaacttattattgtaagagctttagctcctcagaaagttaaaaatcctattgatatttgattcatgggcttgtataagccaaactgagaatatcctgccaatcatacctgtggctaaagagaacatgcagaatcatacctgtgtgctaaacagaacactgattataatcatcaccagatttttaaagtcacttgcgagtamcttccttacattgaatctccgaactttctatttttttccccaagattttcttatgaaatataaatggcaatttgtttttaatgaaatggccatattttaccttcatactttcagtcacattctaatggttggcaggttgatgcatgcgtcctgctcagttgataccttgcagtgaacaagaggaaagggtttcaattctggactctggaatctagtggtctgattcaacgtgacctgctccctcttaggaattgtgtgacttgggcccattacttaggctctctgtgcctctgttgtcctgttcttaaaaacagaaagaaatttgggaggataaaatgggacagtgtacgtgaagggctgaatccagttcctggcacatagtaagcactaatgaatgggagttattattaatcatccaagcaaaggaactcatttcccccctgatttacacataagagtattcaaaaattcatcyagacactgagttccaagcaaattagtaagcttcaaattttacaaatcaatacagagatttcaggtatatgtgacatagattccatttcattacatgcctggagggtcagctaggtcccagcatggcactaggcaagacagagaccaacagttaaaaagagagaggtaattttcttttccttttttttttttttttttttttttttttgagacagaatctcgctctctgttgcccaggctggagtgcagtggtgggatctcagctcactgcaacctccgcctcccaggttcaagcaattctcctgcctcagcctcctgagtagctttgactacaggtgcacaccaccacacctggctaatttgtgtattttttattagagacgggggtctcgccatgttggccaggctggtcttgaactcctgacctcaggtgatccacccgcctcagcctcccaaagtgctgggattgtagatgtgagccaccatgcacgggcaaaaagagagagaggtagttttctaaatcagccttatatcacccctatcgtttgaaaagaattctgccatttctcttctcttgagcattaccctatcacgaaacttatgaagaacaaacaggtccaacaaatgttgggattctgacaacaaatgctcatcactcatcattatttctcgtctgttttctcatgtgtctattcttgcattacacatttccagcacatgttgtgggcatggcctgtgaggtgactacactggggttgggaaggaaggggagtgtggaagggacggcatttatgaagatatcaagaaatctaatagtggctctgacagaggaagtcctgctgaaattcacgtcagcatccctagaaatgaccaaagacttgttacagctgtgagaaargacaataaagccagtttccctagatccagcaaacgtgtgattatccactagtatatcggcgtgcagacagttcgtggaatacaggccttctagatgtgaatctgaaccactgtttgccctgtctcctttcttgtaggcatacgatggcttaagctccacaatgtcccgccttgccaggacgtgtggaagggagcagctggctaaccccatcgtctcctcaggaaacagcctcttcttgagatttcagtctggcccttccagacagaacagaggcttccgagctcaattcaggcaaggcaagtaccctgtggatcttcccaggcacaagagaaatcttcagtgctctgtttggtgcaacagtgaaatgagacctgtgctcagaaattgatcacagccttctacttaacatgtaaaaaattaaatagaacaaaagaactgtgacttacaattatcccaactcctgatgcttgtaaccttctccttctctgacttcctttggacccgcatctctaacaagtttaaaagtgcttttaagactagaaacagtataaaaaagttttatccaaattcactgatctagcactacccaaggctttacactagaatgggatacactgctatcaattacaagacttgcttgtaatgtattcagatgccagcccctggaagcagtggtttccctcatttctgaatcctgccattgtccaactgaggagtcactgttgttttccatttatttttctttctttgttccctcccttcctcccctcttcttccccttcctctcctccccttccttttcctcatctctctttccctccccttccctttctttccacagggtctctctytgtcacccaggctggagtgcagtggtgcaatcacggctcactgaagcctcgacctcccaggctcaggcaatcctcccacctcagcctcctgagtagctgggactataggtgcacccccacgcctggctattttttttcttttttagagatgggatctgctctgttgcccrggctggtctcaaactcctggcctcaagtgattctcctgtcttagcctcccaccatacctggccatttttgttcttaaatcaccacttctccaagacctttttacccattgcctttcatctgctcgttctaagagatgaaccccttatcccatagtcagagatgacttgtattcagatgaytcagaacattcactacaaatacatttagtctgtgtagtcattatgtctatcttagtcaactcgcttatattctgtagtaaagagctctggatggggacagtgcctggatcgaggtctcccaaatacgcaccatagacctttagactttggagcaagacagactatattcttgttgattttaaagaaaaactagtttcctaatagttcttttgcatgttattattcacttgtttgttgcttcatagtaaaaagtccctgctagctttcatccggactgtaacaacctcctgaaagtcacctacccttaccccatctctctccaaagtcgcctgtaaaagccctgctctgatcatgccattggaatgctcaatgtctgtcccgtctccacctggcctggagaataaagctcaagctcctgcagatgttaaccaagagccccagaacccaccctgacctctctccagcgtcagtcacccacatccctggggcaccccatgctccagctgagcctctatagatgctcctctgtgtctgctcaggcagtcccctccctggcctcccttttctcaccctccaagtcctagtttagcctcggcctcctcctcagcaagactcctcttacgccctccagcggtgaccgcctctccctcttcaagactcacatcgaattttgctcttctctagtaatctacagtcatccttatgaagccttattcaattgagtatttattttcctgaaaaaaagaggtcatttataagcagattatccctatgcctatgatttatgagtgggcagtgtaagtgaatccatgcaagaattttgtttgaatgacttaggcaattcatagacatttaatctgttgctttttgccacttcctacttcctgtagttgaagaataattgttaaaaatataaactgtgctcctgttttctcatggtttatgtacagctctccttatggagaactttcttggcgtgcattttagaaataagaagaaaaatcattgatggttttattcatcaaataattgttttgtacggtcagtagaaatgaaaagcatatgacatgtatgtgtgtttgtgtgttccccagcctgcggaggccacatcctcaccagctcatttgatactgtttcctctccacggttccctgccaattatccaaacaatcagaactgcagctggatcattcaagcgcaacctccatgtaagtaacaaaaatgaaaaagaaaaggcacacaggagagaaggtgtctgtgggaaggtcagtctatgagtaaccttcttatctcagtgctaacaatcgatggccttcctcttcatcttttgcaagtcccaattcctgatgtgcttaagaacaagcatttcctaatctgatagggaagtcatttctacagttgcttctaaatttaaaaacaatttcttttttttcatktcaaggcctagcaaaggttaaaaaacacacacacgcacaacaacacaacacacctacaaccttgctgtattaacaggcgtatgcaggcgtatgagattgggggtaaaccaaaataatcgataaatagtttttgacatgtgtgccttgagtatagctgatgttcaagacagttgctgagtgaacaaatgaagaagagtcacagactggagaatcagtgactcacggrccagaatgcaatgcgcgcacctatccatcaaagcaaacattcataaaacctgggctctcctgcaaggtactattccagcacaggcctagaagaaacattgaataaacgcttactttcttttcttttttggaaccctagaatcttattttctgacctggtaacagtccgatggtaaggacttctgtcctcattttacagacagagaacatcaggaaatgcccctcaaggacatgacagaatggctgcaaagcgggtgatgctggggcccttctgaatcctgtttcagaggagccctgccctcctttgaggtttgcaggaaaatacagtttcaggcataatgtaggaaagkctttaagttcttcactctgcacagtaattaatcgcctgtgtgaaaatagggaagtcacttaagctaatcaggccatgaaaaagtaatctgcaaaatgaagagtttggcttaaatattctctagcactttcccctgggatgtcaggagttaacaaattgctagtatcttcattgacatgcataagatgtggcagccgatgatgtcatccttagccaattcaaacggggaggtggagccccaaagaaagttgccagccagccagaaactgagctgtagataaagaagccccctcccttgaactgagaagtttgtgcctgaggattattttctaatgagttgtaaagcatttagatgaaagatctcactggttcaagaacagcaataggaaaagatcctattctgaagattagggagcttaaagaacaacaaaaagaaaatgtatccaggtgcttgctgttctgcaagtaattcaaaactttcttgataaatgtctctgaaccttagggcactagctctagcctgaaaataaaactgagtgagctaaaatgtgggctccagggagaaaagaatgccttatttacaagcacatgcaaagaatccgaatttaaggaaatgagtctattgagaaaaatgcttctgcgaggaacacagcaatggtgatataaaaactggaaagacggcattttccaacaagatattcccttatagtgcctggaatgaacctacccaggagtcctcttatttaccactgccagtgtttcagatgccacaggcagtttcaaaagcatctattccgttactcttcaaaggaaaccatctattctattactcttcaaaggaaaccatctaggatagaagttgtccccttcccttgctttatcccttcaaccatgtgcaaatccgcctcattcattacttctctgctggagaacccttacatgaaattaccagaagtaaaatttatctccctgtatgttttttaattttaattttattttgtaaaaaaattttattgttaatttttgtgggtacatagtagatgtatatatgtatggggtacatgagatgttttgatacaggcatgcaatgtgaaataatcccatcatggaaatggggtatccatcccttcaagcatttatcctttgtgttacaaataatccaattctactcttttaattatttttaaatgtacaataagttattatcgactacaattaccctgttgtgctatcaaacaggtcttactcattccttctattttttatagtcattaaccatccccacctccccgtcttgccccatctccctgtatgttttatttgccagtactttacgagagagtcttctcttttttcttccagtaaatcatatcaccctctcttttacccactttgaacttgaaagaagcacaacgtgtgcacgtgactttgtagaaattttggatggcggccacgaagacgcgcccctccgaggtacctcagcgttcactcatctacatctgtggtcttggctgtgctttatttatagatccgcatatttataggctgccattctaggttgcaatgtttccaataaatagaaagagcagcctaagccaaataaagatgattagagggtaagaaagcaggcttgaatgtggggttcagggaactcagcctgtttattaatatattcaaacgtgtgaatagtttgtgtatatgttttaaaacatttaaaaattgcagctgctttaaagaatagtggaatgcaacccatcccagcattaggtagcattctatcagaaatttcttgttaatatttgaccaagttcttacattcacatggagtatgtttctttcagccttgtccttagtggaagcgaaaaaaaaagcacttaattagataattaattaattaattccattaaaaatctgtctttttgtttgttagacatcccaataaaattaaagagtgccgctatctagtttctgaaatgctctcaggcaaaacaaacaaacacacacacactacacacacacacacacacacacacacacaccaggccatttaagctttctccgtaaatttcctaacttttgaattttgttgtaaaaacttctcatcctgcactagaagacaaggtctgtcagagaggagactgtttggcctgttgcctaattcccagtgcccaggacagtgtctgagacaatagtgaacaatcaatgaactctccacaccctatgcacacctctcacagcatttgttagtaagcatttgaccaaggataagggtatattatttaacaagctgttacatagcaataccttgcgctgagtactgttctcagtatgttataaatagtaggtcaatccttgtaatcttatgagataggtttcattattttcaatatgcccctttttccaagtgaggaaactgaggcaccaagcacgtaagtcacttgcctaggatcacacaactagcaaatggctgagccaggggctgaatccaggtagcctggctccagcatccacacttttctgtgctacaaaatagtgratattagtgcatttatttgtatgggtccractgggctggagatttttgctttaggtacatgtgtcccttggtcatctaagtttttcctctggtcctattgttcttgatcatgtttataaatcacctctcctatatatagctcctatatatagtttattttaaatcatcaggtattgtctcaaacattgaccctgaatgaagtggttctcctagtggcaatttcttcactttgttttggtctcttgtaattcgagtaaagatgtgtttcctagaaacagcggtctctgccatgttgtcattcattctccttgtcattatcttcattatttaggccgttactgtggcaccgacatgccccatcctatcacatccttcagcagcgccytgacgctgagattcgtctctgattctagcatcagtgctgggggtttccacaccacggtcaccgcatcagtgtcgggtaagaaaccctagcacctgactctagcggttaaaagggatgtggtagaaattcttggtttgttattggggactctgaccttcgtagttgggagccagtttcctgagatcacctctgggccaaatcttaccttcttcccaattaagtgatcgtgttgtcaattctagcaataatgaactctggaagtgtggaggattggttggaaatgtagctgtcttttcagctacatgccatgctatcagatgacttggtgttcttttgttgtttttgagatggagtctcacttggtcgcccaggttggagtgcaatggcacggtcttggctcactgcaacctctgcctccccaattcaagcgattctcctgcctcagcctcctgagtagctgggattacaggcacttgccaccacacctggctaatttttgtatttttagtagagacgaggtttcactatgttggccagactggtctcaaactcctgacctcgtgatccaccagcctcggcctcccaaagtggtgggattacaggtgtgagccacctcgctcaccctggtgttctttttggcttgtttgttaaggcagcccyaacctggggaggagaggaacgaggagctacccaggactgggtttcttagcctcttagcccagagagtgctgttggtcactgccatcttccttgtttttagtggttaaaagctacagaacacctagaagattggtgtgtgcatttcggtgctctactgagagggaaagcaagcatgctgcgttgggttctaggccagggttgaatagaatcctggtcacaaaagccaagtggctgtaggatggtaaacaagtcttttattcttcaaagttaccgttcacaggaagaaacggctttgagaaaagacattgcagaaattccttctaatccaccacactgcatggcccttggtcttcagtttgcagaattgttcccttattttatatgacatgaatgttttaaaatgtgwgatggaaatactatctattcttttacattgataatggctctagcgttctttctcctttrttttatagtgtctgatgcagtctttgctctgatactcactttatttctattttcttccagcttgtggtggaacgttctacatggctgaaggcatcttcaacagccctggctacccagacatttatccccctaatgtggaatgtgtctggaacatcgtcagttcccctggcaacyggctccagctgtcttttatgtaaatccttttttatggtgtattgyttcagtgctaatgaatctgtaggaaagaagttctggtgctaataggatgggcaactcatagtgtacgtgaaatttaggaagtatttttccaaatttcctctgtttcagtcatagtttgagttataaatagcatgaagtttctctcgaccatggttcttgvgtcctgtctaacatttccaaaagtacattcttgagtccttggtgaatgaatgaatctgtggcgcattcatgttcagagtacaggaatcttatctttttttttggaattagacacattaaggttcttccagggaatcactagtattgtttattccagcagagccctcccatctcaattaagcattctttacgcttttatcttatccctacctcaatccacctttccttctatttctgtcagaagaatggttctggggctgggtgtagtggctcatgcctgtaatcccgcactttgggaggccaaggcgggtggatcacttgagatcaagagttcgagaccagcccggccaacatgacgaaaccccgtctctactaaaaatacaaaaattagccaggagtggtggcgggcacctgtaatcccagctgcttgggaggctgaggcaggagaatgccctgaacctgggaggtggaggttgtggtgcactgagattgagccactgcactccagcttgggcaacagagtgagactccatcttaaaaaaaaaaaaaaaaaaaaaaaggaatggttttggaagtttttttaacttccaaacttaaacttacttaaactttaaacttaattttttagaacactttcatattcctcattgcactataacactttttgaaatggactataaatatggaattagtagtaggatcctatcacattctgagtggtcttagattaaattagacagcaacaataatatgtcctagagtagatgtaaaaagcacacattttaatcaactgatagagaggtatatgtgacacgtcacactgataatggatgcttattatatattgagagataagatcctggaatttaaattgccgttttgaattgaaatttatttaccagtctattttacatattactaggctgtggttgggattgctaattctgttttgaagcgaatataagtaacttatggttgagagaagaggattgttttgaggaccctgtcctgtttatttaaaagtcttacttttcttccaagacttgctaatctgtgcatcaggaactgattaaaaatatgggacaactatcctatttgtggaccaagttcaaacatctcaagttgctttttttaatccatcaatcagacagagcctcttcagggtataagtggccttgtgttaaaacaaagacaccctctgcatgccgaaaggcaatgcaagtttaagctgcctcacaggaaggaggttttggtttgtctttttttttttttttttttttttggagacacagtctggctctgttgcccaggctggagtgcaatggagtgacctcagctcactgaaacgtcgcctccggggtttaagctattctcctgcctcagcctcctgagtagctaggattacaggcacatgccaccatcccaggctagtttttatatttttagtagtgatggagtttcaccatgttggccaagctggtctcgaactcccaacttcaagtaattcacccaccttggcctcccaaagtgctgggattacaggcatgagccaccgtgcctggcctggtttgtctttgtcttcactaagagcacagcgttctggatgggaagaaatctatatactttataatgtttaccagacatatatttattctttcactcaacagatatttattaagctcctaatatgtgctaggcatgtagttggcacatgctactctcctatgaggtgccttctatatattgatcaataaaacaccatcattgtccttagaataaaatccaaagcccttcgcacagctttagtaggcctatcagaattgccaaataaaatgatttttttttttggtcttttcctgtttgtctctaccacattcacattgttgactgctctcattcagtggttgccaggaactgagctaggtgttcaagacagataagatttcaggtcttgacaaattactcataagccaacattaagaagctatttaattaaattcattttatttctgtgggataataataacaagtttctataaacaaatttatagtaatttcaaatttctaggactgtgaaggttaaagaagatgtcaaatttaaaacgcataccacacagctagtgcatagcaaatgtttggtgacttaattctctcaatctttaccatttctgaagtatcttctgtgatagctcacaaataaatccaaacgggcagcactaggctctccttccagaggatgggagattacacacacagaaagcaagtttcatctatttcagtgcttaatagacattacattttaattaccatatagaacatcgtaatgactcagctatttcctttctcgcctgtaagaagttaattttgattcctctgagttacttgcttgagttttatttttaaaatggacgttttaggctgcaagatgcctctttttttgcagttgattaatgagaaggcaaggcctgtgagttatttctgccctggtctaaattctatccagatggatgcttggaaacattaccctggggtgtgtgagagcgtatgagaagcatgtgtatcacatcaagttctaaaacatggggctgggattgtggtgaaactgagtagggaagaagactggagaaattatggttgaatctgcaacaaaaaggaacggggagaaataaaacctaaaaaggagttttttgtaagacatatatttaaccatttattacccataatatgaccaaaaatgtgaatatggtaaattgttttcttctgcttctcagaaagcagaaagggaagaaagggagatcattttcctcagaaggtaaattacatgcagttgtctctaaaatctttctattcaaagtgcagtgcaatctttctgaccagttacttcacccctgcggtttggtgggcagggaattgacagaaattgtattttatacttgcagagtgcttttagaaagtgataggtctcagttcaagaatcagaatgagataataagaaacagtgattgtactatttttgttccacatcctacatttactaacagatctaagccaaagggtgtagttgcttataaaatgtaccagcctaaagcaaagacttccaagcatawtaaagctttttttatagtttaatttaatccttctaggtatttgcctaccaccatgtccaacggaatgtcttttctgccatctagcactggattgcagtagtcaagtacttagaaaagaccttcactttgtaatcttctggagcatcggacagaatgctaatgtgcatgttgatcatctaggatcttgctgaaattcactttctcactgagttggttggtggggccagattccttgtttcaaacaagctctccggtgatgccgatgttgctggattatgcactttgcatagaaagattttagaggcaacttcgtgtaatttacgttctgaggaaaatgatctccctttcttccctttctgctttctgagaagcagaagaaaacaattttgcgtatttcacattgttgatcatattatgagtaataaaattgagcctgaatgtatrcacaaaagttggcagccatcccaaagatggatttagaccaattccttgcaaaataaaaaaaagattgaagatagaaatattgtgttataaatcatcagattgtcaaaggagacaaatatgtggtttgttttgtctgatgtggatatatcctgatttcaattatcagttatagcttgctgtraaaattccatctagwctagtccagatggtctatactgtagtgacccaccttggtgggattctgagagccaccagcttaccaccaggcttactgatttggttagagacctaccaatgctagtatctggcttgagagctaggttagagcagagctgaccagttacttcacccctgtggtctggtaggcagggagtgaccagagatgtgcctggtatattgattagtggtagggcttgaggtggtcagagcctccaggctggttatctctaactattctcctccattagctgagatagagccccaggggagcactatacttagcataaagtaaaatcttgccatggataatgttgagcattaacagaaagatacacatgacagagaagtacatttttcctttcctttccccttccccttccccttgccttccgttcccctcccttcccttcccttcctttcccttccccttccccttcccccttcccttccttttcccttcccttcccttccttttyccttcccttcccttccctttttcctttaccctttcccctttcctgtttgttcatgctttcatttcattggggtataaacctagaagtgaaattgctggttcatatgataatactatgtttaactttttgaggaaccaccaaacttttttatagggatggactattttacattcccgttagtaatgcgtaagagttctaatttctccatatcctcatcagcacttcttattttctatttttaaataatagtcttcctggtggtttgtagtgttatctcwttgtggttttgatttgcatttctctaatgactaataatgtttgaaaatcttttcatgtttttattggccattcataaatcttctttggagaaatgtgtattcggtttgttttccattttaattgggttatttgtttttaattttcgagttgcaggagttattttatattcaggatactaccttggtcatgtgtttttattttctttgggtatatatttaggggtggaatttctgggcattaattggatgtacatttaattttatgagaaactcccaaataattattcaaagtggctatgtcagtatgcagtcccacgaggaatatataagacttcagttgctttgcacgcttgtcaacaattgatcttgtcagccttttaattttagcccttatgatgggtgtggaatgatatctgactgtggtatttaagttgcattgctctgatgactaatcatgcagagtacttttcacattcttggtagccattttcttgtcttcttttatgaatatctgttcaagccctttgtccacttttaatttggttgttttttcattatctgtaggaattccttttatatttcaactttgagtcccttgctagataaatgctttacgattatctcccatttccccaccccggtctgtaacttgccttttcatttttttaaatatatatatattttctggacagagtctcactctgttgcataggctggagtgagtggcacgatcacccctcacttcagcctctatctcccaggcttaagccatcttcctgcctcagcctcccaagtagctgggattataggcacaggccaccacacatagctacattttawtttttgtagagagggggtttcactgtgttgctcaggctggtctcaaactcctgggttcaagtgatcctcccacctcagcctcccaaagtgctgagattatggttgtgagctaccacacgcagcctattcattttcttattcatgtctttaatgaaatgtttatttatgaattcaaatttattaattttttatcttgtggttagtgctttttgcattctatgtaagaaatatttgcccatcccaaggtcacaaagatttttctccgtgttttcttctaggatctttatgtttctagcctttatatttacatccttgagaaatattaagttagtttctgtgtacgaagataggcagaggtagaggttctttttttcctctctctccataaggatatccgttattgcatcaccatttgttaaaatgagttttccccttgatttgtcttggcaccatggattgaattggattgacagtgtatttgtgggtccccttctggaaattctttcctattccattcatccatttgtctacccttacaccaataccactttatcttgagtagctcatgtttttaagcagtaaggccaagttttgaaagtactcaactagcacctacatgttccagactctttagatatgttacctatgaacatcatatgaggtagatactatttcctatcctcgactccccaacacatcgtagttgcagaatataagacaagttgaataggtcacattcaagcaccagcgggtgttgttacaaatcccataattttgctgcctctccagaaattaagtacatacacctttgcagcgcatttaagtgccacctaaatgatcccatcatattgccccagttacatgttttaatggtttctttttttttattatttaccttcagccaacccacaccatgtcttagaggtactcagtgttttaaacaaaccaggtatctcgtggttttctgaatatgtcccgcccttctctgcacatgtgccttggtggcatgcttctttgcccaccatctatagtgcttacatccagctcacatgtatatttccatctcaaaaagtcttcccatcaagctattgcagagcaccacaatcaaatatgatgcctctgctttgcaattcttaaacgccactttataactctgatggcactcacactattctgccttatatattttttttctgtattctcgtccagttttgcccactaggaagaaaactccttgatggaagtgtattcgtcgtctttgtagctattggatacacatttcaacaagtccgagtgaaagaaattttttgagacagccaaataatgttgtgatcaaagttaaagaaagtttaaaaaagtgaacgggttaacctagcatgtgatccgggagaatcccaaagtctattctctcaatttaatccctttaaatatttttttcccmaaatcagatctttccagttggaagactctcaggactgcagcagagattttgtggagatccgtgaaggaaatgccacgggtcacttggtgggacgatactgtggaaactccttccctctcaattattcttccatcgttggacataccctgtgggtcagatttatctcagatggttctggcagcrgcacgggcttccaggccacatttatgaagagtaagttgtttctattttagtgatagcttccagaatatgtcttacaaactagaaataataattttctcagtaatatattaagcaagaacaatcctaaactctacactattttcctacattgtctttgtgaattaccttataacatattagaaaaactgaattgcatatgaatggctcaataagggcaagggagagcactctcaatggttctattgttctttttaagctctaatttctacctaatgttaaattagtttttttcatgacgttgtgttagagtctggtaatatattatagtttgggtttggtgtatttatatcaagtgtgtttcatttgatttcataaactctacgttcttcacatttaagacatttagtattactttgggattggcttaagtgctcacatataacaacaataggggattcttctaatagtataaaatgttaaatatttttattctctagctcaacttttccattattggctatttcatatgtaatttcaaactatcagtttttcttgtaaatttctttaaatgttccattcttttgaaaaacaaagtaaaatagataaaccaaaattagagagtggggctgctcaccccaccttcccatgtccccaagtcccctaggggctcagaaccccttttcacatgggaagttgtggcctcttttcacaccatgcaacgttttaaggaccttttctaaggaagtgatagcccagaaaccaaaaaggaggcagtatttctttccctagtcagaaaagaaatcacagtcaattaaaagtccatccttttcaacaccctttgccttttgtttttttcatttgattaaagagcaattctaagtgggtctgatttactactctgtcttccctcctagtatttggcaatgataatattgtgggaactcatgggaaagtcgcctctcctttctggcctgaaaactacccacataactccaattaccaatggacagtaaatgtgaaygcatctcacgttgtccatggtagaatcttggagatggacatagaagaaatacaaaactgctattatgacaaattaagggtgagtttccacatgcaatcaatgttcataaatattrgtgaattgctattggtaaaaataaatccaaggtaacgtctattcaagcatttgcaaatcatgtgggatagtctgctctaaatcatgtttagagcagactgcctctagattacatggacaaaggcaatttcagtattgtatttattattttccatttcatatctaaggggttttttaggattattataattttcctgttgagctttgtctaagcatgcatgtatgtcctaaataagtatttattctgtcttatttcctactatcctctttgtttttatgttagagtattaaaaattttaatgatcatataaaaataaatataaatataaaaatcatggtgatcattgctatccagacattggctaccatatcarttccagaaacacaatcggatgcttacaggctatgaccccaccttattcatcttggattcttggtcatgaatagatcccagtgcctgatgggtgcccaatatgtatgggaatgactattacataatttgtttggtagagtattttataataactgttcatatgaatttgtcctgagctatttaaaaattatcacagaatatgcctcaaaataggtaatttgagattttaaaaccaaaggtaggagatttactaagtgctttgaacatggtgagccctacaagttttggctattttgttgtcattaattcttctttccttctgtggaaatatggactcctttaggatacctgtccactttctctcattaaagcttttctcttcttgttattttcccttctttcttcctaattcctccctttgaagccccaaagcacatttattaagtactgttggtaggcaaccatcctggttcctatttttccatccacaaattttactgtaaatcatcttatgagtgattcccacagtgcatgtttattaatataattctgcaacaaagatgcaaatgttttcaaaacattaaattaccttcaataatattttatattctctggcagtatgtgttttaagctaaaattaaatgtttactcatttgtcatttttttgttatgataacattgtaataatataaggcatcttttttattttatctttttatgaagaaaaatatagataatacaatgctctattatctgtttttatgtacagatctatgatgggcctagcattcacgcccgcctaattggagcttactgtggtacccagactgaatctttcagctccactggaaattctttgacatttcatttttactccgactcttcaatctcrgggaagggattccttctggagtggtttgcagtggatgcacctgatggtgttttamctaccattgctccaggtgtgtttggtaataaatgaagttmtttttaggactgatatgtgcaggccaatgtttcaaaggatcctatcataacaggggtcagatataaaaataagtacagccccaaagcccttccaccatatgttcagatgttgttttaaattcataaacactaccttttgtagaaattgtacgtttctttctaaaaaatgcaggtcccattatatwktttatattaattaggggcttgatatccataagatcgtctacttacaatttctagagaccactttagaaatccctgaaaatttgatttgcagatactacacatgtacattcacacacacacacaatcagttagttaaggatcaactcataaaagtaactatttttcctctgcattttatttcaaatgtagcttcagaaatgcttcagtttctccttagctggttgtaaatttccatgtttcaaagtaaaatgggccgaattttaaacttttattttacttttttacattcctaatcccctcagtgaaagtgatattgagctagcattgtttggggagacttttttcttgaaaaatttttaaatgagaccgggtgcggtggctgatgcctgtaatcccagcatttttggaggcagaggtagacggatcacttgtggtcgggagttcgagactagcctggccaacatggcaaaaccccatctctactaaaaatacaaaaattagctgggcgtggtggagcgcgtctgtagcctcagctactcgggaggctgagacatgagaattgcctgaaccaggaggcagagtagagtttgtagtgagccgagaacatgccactgcgctccagcctgggcgacagagtgagactccgtttcgaaaagaaaagaaaagcaatttatttaaatgaatttgagcgtttcttatggatttcaggattgacatagaagaaattaatcagatatttcttggaggatattctaagtccttgaatgcttgattggaacacagaatcacggtatctcattgaagaatattcgaactctgaacttgttctatgacttaaaagattagcctatttgcttctaacttcttatatcagcagaagtcactaatgaagataatttgtacttatatttatttaatgtcccttagtattccattctgaaatgttgttcctacctctctaataaggtgctttcatgacactgaatacaaatctcttacttaaaatattgatctgtctatctaagagcaaagaaccatcagcaagactgacaaatgcaatttagaggcaacatttaaatctggatggatatatccagagctcttagaaataaacttgagttaagctttcttttatatttacaaccctcaaggtagaaaaggaattatttacttgtgtaaaatattataccaacaaattttcttctaatattttattacgaaatttcataattatatgatgtaagtggacaggtgaagaagagagccataaaccttatttttcttagtcaagaagaaaaagaaaaaaggaaagtaaggggtcaagagaattttagagtttactaattatctagatggcataagtgattatcctgtaatgataccacactgtgaaagtgtcattaaaacttaaaaaaccttaatattttgaaatatgtcaacttattgagcattgtcctatcagtatttctttctttttttttttctttttttttttttttttgagatggagtctcgctctgtcgcccaggctggagtgcagtggcrcaatctcggctctctgcaagctccgcctcccgagttcataccattctcctgcctcagcctcccaagtagctaggactacaggtgcccaccaccacacctggctgatttttttgtakttttagtacagatggggtttcaccgtgttaggcaggatggtctcgatctcctgacctcatgatctgcccacctcggcctcccaaagtgctagaattacaggcgtgagccactgcatccgtcctgtcctatcagcatttcttatacacacatatatttattttaaatcaacgcatatttattgagaatttattatggatacactgagaagactaagaaaggaaaatgaggtacaatctctactctccaggagcttaaaagtaatgggaaccaggcacagtggctcatgcctataatcccagcactttgggaggctgaggcaggagggttgcttgaagcccaggagtttgagaccagcctgggcaacagagggagaccccatctctacaaaagattaaaaaaattaggtaggcatggtggtgcatgcctgtagtcccagctactcaggaggcagaggcaggggaatcacttgagcctacatgctgccagtgagcagtgatcatgacactgcactccagtgagaccctgtcctaaaaataaatacataaatagtaaaaataaataataaataaaagagattgggaaagaaaaaacactcatatgtgagttaagtaatggtatcgtaattaaatgggtacatgacaaagcaaatggtaacagtagcaaataagcaagggaagaaaaatgagcttactgtggactagggtcaactgaaggaaattcaatgtgtcaagtaggaaaagcagtcagtgtgtcagtcaggaaaagctcagccatatggcggtaacaaacaatttcaaactcttaggtgctgaaaacaacaggtctccttctacatgttcctctcgtgttaactgggtgcctctcatcatccatcacttcctaactcaggctgttggagctgccattgtctgcgatattgcctgagaccatggcagtaggcaaaagagcccttggatgtctcggtttaaaagtgctcactgtaaagtaacacatgccttttgctcatagttcattggccaaaactggtcaaatggcctctctcagccacttgcagaatgcagttctaccatgtgtttggaagtggagacaaaggaaatatytggcaaacagcactaatgacccacagtcattataaccatattttacaaattcaagataagaaatatttcacatagaggaaaaccttaaaatttgaagatactggataacattcagcattcagattttccatgtgaaattgctttaaaaaaatctgtagcctacatagtaatagggtaaagaaatcaggacctagttctacaacattttatattcacttcctgttggccctgataagattcaaacatattatggtgtacaagttgtaaacttctgaaatggtgaagattggatctctgaaatatattgctacataaaagtgatggcaaaaataattgttaaaatcaactttttgagaactctggaaatagaccaaagccttatagcaatctgyggcatatttattcaagaaaaatcactgaatctaagtaagagtcatttttgtggcattctcttcctattcccatctctctctctcctcctagctttgtagtagcctcatgaccacagtagctgtgaaaatgagcagctttaacagctgtgggtggtggggccgcagaggtccagaaaacagcgcatctcctcagcattgccattattccagttcagcaacttcctggaaaactgcattctcaggtcttgtcttcacaggacctgggcaagagctcactcttttgtaaacagccctgtccctggggtctttgccgaaaacaatcagcaacagctgtttcacatcacaaccgtgcaaggcagtgacaccagttacagctaatgagaaactgaccagtaaacttgaaaggaaaaaatggggaaggagatgcccactggggctttgaaaagctccgacatgtttctggaaatctagaaggccacacacatagcccagctgtgcacatgcccaaaaatagaccccgagaaggacctaatctgtcaactcaaaattgcctagatataaattacaaaagtaactacgcaaaaatgataaagaaacatgagaaacacaggaatgaatacagttctacctcagtaatacaggggatcctctacgtgtctttattgatgcctaaatagtcagcacttgatattaaatgggttatatagcaaaattatggtgaaaatggagaacacaatgcattttttttacatcaaagatcaaytgcggaaattgcagctttccgaatcagtgggttacatacgatattcattgatttctctgagaaattgtttcaattggttgcttcttttcagtagagggctgtcactttcaagtgaaaaagtgctagctagcgtcttttccattagggctgtgtcaaagatgttgctttctattctacaggtgcttgtggtggcttcctgaggacgggagatgcacccgtgtttctcttctccccgggctggcctgacagttacagtaatagagtggactgtacgtggctcatccaggctcccgactctaccgtggaactcaacattctttccctggacattgaatctcaccgaacgtgtgcctatgatagccttgtgatacgagatggtgagaayattataaagaatgctgagtttcaaccctgacacataattagttctagtccattatcatcagacttgcatactgcctccatccgtttggtttggaattacacagatattatggtcaaggaaggcatcagtaccagaaatggctacaacttctgaaggacatagaaagtattaaattaccggtcacagaatatcaggaatagcacatttctataaggaaaaaaggcttttttagaggcttaagaaggaaagaatagtctgaatgtcaacattgttcacctgtcctattgagatacctctgagataaatattgatattttatgtttctggctgaaaaaaatacttataattgtaatgtgactggacatagtggttcacaccataatcccagcactttgggaggtcgaggagaaggatcacttgagtccargagttccagaccagcctgggcagcagaatgagaccctgtctctaaaataataataagaagaatataaaatagtaatgtattcatttctctttgtcccctgaatgtgggtagaataggtagagttaaggggtgatattgttgtattctttcctttgtacacaggcatggtgttgctatgtgacataaagttagagacataaatattgctgatgtatgccttatacaaaattgggcttcacagtctgcatggactggaatgaaggaggacagcagaaaggccacatcctccacgtcagtatttctcagtgtggcccccagatccacagcatcatttgttagatgtacatgttctcagcaaaaagaaacgtgtttgtctttggcccacaggttgctagtgtgcaagatcttgtctcccttatccctgatccctagacccctgccgagtgagaaaaatcgaatggtgaaggtgctttatgtcccttctgtagaggcagaacactaagtagagactcaaatcaatcatacacacatgatgagatgtcaaagcatgacactccccctttttcccatcagcaatcggctatcagcacgttgcacagaggagtatcaaagcaccagaatgccctcttcacatctaagccttcctgtgcatactgaaatttaaaacttttcatgtaatggaaaggatgtgcatccttgcacacatattctagtgttcagaacctactagaagttttaaaaaatatctttgaaaaaaatcttaagtaggtaactgcatctatgaagtaaattatggttattcttttaaaatcacattccattgagttgtttttgttccatcactaacttctcttggaagcagagagtctggggagcagtccttttttcctgtgtggctttgcacaggtcacaaagtggctccaaacccsttctacctgtgagatagacaaatacctccctcacaggctttttctgaggattaaggaaagtaataaatgaaatctttttagcaaaagtacaagcattttgtagatgatgaatttggaatagtttagatttcagtttacttagatggaaatttctaagagaggtttaatcagtgcccttgctcaggcacagggcggcttgaaagagctaaagaaactcaggtgcgtgccaaaacaacacaaatgttttaaagtggttatgcggcctttccgtatggattcctttttatgcactggcaatgtgagtagatgctcaataaggttccttccttcctcatttgtttaattatttattcaagaaatagttattgagtgcctrgtctgtgtcagttggtgagtattgtagtcatttacacattgttaatatatttttatgactaaatttgatgtttttttttttttgagacggagtctcactcttttgtccaggccggactgcagtggcgctatcttggctcactgcaaactctgcctcccgggttcatgccattctcctgcctcagcctccctaatagctgggactataggcacccgccaccgcactcagctaattttttttttttttgtatttttagtagaggtggggtttcactgtgttaaccaggatggtcttgatctcctgacctcgtgatctgcccaccttggcctcccaaagtgctgkgattacaggtgtgagccaccacacctggcctatgactaaattttaaatcccacttcaattatttgttctttgcccagccagccttttgcttctgagtagcagaagcatgtaacattctgaagcaaatatctaaagccaactggccacagacaaagatacttataggctattcctgctcatgcaattggcctgtcatcacaggcctttggccgtatggaggctgtgaaccttcctgggctaccccagagagggtcatgcagcattcttgggagaactgagtcactgtcccacctgcttattcattttatagagttgccatggttcaaaatgaatcagtttcttccagaccacgcatctacccattctgtataccaaagatccctccaaactgagagtccatgaaactacattggtcctagcaaaacttttaaatagaaaagaaattgtataaaaaaatcagtaatcctttaatctagttccagatcttaagtgtactttcttcatgaccttagataaatcatttaatagcatggttttggggcatctgaggttaatctgcaaaggttaacatcactgttaacttctatctctatgcccttgcatacagcaaagtggcttgtaactcctgtaagattcagttcctcatatacaaaatggggataaaaataaatgcccacctaatagtgtcactgtgaasataaaatcagatagtacatgtgaagcacttaaaggggtatatastaattgctcaataaatgtcagtcttgaataatcttggggcctcagtgtctatatctgtaaattgaagaggttggactagagaaagaattgccaagttgccttctagtgctagcctttactgttctttgacttcccctcctctttaaagattaggctcaagattaggctcaatctttctgcaatctatatgttgaggttttggaaggctccagaaataccccagtactcagtatgaagactgaaggggtggatgggcaagtaacaaaccatctgtgatttttgggtcatcttcccactaatgagtaggctaatcaacaagcacttattttgagataagcattgtttcaccagatgatctggagtgaattttagaaaagaaatcaaaatcaatagactcaactcactttcatccagtgataaaatatacacgtgaactaataacatataataaacttcaaaattttgtagtacaggtaatcagagaataagtcaacaaaaaataatattgggtgaaatgtgtagcaaaatagcataatgaagtgcacttactataaatgcaaaagaactataagagatacacttttgaattataaagaatgcaaaagtttccagcgatcagaaaccctccaaagaatgccattttgagcattttgtatttataactctgccattacatttgtaatcacaagaatagaaaataacttattttctaaagtggttaataatgaatgagtttcaagttgtagtcagtgccacaaagaatccatgtggctggttgtataaaagggcatatttactcatgtctcatattctatttttgttttttataaactcgaratttattaattctctgccttaggacaaaagagaaaaaaacaacatattttcccagccacggcatccaagtctgctataatcccctttgctccattttggtttcagccggcacaggggctttgatcaaagcttatatccaagataatcaagatgaaaggagacgtgtggtgcccctgctgtcctttgtgtctctgtgggggtggggcacagttgctggaactcttctctcaccctccacacaaatgtgtggttgtttttataccaaaacaaacaaaagcaatgaacaaacacagatgaaaagttttgtttaaaaaaaccccactggcactgaagaaagggcacatacaattgcataccttttggtgaatgatattgtaacattagtgtaggatctgaggtcaaagagccaactgtttttttttttcttttacctacttgaccttcagcartcagagtaactgaggtcagagtctctaatcgacagacatatcatcactgggtctccatcgcttcccaatcccaggtactctgattttgagttttagtgacagggagaactggcagccagtttttagaaagacggtggaaactgtcaaagacgtctttatcaaaaagggtaaagaacccagcactttgggaggctgaggagggcggatcacttgagatgaggagttcaagaccagcctggccaacatggtaaaacccctgcctctactaaaaatacaataattagtcagaagtggtggttcacccctataaaaccagctactcaggaggctgaggcaggagaatcacttgaaccccrgaggcagaggctgcattaaaccgagactgtgccactgcactccagcctgcgcaacagaggaagactccatctcaaaaaaaaaaaaaaarrggggggtggggtggggtgggggtaaagaaaagggcaggaagcaccattgcaagctggagccagaatgatatcacccctgaggggtccttctttttgaggatcccattatctcctacgagtcctgatgttctgagaaaaatgtgtgagctgctttggctaagctgcaaatgattgtagagtagattctcaagatgtattttcatgttgttccctttctttcaacgtaggagataataacttggcccagcagctagcagttctctgtggcagagagatccctgggcccatccggtctactggagagtacatgttcatccgcttcacctcggactccagtgtaaccagggcaggcttcaatgcatcctttcacaagagtaatgagttcaaatattttttaatcccatgttatctcatctcctctcttttcctctctctttctctcttcctaatataatgtttttgggcaccaggacacaagacaagtcagaggacatgggtctctgcccaggctctggatggctggctccccttacatcagtgctgagtcctcatccaaagcactggggccaagtcgtacaaaagtgtgctgccttcaggtctctggtgkggcatcttcgctccaaaggaggtgtgtccagggaatgcatgagagagagctttaaagcaatttttcagcctagctgagggctggaactagatagagcacagctcatatccataactcatcgaaggagcaaaacgtcatcatttattctcataaattacttggttgaagtcagccatctgagggttggcaggaagagtttgttgctcttgaaatatgaatttgatgagtcaaaagcrggcaccatatatgggataccatcatgcacagtatgattgagacttttcaaacttgacatgtgaagtccagtaacagccttaaatccaaactaactgaaaggtgataaagtagtccaaggaagagtgaaagactctcatgttttgatcaaaaaacataattttaaagtagattctcaatctaacattaaaaattaatctaatatttcctccatgcttatatataccttttataaagtagggagcaactgaagataagttgtgttcctcacgctcaagggaggcaggctgcatagtggcttaagagcatgggctttggaactagacctaagatacattttcacctctacaatttaactagctgtgtgagatgtctgcccttactgatgagcttctrgtccctgacaactggagaattaatgcctcctccttttatcctcttcctttatctcctgccctctcactctcatgtatatattactatgtatcgcaactcattatacatacatacatgtatacacatgtatgtatatagtaagggtggaaccattggaattaatatgtgtgtttatatatgtatataatatatataaatatgtgtgtgtgtctatgtatatatacatacttggcagctcccggtctagaatgtatttcaaatttaacctgtgagtggtataatggactttggagactcagaagyggggaggatgggtggggtatgagggataaaaaactacatattaggtgtaatgtatactagtcagggaaccagygcactaaaatatagacttcaccagtatgcaattcatccatgtaacgaaaaaccacttgtatcccaattagaytagatagatagatagatagatagatagatagaaaaaaaaatttcacctttgaaagytgaacactttattcccacccttttccatgccaccaccccccaattctacactcctcataatctcagcaaatggaaagtacatttttctcattatttaagtcaaaatcttgatgttatttttgacttttctgtttgtctcacacttaaccatcaacaaatcacactggctctaccctcacaatgtatctagattccaaccacgcctctccatttctgttgctaccagcctagcccgtgcacctatcatctctccttggcctcaggcggtcccctccttattggacactctgctcctgtccttccctgtcctccaccccttacagtctaaggactgcacatagagtgacattttcaaacttaagtgagatcatgccattctgatgcccaaaacccttcaacatcttcctcttcttattcagaataagtcttttcagtttcctgcatgacctagccatgctacctttggaatctctcattctgcctcatccattctgacttccatgatgtacctctaacacatcaagcctttacactgttttctgaactggaatgttttctcccccataactatctggcttgatccttcatttcattcatgtctctgctaagatgttactccaatgacgtggcttttctaacttaactctaacaataaagtacccttctccctcctctcatccatttttctttatagaatttatcaccatctcacatatcatgtatttgtttattgtatgtcttccccakctataaagaaatctttatgaaagcaggtaatttgtcttgtttacttacctctgtatcccagatctcaatgaccaccacaaactgagtagccaatagcatgtgctcaatacatgcttgttatgataatcatttcctgcactctggctttattttcaagcatttttattgcctccactttgaaaaccccccaagaaaactaagaaagcataaaaatccagttgccaatgctatttaaataaccgacctttgtttctttgtgggaaggctgcggtggatatttgcatgcagacagagggatcatcacgtcccccaagtatccagagacttacccatccaacctcaactgttcttggcacgtcctggtccaaagtggcctgaccattgctgtccattttgaacagcctttccagattccaaatggagattcttcttgcaaccagggggattacttggtggtaggtcttgctgctaccctttctaattacattttccatagacttcattcagaaaacaaaatgataatttttctctcctgggacataaatggataagaattgcgtactccttcttttgcaatgtaaaggagttgatgmaattttaatttgtctttccagctaagaaatggtcctgatatctrttctccacccttgggaccccctggaggaaatggtcatttttgtggcagtcatgcttcatcaactctgttcacctcggataatcaaatgtttgttcagtttatttctgatcacagtaatgaagggcaaggatttaaaatcaaatatgaggcaaagagtttaggtaagtattttcactgagaattatatctgcttttcctgcaattgcttgatcttctttgatataaaattttcttttctgaaccaacagtaatagaattaataagaatgcctactctcaagtacttattatatttgatacattcaatatctcatcgtgactacttttcaagtaaagtatcattatttccattttaaagataaataaaatgaggcttggacttttccaaggccacatacctaattagtgaccaaagtgaaattttccatgagtataaaataaactattcttcttgatccctggaattccttagacctttccattataagatgtctaattgtaagttaattctagttacagaaacattataagacttacatttgccttattttgtaataatttgtatgctgttttcaaaagaacacataattttttgattctattattactgatttaattatatattacatgatatctgtaattgcttgtacttaattacacttgattataattgcatttaattctactgtaatgatttgattttgatgacatttgctttttagtaatgtttaattgaataaataaataaataaataggcatcacttcaaaaaaagggagtaatgtcagtagaaagtaatataataataaatttttcctttgtcccaccagaagttagataatatagatttcaaaatgatcctatgacttgaatcccagattcatatatatatatatgtaaatgaaatcatatgttttattgcacattgtatgagatttaaagtcaacatggtttctttattttggtaaaagagatgaataagagtcttcaccaactgacacacaaaaataagcaaatagcttgagtaaggtccagaacaccagggaaggagctttggtcacttcccagagctctggcacaaggagggagctttaatgcagctctgtgggcacccgcgccattgctttctaagctgggaccttctcatccctccatctcttgatgctgagctttgcagctgagtcatgaatgggcagttttcacctggtaccaaagcatttcaagagtagcagtgtcctgagtctagtgagtagacgtcagcccatcctacccatcctacataactctactcttttgtttttgtttataatagactcagtcttttttttctttcttgagacagggtctctctgtcgcccaggctagagtacagcggcatgatctcagcctactgcaacctctgcctcccaggctcaagtgatttcctgacccagcctccctagtagctgggattataggcatgcaccatcatgcccagctaatttttgtacttttggtaaacatgggatttcaccatgttgcccaggctggtcttgaattcctgagctcaggtgagccacctgccttggcttcccaaagtgctaggattactggagtaagccaccgtcctcagccaatagactcagtttgatttatatttttaaagtcaacatttagtggtaattcagatacactaagagatacactaagggtgtgtttgacattgcacctcttctattcctttgtggattcactgttcatgcaagtatggttatggccattactttctccctgtctttcttgaagcttattatgactgctgttaacatcagacttaaaagtcttttgatttcacaacctgttcttggcaacctgaaacaacagcatcactgttatttctctctacttaccaactcaagattgttccataactatagccagccttctacttcccacgtctatctggctatcttcccaccatatctatttccatgccactcccacttctcagcctttaacctaggtccttttgtgaacattttttgacatcaaatcacctagttttataccatttttctccagagacactccttcrctrtggttgattgagatttctaggaccctgtggtagatgccttttattctcacctgattaataggcctgttaattaattagtcaaacatttacaaggtgttycacatcatgcaaaccaccgagttctgccaaggagttcacagtgtggtaraggagacagacaagcaaaggcacaattagaacatgatataaggctgggcacggtggttcacgcctgtaatcccagcactttgagaagccaaggcaggaggatcacttgagcttaggagtttgagaccaacctgggcaacatagaaagaccttagttttcaaagtagctgaacatggtggcgcacttctgtggtttcagctgctcagtaagctgagttgggaggatcacttgagcccgggaagttgaggctgcagtgagccacgatcataccactgcactccagcctgagtgacaaagcgagaccctgtctcaaaggaaaaaaaaaaaaaaagaacatggtatatggtataataagtgctagaaagaggaatgcacagaacagaaacacctacttcagcccaggacatcagagagggttccaggggaagtggatgaagagatttgcccatcagtgataaaaagatgtgaatgcatagaaartctcaatgttacaagtcatattcaataatttgaaagaattcactactgctagagatcagagtcaaaaagagataaacataatagtgatgaagcaggcaggaatcactctgctcagggccctggatgccaccctcagttagttaagatgttaatcaaaaggttatgggaggcattggaagtttttgctccaaagcctgaacagcgtgatcagattaaaaacactaatgtagctgcaacactgaaaacattggagayggggaaggctgaagagagagagaccagatgaaagagtaatttagggaaaaaatttactccctgaactaaggcaatggcagtaagaaggtaggagagagggcatatcaaagatattataaatacaggattgagtgaatttggcggtcagttggatgtgaggcaggagggaagggatgggaggagccttaggagcagttgttaggtttttggctgggtggatccattcttcccacagacatttatcaagaactttccatgggacagacactgtatcaggccccggggatgtggcagtaaacaaacaaaatccatgtcctcatggaacctaattctagtgttaagatgcagacaataaataagtaaaatatataatatgccatatggtgaaaggtatcaaggagaaaaataaggcagtaagagtggatgcagagtgtccataggaagaggggctgatgctgtcatcagcagactcaggtatggagctctggatgacgagcaaatgagaatgttcatttgagacaagttcagtttgaaatctctgaattacctccattggagatgcccagtaagtggtcggaacaggaatctcgaggtcagaacagggatctagactgaatctgtaaatacggaataatcaacagactgcttatcatttaagtcatgaggatgtatgacagcaattggggaattattcagagtgagatgaaaggcctacaggaggattcctgagggcctccagcaatgtcagggaagccctggagagatgcgcccaagggccagaggaagaatgacatgaagagtaaaaggaggagaagagcttggtgtcagaagccaagggacaaaaatgtaaagaagaacagtgtgatcaactgtgttaaatgctgtggatataaaataagaatttaaaaagttctttgggcatataactgtgaggtgacttgggagaacatgagtgctttcatagggttgaagaaggaagggcaaaaagagagaaggagagagacagacagacagatagggagagagagattaaatagggcaagatcctggaggagacagtaggatgggaacttgatccagagatacaggaagttaatgtacagagggaaaaatagagtgtagagatgcagattaatttattgaggatagtaataaattaggggtaacaaatggaagagattctcatctgatttcttctactttctttgtaaagtggagcctaatgtaatgtgcttagaatcaagaggaaatggggaaagtcaagggcttagggagtaaagttccaaacagccattgtagtttatatgaaaagtaatgggtgaattgcttggctgtgttgagatgggagaacatatatttgcaggggcatcaatttccttgaatgaatggcttgaattgaacacaaccacggagttggtattttgcaagggaagtttgaaggaaagacacgaagcaagggagttggagctcatcaaagggatttgcaatttagagtttcagagatgggggagttggaagtatgacagaattcaggatgtgactgtaagtggatgagtgacagtggacacaaatgttctagagttgagcagatcaagtatgtgtatggctaagtgattggacaggttaatttcattggcattgtaagtacttttactcctatctggtttgtttgttgaaaatgccaaagaatatttattgataatagaaaaatattttttgataatgctttggttttttagaaaagaaatattaaaaagctcctttatcctctggcataacattactaataaattatttcattccattgatcttggttctcaaatgcatctaaatcctgaagaaatstaatgaatgaatgctccccgagttgtgcaaagatatatctgcttagtcttttaaatataccaagatcatagctctgcatcattctgctgtactgaatgctcagtgggaagctgtaactgctagcatacttacatgcttatcgaagtggtggatatttattcatgcttctgtgatgttctgccccgtgcaccatgtgccataatcatttggttggctttaagaaagaatgaaatttccaatgagaayagataaatggtctggcaaaataaaaagtgtcacacctcgtagctccctcgatagcaaattgagaatttgtttgctggaaaagaaaatgaggatcataacagatgaaaggaaatggagacaaaatacagagaagtcgactttaaaagatgatttgtggccattgactgcatccccttcaccagatcatagactgatttaagtgtgtttgctcacagcctgtgggggcaacgtctacatccatgatgctgattctgctgggtatgtgacctcccccaaccaccctcataattatcccccgcacgctgattgcatttggatcttagcggctccaccggaaacacgcatacagctgcaatktgaagatcgattcgatattgaagtaacacccaagtatgtcacttccattttcatttttttcctaccccaagttagtattttttaaccgtcatgtctcaaaacagtccatttctttcagtagcacatactgcaaggaaatctaggggaaaagggaaatgcttaatggctcaggcctgaaaacacagtcggccagccactctcccatcagctgagccggttatgtacgtggatactgtcccttgtgaccctagacacttcctgcaagggacactgagggtggctacttgagattgatgttatccattcttcctcccacaggaaatatatcatgtttctgatagatgaatatttatttgaccagcctcatattcggtgtcacaaatgataaaatgtctgtttaacaaatgggaatttgtgtggtgtgtcaccaggggtcagcactgtcggaacagtactaaagcatgcacagtataatttctcagtctttatttaataagagttctgaaaggattacaaaacagtaagtcttactatgttgaagagaaagaaaaactatattgatcgtagaaaacatttttctctttccttgaacaaaagtatgtatacatttgcatgaatgcagctgtggtgcaaaacttggatataagatcttctgttgctatttctggcactgggtctaatactacttttccactcatggagcattaattggctaatgtgacttcctgaagaaacgttagatacatgcttatctacttttatggacacagaaaattccagttgggacgctccattagtcccaattacagagctgttagagaatttatctttgtcctgtgaaatgtatcaagtcattgtgtggaacaaaatatttgttgttttttgaaattcctagggactaatttgaaagcaacatttatgtttgtaaaaccaatacagaatatggaagggaagtaaatattcttgaatgtagaacatgtaaaacctgtcttttgagctactaataaaagaatgtattattaggaaaaatatcatacagcattttaaagtgacatggcttatgctgattctatcatagttttttatgctaagaaatgatgatttaataatatcttcaaagaaagtaagtaaggttgtcattatcaaaataagcatctgaccatgtaaatttaacagaattttgttcccacttcagctgtacttccaactaccttgagttgcgggatggagtggattcggatgcaccaatactttccaaattttgtgggacatctttgcccagcagtcagtggtcctcaggagaggttatgtatttgagatttcgatctgacaacagccccacacatgtgggattcaaggccaagtattctataggtaataatttttttaaaacttttattttaggttcaggggtacatgtgcagatttgttatataggtaaattcgtgtttgggggtttgttgtagagattatttcatcagccaggtactatgcctagtacctaatagttattttttctgctcttctcccttctcccaccctccaccctatcaaatgaaagaaaattccgtgctcatggataggaagaatcaatattattaaaatggccatactgctccccaaaatttacagattcaatgggattcctatcaaactattatgacattctttgcagaactagaaaaaactattttaaaactcatatggaccccaaaaagaacccaaatagccaaggcaatcctaaacaaaaagaacaaagctaggggcatcacaatacctgacttgaaactatactacagggctacagtaaccaaaacagcatggtactggtacaaaaatagacacatagaccaatagaatggagtagagagctcagaaatacggtctcacacctacaggcatctgatcttcaacaaagctgacaaaagcaagcaatagggaaaagattccctatccaataaatgatgctgggagaactggccagcagtatacagaagattgaaactgtaccccttccttatatcatatacaaaaattaattcaagatggagtaaagacttaactgtaaaacacgaaactataaaaaccctgggaaacatttttatattaaataagagttattatagaatgaatatgttaaaacttttttaaaaaccatgactttttaaaaataagtctatttgcctaattttaaaaatattttaatgctagaaataagtaaggagtgtaaatgtttgaaactacagtcattaatcaactttaatttctcttttaattttcattttaaaaagtaatcttagtaaacttaaatattttatattttctctaacttatttgtgaagaaatatatgtggttaaatcaaactcctgtttcttcagcttactatgaaatacagtagttctctcttatccatggtttcatgttccatggtttcaatgcccttggtaaacagaggcccaaaaataggtgagtacagtacaccaagatattttgagagaccacatttacataacttttctaacagtatactattatgattcttctattttattattagttattgttgttaatctcttatgtctaatttatacagcaaactttatcataggtccatatatagagaaaaaaacagtctatatgtctgtatagggtttggtactatctgaggctttaggcactcactgggggtcttggaatgtatcccccaaggaaaaggaagaaatgcagtatgtttattactttaagtaataaaaccatttaagaaccaggtaactctatttagcacagtgtctttgaattcctcatcaaatataaaataattaaccttttttttctctgagtctctagtgccaaatcagtcactggataaaaagcaaacatgtcagtggggcatggtggctcatgcttgtaatcctagcactttgggaggctaaggcaggtggatcacgaggtcaggagttcaagaccagcctggccaagatggtgaaaccctgtctccactaaaaatacaaaaattagccaggcatggtggtgggcacctgtaattcctactactcaggaggctgaggcagagaattgcttgaacccaggaggcggaggttgcagtgagccgagattgcgccactgcactctaggctgggtgacagagcaagactctgtctcaaaaaaaaaaaaaagaaagaaaaagaaaagaaaaaaagaaagcaaatatgcctcttcagcattttgatttccttatttaaaaaatgagcggttgaagattcactataatatggtcacaatagcacataatttggtatctaataggtttagacacaaaccaaacaaatatttaataccgcgaaagttcagaaagcctagtggtaacaatgtttaactacaccatagatcgtgttatatcctgagtcaagctgcatataattcaattagctatcacacccagctaataagacataattgaatagtaattttcaaggccctgagatatcagttactgtagtgaactgtttagttgagagtaaaactaggaatggcaggtgtccccacagtaccccttccagctgagcttgggttcagtctttaggatcaacacagggtactaggcaggccagatcagcctatcagttggttcttgagatgaaacttacttgcgactattagctcttacatagtgtcccaaaagaattaatgtgacattacagaatattccatttagtcatcatcttctgtttcccattattgtattggacttgtggtatcatttctgtttacatcaacagtagaattcaaataatgaggaaagcactaaccgttttcagaatttttaaaacttcaattcagagtcacttggcacctaaaagttttcaaatgtgctggtgaaatgaagaaaacaaaatttgtaatagaatcaatctttcttgcttgcttgctttcttatttatttatttatttttattttttgcagctcagtgtgggggaagagtaccagggcaaagtggtgttgttgaaagcattggacatccaacacttccatacagagacaacttattctgtgagtggcatctccaggggctctctggacactatctcaccatctcttttgaagactttaaccttcagaattcttctggctgtgaaaaagacttcgtggagatctgggacaatcatacctctggttagtaaaatatatctgctctcttttgggtgtttattttcacatgtacttattcagcctctgaagtttcttcacttccaagaaaggcaaaagcacatctatactctgcagagaagtgcagactaatgagctttgggcagtactggtgattctctccctcaattctaccattaacaatggatgcccagagcccaggtgtcatatagcccaccctggaggccacttggggagagcaacggtagtgggaaggcacctcttgctgctgagacatcccattgccacatgccgttatttgaggggtgttctatagcttgagatggggaagggatcatgcatgtctcctagtggtagcataaggcagatacttgtcactgttgtctcagatcattttttcaaccaaatgagcaagccttcctcattgtgctgagatatccttcccctaattggttgcatttttttcacttcttcatgtatttgaatatgttcatttttattcatgttttcctgttgtcttgacagagattaacgtttcttcataggcagggtcttgttttttattattttctttgtacacacaggacaccttgaatagagggtaaaggaaatcaatcacttggacatgtatatttaattatttgtctctcacaggaaacatcttgggcagatactgtggaaacaccattcctgacagcatagacacttctagcaatactgctgtggtcaggtttgtcacagacggctctgtgactgcctcaggattcagactgcgatttgaatccagtatggaaggtgagttcattgattcattcaacacaacattgagcacctgcattggacagacactatgctaggcaccagtgttaaaatatttgaaaaacaaaacaaaacatgacccctattttcttggaccttaatcagaaattcacagtgataaatgaaaaattacagctgtgatcaatgctataagggaaaataactagtatcacgagagagataataagaggatgagagttatactgtaatgcccaccttaagagagtcctgtagttactcagaatttgtcttactgcaaacccaacaaactcaaatgaaataaagatcttgttcagaaaaactgggtacttaacattaactttctgattttcctcttttttttttttttgtgaacatggggtcttgccttgacctcccaaagtgttggggttacaggtgtgagccaccactgctggccaattttcttgattcttttttttttcttttctgagacagtgtctcgctctgttgtccaggctggagggcagtggcatgatatcagctcactgcaacctctgcctcccgggttcaagcaattcttctgcctcaggctcctgagtagctgagattacaggcgcacgccacgacgcccggctaatttttgtatttttattagagacgggatttcaccatgttggtcaggctggtcttgaactcctggccttgtgatctgcctgcctcagcctcccaaagtgctgcaagtgtgaaccaccatgcctggcccgattttcctgattcttaagttcattacattcattggtctctcatttcttgggccatgatgataactaaattgctgcctgtggactatcacccatggaaggcagggttaaatattaatagagataaaaaatgaatgtatatgttcactaaaatcctcatgcacataaataaatatggagactaattttatctagaaggataatttttaaatacctgaattttgagagctttcttgatggaaggaaacattttgatttgattgaaagttttcttggctttttccccacgtcagagtgtggtggggatcttcagggctctattggaacatttacttctcccaactacccgaacccaaatcctcatggccggatctgcgagtggagaatcactgccccggagggaaggcggatcaccctaatgtttaacaacctgaggctggccacgcatccgtcctgcaacaatgagcatgtgatagtaagtgttccctgccgcctgagatgttatattccatcatttaaagagtttaccgacccataaatcatagtcagaaaactaggtcaggaaaattgccatctatgcaactataactcagacaaattctaagtattgttgaaagaacaaaatcacagtaacctgtcaaaataattgtaaaagttgtttgaagagamtatcagctatcactctgtgcatcagggtcatagaataaattttaagagtgaatgatcacgacaaatggcaaaaccggagaggctgtgggaagctaagcctacagcagcacacagctgaatgggaccagagtcacagcacaagccaccacgaaagttctgagcaggtgggtggtcctgcataagcactgctctctccaggggtacagagggactcttggtgggagagcactgctacgtgacctccatgtcaccaacctccagtggtttcacatgtgtcttcagcactctcagcttcctgcagtgaaagaaagcaaatgagatccctgagtgtgaataacaaatagattgttaactgtgaagtgctgtgcacacatatgtgtgtgtagataggaagattggattaatattagtaaatttatccacccaacttgccccttctgcagtgtttgttatctcagtaaataattccaaacttctggttgcttgggtcaaaaatcttgatgtctattttggaatccttcctctcacaccctatatggcatctataagcaagtcccattgggtgtatctttaaaaatatccacaattgaactatttctcatcatatctgctactaatacccccaccgttcacttggattattttagaaagttccacctcgtccccctggttccgttctcctctccctacgttctcaacacagcagcatgtgatggttttaaacctcaatcggatcatgttgctgcctttgaaaatcctctaatggcttctcatctaactcagaggaaaatcccaaattgcacctgtggcccacctggctgacattatctgctgcccctccctcttctacctgtttgtcttatctcaaactcctctcttctttgctctctgggatccagccacctggcctccattccgttccctgaatgtgctgagatgctccccatctggctgttgccttcatctggaatgcccctccccagatggcggcctgctccacaccctcacttcactggggtctctgctcgaatgccttttaatccataaggtctaagtaccttatattacagaccccaccctggcctgacccttctctgccatgttgttttgcagcacttcacacctgctgccatacatcattttgatttgttcatcagtttattgtctgcttcccccactagaatgtgagctccttgaggtcaagccacagtttcattcactgctggggattcactgaatccccagtgcctgtacataatagagataaataattgttgaatgaatggatagtagaggtactatcattatcccttttataacaagccacttttgttttcagtttaatcgtctcctgttgggtagtgaatttcaaaaatatgaaatatctttgtatcttatgaccactttgtattgccgtaaaatgatctyattcaaccttcagattttatttccaagttctaatatctgaaggactgaactgttttctttcagatcttgaaaataagaaaccaagtgtgttttcttttatttgagagccaggaaattttggactaaggttgtttattataaagaaacttttttcctattattgattgaattatataaacaaagatgaagtagaaaaaatactaaccactcccactataccacattttgattcattttctcatctcttcttggcaaagcatactttatgtacttgtaatcatgtgatataaatccacttgaattctgattttaatctatttttctggttataaatataatggatgcttattgagcaatatttggagagttcagaaaataaaaaatataaagatatttttaattctactcatgtattactaaaattttgatgtatgtgctaacagttgttttttacctttgaaattattttcatagtttaaatcatactgaatataatgattatcaggaattttacaagcagagtattcacatgtcctttaggaaagagaatatgaacagtcatagttttagatctcaaataaaagttacagtcacaaccacaaattccaaagcagatcttacttgtcatctccctatcccttaattatcaacttataactcttgcagctactgctggtgggttttatgtcattatttctaaataatattcctattctactactccttgctttttttggacattatctatccacatcctactctagaagatgagacttacccctttgccaccacaaacacacatggggtatgcaatgtttatatactttcccaatcgtctcccaaaatacgtatgtcacgcttttgcttaaattgctgttcagttgacattaccatgattatgtaaacaccattcacaactgagccaagtagtgtagtatggcaacatttgcttttgttttcctaaggaataataataattgggtcctctttacattttcttgggttttatgcattgatcaccaattcgtccacaccctctccaccccagatgtgcatctctaccttctgtagtaaaacatatcagttccatttcttttcctcagtaatatccttccttgagcctttgtacgtcagctgcaagcctgatgctagctgtcatttcagaatttccctttgccatcaaatgtgcaagttccttcattcttctcctgggctagagagctgactttgtgatgctatgcacgtccctttcttggttaatttcctcttttggtgaggcataccctcttgcggctccccaaggaaatgggcaagggcaataaatcttttgaaaaatggtatacctgaaattatctttattttaccataaatctttgaaaagtatatatttaaatattttatatgtttgatatattaatatatatgaatatattaataataattttgaagttttgtgttgctcatttggggtcagttttcttcatgttcctatctcctgtttactaatattggtctctgccttttacattagtcacttccctaaatgtctgctgatccttggctattcattcgtatttaagaatgaattactgaaaggatgactggtatctctgtatgcatgagggggccctgactctttagcaaaacctgcaaacctacaaatgtcatatccacaggtcttttctctyggggaggttaaaactccagcgacgaatcactttcagaattaatttttcttctgagtctttagttctaatgtccacattcctttttttgaaatgtatttttatatgttcaatgtttattttggttcctctttaccctgctccaaacaagggcatgtgggttggcctttgcccctactctatttgattgagaacttgccgaaaagaggaagaagaaagatgaaagaggaagaagaagaaagagaaggagaaggaggaggagaagagggagaagaagaagagggagaagagagggagaaggagaagagggagaaggggaaggagaaaaaaagaagaacaataagaaggagaaggagagaagaagaaaagaagtagaagaaggagaaagagaaggaggaggagaatgagaaggagagggagaaagagaaaagaagaagtaaaagatgaaagaaaaaaaagaaaagagtgaagaagaaagaagatctgctggtgcagaggaggcagctttaactttcattgcactgcttcctagctaataccttatccagctggaatgagcctaaaatttctctaaacccacctgcctatctgactctctgtacagacagagaaaataaaaagctatgccacccagtgtgtcctacaataagacctgtgtctgatgttgtccctgctcatagcagatcctaaatctcacgtgcctgcttcctatccatttgtactctgagagttgtagtttctaagtacaaaagggattagaggacaatgatgggaattgcattctggttgcttctaacagcagaagtccatgtgataaatggatgactataacatgttcagtcattgtgattctatgccaaaggcagactcagaggcaggataacagccattgatcacagtttccgacatgtcccattaaccttatggttggttctaatcccttttgattccatcaatgtggtgcccattcctgttttcagcattatagaaatatttttcctcatctgtttctttatgcattacttaatggtttggaatcagagggatggtttgaatcccagttctattattacatcatctttctggattctggtatcttaatctggaaaacagggatactgttatctgcctgggagggtgttttgttgattagataagacaggctgagtggatgataagcaaagactggcatttttgtctgctcagtaaatgatagcaaactcttcttctggtccagtgagccagaagacactttacaccagaagcccccagagagctaaatttgattaattatagtaaatttaaagagatgacatcttggccgggcgcggtggctcacgcctgtaatcccagcactttgggaggccgaggcgggtggatcatgaggtcaggagatcgagaccatcctggctaacaaggtgaaaccccgtctctactaaaaatacaaaaaaaaatyagccgggcgcggtggcgggcrcctgtagtcccagctactcgggaggctgaggcaggagaatggcgtgaacccgggaagcggagcttgcagtgagccgagattgcgccactgcagtccgcagtcccgcctgggcgacagagcgagactccgtctcaaaaaaaaaaaaaaaaaaaaaagagatgacatcttttgttgtggagtgcattctccttctgcataactgttagtgccatagtctgagtcattatttctaatcttgagtcattcaaatccttttaaaaatgggaatatcaaccattcaatcaatgaattattgttcagttatttcatctagattttttttgaactgtgaaaaccagtcatgcaaattcatttgattttataaagcattggaagaatagtttgcgaattattgtaactatgtgaatgactacagctattatttaatattttagagtcaataataatccattattggaaattcaaataagtaagaaaattgaagctttgaatccataactaatgaggaaagaactattatgtttaattgcagatggagattgatttttcaaattacttttcaaagtatttaaaaatatctgcttgctgggtgctgtggctcacaccagtaatcccagcactttgggaggccaaagcaggtggatcacctgaagtcaggagttcaagaccagcctgaccaacatggtgaaaccccatctctactaaaaatacaaaattagctgggcgtggtggtgcatgcctataatctcagctgcttgggaggctgaggcaggagaactgcttgaacctgggaagtgaaggatacggtgagccaagatcacaccgctgcactccagcctgggcaacaagagcaaaactctgtctcaaaaaataaataaataaaaattaaagtaaataaagaaaaatatctgctttattatgtacatgaaatcatcagaaactgatatttaagcttcccttccwagtaacaaatgtcctgatgcattgttaagaaaaactgcccatcagtgagctctgcagaccacattgtaagcacaatggctcatctcctttacattgagagcacagtttccagttgcaaagtgtatagcagcttttaatctatcaccacatggcaggaaggcattactgcaatactttcattctagtgaaatcaccctgaagtcacaaaatgtgctcggggtaacagtggcttgtggcactgcgatagaaacctgcattgttaggtcattcattttggggcagggttcccataaaaggaagtgggtctgggctggaaatatcacctcctaggaaatatgcagtaagatggattgtgtgcctgaaggttaaactctttttccaacaggtattcaatggcattagaagtaactcaccccagctagagaaactgtgtagtagtgtgaatgtaagcaatgagattaaatcttcaggaaacacaatgaaagtcatttttttcacggatggatccaggccatatggcggcttcactgcttcctatacctccagtgaagatgcaggtaatgtaggatgttgtaaatgccccccattttaatcaggggcactgcagatgcccccakctactgccaatggcagcagagccatccattttccctttagtgatayttgaaatctttgacataagacaaacacacataagcagatgaaaaacgcactgcagacagaaaaaaagctttctgatttcagaaagaaactgccatagtgaatttaaaacttttaatgctattagattagcttctagcacagtttcaggtcatgttaccatgagggttggtgacctgttccgtagtccctggtcaattcttttgtgctgaaagaaaccatctacctcctagagggtaacttagtctcagagagtaattaattttgctggggacagaacaggctttattgtttctagtcatctatccacacacatatttccagtgaaaataaatgggaggtttgatttgatatagaatattccaaaattaagcaagatatggcctctaattataaatatcctcctatttcctgaattgggttcaaaattttaaagggttttaaattttagaagtgggagtgttttaaaatttagaagttttaaaatttagaagtgggagtgaatattaaaagaaaaacgctaagttatttcattggtacaagaagcatctgttcctttattaaaagggggcaaattaatggcaaattaatgtcctattatckgtttgatttaaaataatttattagatcaagtggagaattgctaatcaagccattaggacctgccaccattatatttatgtattcctctaaagtaaatattaatgaacagtaggcctcaatatttggacctattgatacagagccaaacgcccaccacttaatctacagcaacaggaaaatagagaagttgttgatttttgcacatctttcctttataaacttgcagaaacttccataatttgcatgccttttacccataagcttgactgcatctagaaaaacaaatcaaagcagtaatgttgatgttttagttactgttcctgtattgtttatctcttccgttgtggcctgaatcttactactactttctctgttgccttctgttttcttagtgtgtggtgggtctcttcsaaatactcctgaaggaaactttacttctcctggctatgacggagtcaggaattactcaagaaacctgaactgcgaatggactctcagcaatccaaatcagggaaattcatccatttccattcactttgaagatttttacctagaaagtcaccaagactgtcaatttgatgtcctcgagtttcgagtgggtgagttctatctaagaatgcgttytcccatttatctacaatattctttttatcttttttgttgttgtcgctgctgttgttgttgttttgagacaggagcttgctctcttgcccggactggagtgcagtggtgtgatcataactcactgcagcctcaacctcccaggctcaggtgatcctcttgcctcagtcccccaagtggcttggactacaggtgtacatcaccacatacaactaattattaaaattttttgtagagatggggtctccctatgttgtccaggctggtctcaaactcctggcctcaagtratcctccctctttggcctcccaaagtgctggggttacaggcatgagccaccayggctggcctacaatattcttcatatgcttggagactactaacaatgaagggagtcaaatggctctaacataggtacacacgatccaaaagaactctgttcgaagccataattctgtgtgtgcccagctgaggaaaacgaaccccaggaacagtgagtgaggcggatcactgtacaactagactctgtgttacagtcacttcgtttcccggcatgtgacttttgccgaagcgagagtccactactatcaagactcctttccaaggagactgggacttagcatgctcagcatgtgttggcagtttcctgaacttccaggatttatgaaggggctgtgaaattctcctgaggccttaggagttaaaagaagttttgcaatataccagatggagaaacacatggaagctatttggggaaataaccccaaagcagtcatttgtcttggttttcgtgatggaaaaggattgcggtgtactcaataaaccataattctcttaagaatttttaaaactctgtattcaaagaggatgaatcaattttctttctttcccatagtcaaggtgtaggttattcattaggttgcttccatgattatgctgacacgtttttctcagtaaataaacaagtagatagaggaagacaataatattgtaaatagtacgtaatcatccatactgtaaaagttttgctgagttctgtgtaatcccaaaatttaaagaaaaggaggctgaaagcagcagaagctcatcagttagttggtggagaagtccttgggaaactgagaggtcaatgttaattacctttgagaacgtgagcgacagaattttcaggaaggagaatttgatagagcctgtacccacgggccaagggcctcagccagagagtcctccaacctctctgaggctgaagagtctaaaaaggcttataagggaaagggaagttgtggtttgagaatgttctccatggaattctgataaaccctcaccccctctgcctgtttcaaaaccaccggcttgtggtmttaagcagaacagctgtatctcaaatttcagtcagctaaatgctgtcttctctttatttgctcaggtttagaggcagttaaaatactatatatcattgatttagaagaccagtgatgtttatctgacagaataaaaagaaagcagataaatgagagctctgttggtgctctgtacatgttcatcaaacccacgaaatgtaatcttcatgaaaaatattaggctcagatctgacagctcttggcctgaatgccgaatatggagtccatttcagttgattgaatatagtgaagaaatctttcaaattttaggcaatgatcactttatcttgaggatatattttatcactgttggtattatatttcttacaccctacaaaaggtgtgtccaaaagtgctattttaattcattgtatctctgtttagatatgctgaaataactatgaaaacacaaattggaacaaaatggtgtccatcatagaggttcatttcaaaattgctttgatttttttgtgtttgttttacccccttggagggactttctgttgcagttaacagagacacacaaatattgtgcaatgtctgctactaaatcagaatttaagtgtgtgtcaatgaatatcttgaaatttgtttttatcaaattcattgaatgtatttctcaaaagctgtatcaatgatggcacttggtatattattttgttcaggtgatgctgatgggcccctgatgtggagactttgtggtccttcaaagcctacattgccattggttataccttattctcaggtatggattcactttgtcaccaacgaacgtgtagaacacattggattccatgcaaagtattcctttacaggtaagaattataattaagatcttgataaaattacttataaagattaatgatttttttccataaagatttcatatatattttgttagatttatttctacatagctattagttttgttaatattatcaatgagattttctaaattacattttttaattggttgtggctgatatctagaaattttataatttgcataatttaaaattattatttaattttaaaattattcaataataaactgcataattttaaaattattaaattttaaaattatccaataattatttaataattaataataataaataattawtaataataattattatttaataattttaaaattattttrtaatttgcataattattataaattttataattttgcatacatgtaactttagtccaaagatctagctatcctcttattagttttaatatgttgtctatagattctctttgatctttctgtgtaaacttctgcaaatgttagttctttatgctttcagtcataatacagaatttcattttcttgcatccttttgctagctagggccaccatcgaatattgaacagaaggaatgatagcatcttgtttctgacctggatgtgactatgacattttattattaaatatattggttgctcttaagtttccaataaatatcttttgttaaagaaagtcccttccatccttagtgtgaaaaagctttttttaaatgtaaatgggcataggattttatcagatgattttctgcatccattgagatgattcaactttttctcctttcataagttaatgtgatgaattatatgaaagatttatttctcttggtaaaccatccttgcatttctgggataaatcctattttgtcatgatgtgtgttttatacatataatgggtattatttgctagtgttttgtgttggatttgcatatgcaacattcagagtttgtgctggaaaacccagccctactcttgactgcttcccttggcaatgggaggttttctagtcccttttcacgagcatgccagtttgtttagattcccaacttcttgtaaaagtctcaattccagtcctgccttctgtggagacccagagccctatcttctcctcctacccagtcatcaaaacctcagagcccaaccctgggacccaaacctgcattctttaccctctcagacttcactctttcactttcactcctctcactttgagtacacttactgcttctagattttggggagctgcttttctttccattgagtttgctatgaatcaaaatatgttttagttatggttttatctaacattcctttgtgttataaccaaatggctggttgaagaaggagtgaaattgattatctactcactcaaccatcttgccagttgattttccttcatcagattcaaagaagagtcaggtttcagtaaacagtattatttgtattgaacatcagaccatattattcttcagaaatgtatttgtttttcaattttcaattttctatgctaataccgtatggaattttgttattcctaaacttttacccaattttacttttcttctatttaatttcatttattttatacatatatatacataaaatatacatacacaaaaaaatacaaaatatatatatacaaatatatatactatatatacacaaatatatatgtactatatatatacaaatatatatatactatatatacaaatatatatagtatatatatacatatatatactatatatataaatatatatactatatatacaaatatatatactatatatagtatatacaaatatatatatactatatatagtgtgtatatatatactatatatggtgtgtgtgtgtatatatatatactatatatggtgtgtgtgtatatatataccctatatatggtgtgtgtatatatatatatatacacactatatatggtgtgtgtgtatatatatactatatatggtgtatatatatacacactatatatggtgtatatatatatatactatatatggtgtgtgtgtgtgtgtgwrtrtatatatatatatatatatactatatatggtgtatatatataatatggtttttttttgagatagagtcttgttctgtcaccctgactggagtgcaatggcatgacctcggttcactacagcctccaccttctgattcaagcgattctcctgcctcagcctcctgaatacctgggattacaggcagacgccaccaagcccagctaatttttgtatttttagttgagatggggtttcaccatgttggccaggctggtcttgagctcctgacctcgggtgatttgcccacttcggcctcccaaagtgctggtattactggcgtgagccaccatgcctggccttactatgtttttaatcacaaaatctgatggttatgattactacttactttggcattatcggttcttttttttacttctgttttattgagagggttaccaatctcatttcagattgtggcggaatacagataggtgacagtggagtgatcacaagccccaactatccaaatgcttatgacagcctgacccactgctcttsgctgttggaggccccacaagggcacaccatcactgtgagtgctaatgactgggtgaaatgcttctgagacaatagaaccacaatagcctgtcctgcatgaaaatggagctcttttattaagcaagtgattagagaaggctttgattctacaatgagatcactgtttttccctaacattttctcactagagcacatacattggcatttattattcatgaagagtgaaatctcttttttaagcatagggaaagatatacacagaagataattctgcgtcttagagagaagtgtattcagtttcttaatatgtgttgccatcccaaaccagggaaatgtcttttctcaaaatttccaagagaaccttcaataaggaaaaaaaagtagaggggaagggagaattaaataagagacaaaaatacaaattataaaaataaaaacaaaattaaacgatttgtaagggccttatcttcgtaacagttgataaaagctcactgacaaccattttcttttttctcctgcagctcacatttagtgactttgatattgaaccccatacaacttgtgcttgggactctgtcactgtcaggaatggtgggtcccctgaatcacccatcataggacaatactgtggaaattcaaaccccaggacaatacagtcaggttccaatcagctggtcgtgacttttaactcagaccattcattgcaaggtggtggattttatgctacgtggaacacacaaactttaggtaaaagaaatgtttgctccatttgattttctttttagtgatgtatagtatgaactcataatatgtacattttgtacctactttacatcaggcttagttctaaatatttgcacatgtcatctcatgcagcaaccctggtgggataacacaatatcaatacctggcatctctattttgcatgggcagagactgaggaagcatgggttgatcatttgcctagatacatagccgataattggtagagtcgggatttgaataaaggcaattcagtccagaaactttgatctcaacacttcatgatgctgccttcatcggcaaaagggtatggcacaacctgggaatctcaagtaatagaaacatgagttggaatcccaagtgcttgaaaatatctggagcctaaaagcagaatgctgagtggtgagctgagggcaggaaaataagtccacaacataaagagccttggtttatatgttatcccttgaacaatgggaaactgttgaagagttttgaaaacgaaggtgacaagatgagatttgtaatttagaacaaatgctgtagtgaatgggtcctgagtcaaaatatgacagatttcattttaaaagaatagtttttgtgcatagaaagtataaacattgtgaaaattctcagaaaatacaaggacttgtatcacatactttattagggatttctgtaaatcttgtatatcacacaagacaattatttctggtagagtcacagttattatgaagctctttgttgactgagtcagacttcccctggttaacaaccactggctgttattgaagtgagaagggagttttaggtgaatccctgatttccaggggtttcacagcaaaagattcggagaatgcctctttaacttcattttgttttgtatgaaaattctagatttttcttcctttgaatctacataattaattttgatccatcagtcagtttcaatatgaatcaatcagattgcttaataaaagaattttccccaactcaaaatcactttctctagtccagttagagtaacgttgcaaatggagtgtagagtaatattctcatgtgtgaatggtaataaaatacagaacttagcattgccaggttacatatactacataggctcaaagagaataaaaatacagctcttgtttggagacaggatggaaatctatcctctctatggcacggattagtgttcttggttgaattcaatatcattgtaacacaactgtaacagctgaaattttctctcaatttaactcacctttccatttatggagagagcttgctgtgcacctgactggaagatgatcacttgtaaaaaatgatgaattgaaatctcacatttggaaatgttccttctgtagcagtcttgagtttccaaaattactttccttgctgattgatggctttttacatggcaatatttcaggttgtggtggaatatttcattctgataatggtacaatcagatcccctcactggcctcagaattttcccgaaaacagcagatgttcctggacggccattactcacaaaagtaaacacttggagatcagctttgacaacaacttcctaatccccagcggtgatggacaatgtcagaatagcttcgtgaaggttagtacacttgttcatttaattggagccaagttggttttgtgaacattagtgtttaagctagaaatgattcattgtcgctcaaagtaagaaaattttgctgcctggattccttggatgaaaagtgagaaagtgagaaacctcaactgttaggagctagaatttcttttctttcttacttttctaatagatcctaaagggaaaaatgccctttataatatagggcactaccacaggcaaaatttaaagcatgccacaaaaattacggaacgttgaaggagcagctaatgccagccttcaccttgggcattaagaccccacagtctgaaaaaaccgtgagaaagccatgtaaaaatgatgggaatggggcatcaggagagcaaakytctttcaaaatctaaagttataaatgctgctcgtgtggcagtggcttgtcactttccactgacttgtgactatgatgactgtcttagaaattcatttcatctgtactgttttgcatcttccaagttatatctctaaaagtctgtgacttttagagaaagagtgccttatttccactgtgcctttccagtggaaataacactggtcacgttagcccctccattcatgtctgtcatacctaccacctgcatgttcttctctgagctacttaaacaattggcctttaagttattcaactgtagaatgaagagcatgattccttcttcagtggggctgttttaagcattggagataatacgatgtaataacataggtagtgctaagtacttggaatttaaagtcacttgatgagtcaaagtggcttttattgtcagtgttattacttcctatcaactctcaaatgatgttttatatctcattgacccatgcttactgtttaaatgaaaatctcatatgtgtataacatatatatatatatatatacatataataaaatacatttaatatacacttttcttaatggctttttccatgaactaaatgaactctcttctcatgaaatgaatcaatatmaagtattcagacttaagtaaaactttcaagtgctccagttgtaaaactggaatgtggaaaatggcctaggctcattccttstctggattgaatgggggtccctctgataacatcgggcaagcccaacgctgctgccgagtgggatgtattaggaaccctgccaaaaataagtggccgtgggaagcactcgtcttctcctaatgggcccgagatgcttgtttctgccaagaaatgctgtgtgggtggacggaaccagtaaagggacccagcttcggcaagcagcccccgcaggaagccacttaacacctgtaaagctgagattctctttacccacccagagacaccagggtaggtgggactggaaaaatgggtcccagtcacagaaaggggccagtctgggaagcctctttgtccccacaggccagacmtgctcctcttccacccagagacattgaggtacccgggggtattggtaggggaaaattastataccctttgcyttcaactgagaaacacacagagtccctcaggtagcaccagcaagaaccagtgagagccccggtagcaccaatgtaaaccaagcagaccagaattccaccacacagattctgaatattgaagagcaactggaactgtaacccacaaaatgtgcaaggcacgtggtaaacataaacagggtgacagcctgctaaaataaaagatttgaataggacccaaagttcccyaacataataaatgacatgtcctgggtacaatcagaaagaacacgttgtatcaggaatcaagaacatcacaacttgaaagagaaaagaatcaagtgatgtcaacagtgagataaatcagatgttgaaatatatgacaaggatgttgaagtagtttccattaacatgcttcaacaatcactgacgagctctcttgaaacaaatagaaaatatcagcaaaaaaacaatggttacaataaagaactaaatagaaattatagaactgaaaaatacactaacataaataaagaacatgctgaataggctcaatrgtagcatggagatgacagagaatagaatcagtgaacttgaagatagaacaatagaattcacccagtctgcacaataaagagaaaatagactgaaaaaacaaacaaactagatcaacacagacttagggactcatggacagtaacaaaagattcaacattctctcaaagggagaggagagagtgcagctgaaagaacaatcaaagaactagtggctgtaaactttcccaaatttggcaaaagagacacacctataggttcaagaagctgagtgaacctaaaccaagataaacacaaagaaatgtaagttcagacatatcttaattaaacttctgaacactgaaggcaaacaaaaagtcttgaaagcagtcagagagaattgggacattacctagagaggaagaccrgttagaataaaagcagatttctcatctgaaaccatggaggccctaatgaattgacaatatattcttcaagtgctgaaacaaaggaattgtcaaccatacattttatatctggaaaactatctttcaggagtaaagaggaaataaaaacttctcatatgaaggwaaactaaacaaaattatcactaggaaacctaccattaaagatggtcaaacagaagttcttcaaacaaaaatgaaattattaaagaaccgtggagcatgagaaaagaaaaaggaaagtggaaaaagcaaaaatatgtrtacatacaatagaatatccttttccccataaagcttgtgaatcatatttaataaaacaagaaattataatgccctctgttattcagtataatgatatggaaaagttgaaaggggacctaaatggaaatcacatttccacaagtggtcagatgtggatggtggtagactactataatcacataggcacattgtcacacacagaacaaccactaccaaaactgtgtgaagaaatgtacagaaaaacgctaatatcaatcaaaatggaatccccaagatatcaagaaaagagaaatagaggaccaaaaagcagataaagtaaacagaaattatataataaaatgtagacacagaactgatatatatcagtataattgtaaatagtttagttagaccaatcacaatacaggttatcaagccaaaacatgatctaagtgataataaactgatttccaattcaaccacgtaggtacatgaaaagtaaaaggatggaaaaggatgtcatgcaaaggttaaccaaaaaagcaggagtggatatatttatatctgatgaagtagactttagagtacagaaaattacaacagaaaaagaggaatcttacataatgataaaaggatcaatccaccaggaagacataatgatcctcctaaatgtgtatgcaccaaacaacagaggcayaaaatacataaagcaataactgatagagctaagaagagaagtagacaaatcttcggttatagctgaggacttcaacactctcctctcagtaattgatagaacaactagacagataattgacaaggatatagaagaactctacaaaaccatcagttaataggatctgattgacatatatatgtgtgtgtgtgtgtgtatatatatgtgtgtgtgtgtgtgtgtgtataaatatatatatgtaaaatacaccacacagcaacatcagaatacacaattttttaggaactcttgtaacattccaaggtagatcatatcctgagacatggaaaaacctcaaccaagtcaaggaattgaaatacagagtgtgttctttgagtatattaaaactgaactaaaaaacagtaacagaatatcttattaagcactgagctgagctggagagaactgagctgccaattgttggagcagctaattaaaacaacaggccaaaatgtaagtaacagtcctgtctttcatcattttctgctgtggtgtaagaggccaaacaggagaaagctctgtctccctcaatcgtccattctttcccatgggaagtgcctggtaaggatcagatggatcagtgtagatatagaaatggtctcattgccaagtaagccccaaacaaatatgtgcaggatctgagtgctaaaaataatgaaatgctggcataracctaaatgaaagagacaattatatttatgaattggaagactcaacatagtaaagatgtcccttctccccaaaatgatggataggtttaatgcaattcctatcaaattttctccaaagtcttttgtaggcatagacaactttttccacaacttatatgaaggcagagacccttcaatggctaaaagaatcttggaaaagaagaataaaatgggaggaagaattctaccttactatttacctaggcttacttatctaagttacagtaatcaagacaatgtggtattggttgaaaacccagatgaaaacagagaacctagaaatacactcacacaaacatcctcaattgatttttgacaaaggtgcaaaaactttccaatgtaggaagaatggttttttcaacaaatggtactagagcaattgaacatccacaggcaaaaaatatgaatctcaacctaaacctcattattttgtagaaaacctcactcaaaatagatgatagactgaaaagtaaaatataaaacttctagagaaaaaaaaatagcagatgtcttcaggacctggagataggcaaagaggtcttagattaaacaacaaaagaatgattcataagagaaaaaataaaatgataaattttaccccatttaaattaaaaatcttatgccatgtgaaatattttcatccagtctgtagccagtctgttcattttcttcacataggcaatgtactactatgtaaaatatataaagaagtctcaaactcargagtaaaatacaaacagttctattagaatatggacaaaagacatgggcagatagtccaccaaagagactctacagatgataaataccagaaaagatgttcaacgtcattaacttctggagaagtatgaattaaaaccacagtgagctatcactacacacctattcgaagacaaatatttaccaattgcataatatttaccaattgcactctgggcatttatccgagagaaatgaaaactatgtttacacaaaaacttgtttacgaatctatataaatagcacctttatttgtaatagctgaaaccagcactaaggcctttcaacaggtgaatggttaaacaaattgtggtacttgcttaccgtggaatgtaactcctgaataaaaacaaactatttatagattaacaatctggacaaatcactgagggattatgccaagtgaaaaaaggcagcctccaaagattacatactctgctgttccatttatataatattttgaaatgatagtgttttagaaatggaaagcagagagccagaggttagagagaaggcaatgtaggagtaaattgtgtgtggttataaayaacaaaagcaacttagggattcctgtggtattggaatttcagtatcttgaatgcaattgtgtacaacttgtatataacttaatacacacacacacacacacacgagttcaagtaaaactaggaaactgagtaaaattggtgttatgtcaatgccagtaacctggttgtgatagtatactacagttttgcaagatgtcagtattggaggaactcagaaatgtgtacaaggaatttctccatattatatcttacaaatgtatgtgaatctgcaattatgtctgtaaacatttgtttaaaaaatagttgaatgataaaatataacctacaacctgactgaattatatagaacactaagaaaaatcagaaagtttttgacctgatgacagttaagtaacattttgtaggttcaatatagttttgatgagtcctctgtcatatagccaatgaaatgagttcttgataggcaaggcagaaatgaatattgaataactctttaccattgtcatcaccattatcatcattattattaaacttatgttcccaggccaaaaggtagagwtgtcgaatctataattaatgacttcagaaaagtataagcacttaagcattcttggattccttcattaaagaacttgaggctctttattaagttttagcccttcttactttgcctgtttagtaatgtttgtaaaaatatagtatatggcccaggcatggtggcttatgcctgtaatcccagcacttttggaggccaagacaggcagatcagttgagtccaggagtttgagaccaggctgggcaacacgggaaaaccccatctctgcaaaaaaatacaaaaaactagccaggcatggttgcacgcacctgtagtcccagctacttgggaggctgaggtgggaagatcacctgagtccagaaggtcgaggctgcggtgagctgtgattgtgccactgcgctccagcctgagtgagagtgagactgtctcaaaaaaatacatatatatataaaatatatatacagattatctattgataaattgtgtttataattttatgaaatgtggataaaaaactgccatatactgtttccttggatatattattagggggaaatctaattagagatcattaagtaaaattgagtaggtgcattttttttcctgacatttttattgatcttaggcatttggcagaatatctgcacttttgttctcagtaggtccagcgccaggcasctcccttatctaataaatggctaatataatttgtcttcagtaggatgactaacagctggatacccagtgcttaaaaatcaattgaaacaatacrgctttaaagagctgagaattattaaaccaatgctatgaatcagtgctatttcacatctcttgctatggactgatttcccaatagaaatgtttttaatgacttgatgttttattgctgtgggtgaggaatatccttsagaagagatgtgtttggaatgagtaatttggtatcattccatgtgaagaaaatgttgaatagtcaagtaagattaatacacatccaactacatccttgtttgagatagttgtctgttgakagaaagggcatattgggtattgcasattgcktagcaatagtcctggcccctacccactagatactacccatcacaccgagtgtgacaatagaaaaatgactacaaaccttgccagaggtcccaaaattgctcctagttgagacctctgaactaggacgagcttctctggttaatatgtttaatgtttttggggtttttttcccccaagttttgtatattcattacctaatatgcatactttccttgagtgactcagcattgtagataaccatgatctctcacctgaactagggcaaaacctacctgactgttttccggcatcctttctgactcctattttccgaattgtaatgttttccaaaaaccaatcttcytggtggctccttgctgtattcaggacagtggcccgagtctctaacgtgtcctgcagccccctctgcaggcttcctcaccmcttcctccttggttttctctctcttctctgaactagccacggcctttcctgccatcggggttcgctcggggcaggctcacttcccccagttaggtaaagccaccaattatatattctcaacagccccatcataatgccttgtttatagctggaattttgcatgtaaatttatgattctgtgattcatgtctctgtttttccctggactgataagaattggtttgatttggaattttggtgctcaccgtttatttcctagcaactgttttttgcatgagtatataaattcagtcattcgaggtggccagaccaattaagtgacagcccaggtctacttgggagttgccaaccaaatttttggtgaatagcacacactgactggatgtcagcttttcatcaaaatggaccctacaattccacacagccaagaagtgttctgatttattccatttcatgctgattatacgtatacttggaattcatgcccactttcttcatgcaccacgatgtgcctcttgcttgctggtgttgtccagctgtgaccacaatctgctatcttcccaggagcagggctgagttccacctggctgctccgtctccctcagcacccgggaagctcggctaggtcagggcaactagaagttatgaggaaaccgaacagtgatccaggaaggtggatttttaaaaaatcaccacccagctatgcaaaaaggaacaccatctccttagagaagtcaagaatgggacatgctattttaaaaacagctttaaaaaaattattctcaaaagaaaatactacagatttgtccatgttttgtttactcttatgcttagttctgtatacgtgtgagtgccattattttgaaacctaagtgcattaaaatattgatgggaaacccttgagcattaaagttctgtgtatgtccgtgctaggtgtgggcaggaactgaggaggtggacaaagccctgmtagccactggctgtgggaacgtggctccgggtcccgttatcacaccaagtaacacattcactgccgtcttccagtctcaggaggcaccagctcagggcttctccgcgtcctttgttagccgtaagtagccctaagaaccaaacccagaggtctttgcgggagtgtggttgtcacaggcaggcagggttggctaaacctgggggtctaggggaggagtatgggggtctacggggaggatgagtcacctaatcccaagaagacacctttcttccaaatagcagtgagaacagaactgaattgagaagtgatataaaagccatgaggggcactaaccaacgtctagaaataagcctggcatccagagtgggctgatattgggcagaagcgcagatggctagttcgttagcaacaaccagtgtggctggcctgtggcaccttgaccacaaaatcccgtggggggcttgaaacacatgcagattcctgagcctcactccaggcccawctgaattcagaatttccatgacgaagtctttcmtgytttttttttttttttttgasacggcgtctcactctgtcgccaggctggagtgcagtggtgcaatctcggctcactgcaccctccacgtcctgggttcacgccattctcctgcaacctccacctcctgggttcaagctattctcctgccttagcctgccgagtagctgggactacaggtgtgtgccaccatgcccagctaatttttttttttttgtatttttagtagagacggggtttcaccatgttggccaggatgatcttgatctcttgacctcgtgaaccgcccgcctcggcctcccaaagtgctggcataagccaccgtgcccggccggtcttgcatgttttaactgtcatccagagggttctcatgctaagtcaactttgggagccagtttctttgggaatgttctttcctaattttgattaggaaggatggatctccttttctagctattgtacactattagattcgtgggaaatgtagcakttttcaagtcagagaagcaatggtgtgtgcctgttggctgagttaaatcaagtgtagccactcatggcaaaccactgtttagggaaaagtttgaggaaaggaattagaggaagtaatacartagacaggtttttcagactgaatcagagagtgctggaaaggaartactgaaagacaaccctagaccaaatcttaggtctgcaggtggtycactgtgtaagtgtgcacgtgtgtacttgtgtgtgttttaatgtcaatttaaaaggatagagatattttcgtgcttgatagatcagagagtgaagtggattaactagtcaatggttatatgaaaacaaatcattttagtggtgaaaagatatttctttctgtttcgaaaaccagggatgcatgtaagaatttgataagagttgggattaataaatccagctagttttaaaaagcaaccattgttktggctagattacaatggtaatgaaaatagcagttttctaataataagacattttaaaaacattaattgtgtaaagtactaatcagatacaaatcattttttatctgttttatttctttatctgcatgaaccatattctatcattgctcgtttatcctttcttaatatcttaatattaagggatttgcagtagatttgtsgtaatattacgaggactcagtccataaaactctgcagcattttctaaaaatgtataatattcttattaagcacatatgtatgtttttaaatcagagctttattctcttcattcttgcttcttccatttggaatatctcagggaactatgtctatagataatttaggaaaatgcctctttccttcatggacaaaatagatacacgagaaataaatgatctgatgatgactttttgttcccacataggatgtggaagtaatttcactggcccttcaggttacatcatttctccaaattacccaaaacaatatgacaacaacatgaattgcacctatgtcatagaggctaatcctctgtcagtggtcctcttgacttttgtgtccttccacttagaaggtaagtttattcttttaaaaaaattacgtttaattgacaaacaaaaattgtatatttatggtgtacaacatgttttgacatatgtacatgttgtagagtggctaaatccagttaattaacatgtctgctcactcacwtacttagcactttttgtggggagagcatttaaaacctctcttagcaatttttaagtattcggcaagtaatcaagtatttcaggtattcaaccttgttattcgctattggcaccatgttgtacagtagatctcctgaacttattcctcctagctgaaattttgtatcctgtgaccaatatatcctaaatctccactcccacataccctaccagcctctggtaaccaccattctactctctgcttctatgagttcgacatttttagattccacatccaagtgagatcatgcaatgtttgcctttctgtgtgtagcttatttcacttagcataatgtcctccaggttcatccatgttgtcacaaatgacaagattttattcttttttaaggccaaagagtattccattgtgtatatctaccacattttctttatccattcattcactggtggacactcaggtccattccatgtcttggccattatgaatcatgctgcaatgaacacgacagtatagataatctcttggacacgctgatttgatttcctttggatctatgcccagaaatgaacttggtggatcatatggtagttctatttttaatgttttgggaaactgccatgcatttttccataatggctgcactaatttacattcccatcaaaagtgtacgaggaagagttcccttttctccacatccttgccaaaacttatctcttgtcttttgataatagccttggaagataagttcattcttaagtaaactctaattggttcttcagaaatgaatgaggagtaagtagaggcagaagtctaaaactcaccatttaaagaaaatattgaaaatatgttacagagtagatttaatgtaaacgtgattaaaatttcatccaatttttaaagaatacaagtattattctatgtattccatctagaagtaaaaaaatagtgacagaactttaacaacacaagtattgcataaattgcttaaagaaaataagtctgaaatgtttcatgttaacatagcttttaatttattcacttgcatttaaagtttatagacatacgtgtgcacacacacacccacattcatgcacacactattaaccaaaccagtgagagaaactgtcttattgagtcaacataggtgttcgacaaatattgaataagtaagtaaattaataaaattaatataggctgggcacggtggctcacgcctataatcccagcactttgggaggccaaggtgggcagatcacctgaggtcgggagttcgagaccagcctgaccaacatggagaaaccctgtccctgttaaaaatacaaaattagccaggtgtggtggcacatgcctgtaatcccagctactcgggaggctgaggcaggagaatcgcttgaacccaggaggcggaagttgcggtgagcctagatcatgccattgcactccagcctggscgacaagagcgaaactctgtctcaaaaagaaaaaattaatatatgtgccctgcttttagtaaatactaccattgggcgttctttcttctgctccatctcggtcatcttcatcttctcagtcctgactcttcagtgcctgagttcctggccacaagtgccctctgtgttcattctcccactctagggaatgggccgttggcagagggaacagtagagatgccgatttgggctgggctttgactgacaatagacaccacttggtgtttaatggaggctttcacacagtggaaaggaaattccttcaaatagatgggtattttcaaccactcataaccatattaattttcttgttacatatcagctttctatttctaaaccacaatttatctgcaratttgtcaagctacctcggtatattcgaaatttcttactcttgggttagtctctcatggcagtgaaaagttacactttgcaaaatgttctatagcattcaacatctgggaaatgtatggtttataaaaatgacatgtcagaactcataaatggataaatttaacaaagcttgtctcacttaatcctttttcctatgacctcactgccttttcatacatctctgcagttgtaattttcagcacatgtgtttgcttaaaaaaatgccaagtgtaaatcaatgtatgtcactgtaaaaatggaatataaagtaaagtgtcatcttttcagcatttgctagcccaaaatcccagtaccataaaaagatgcccatgatatatgaaggcttgagggagggtaaaatagtttgtataagatgatccaattttctttctaaaataatgtgtgtgaataaaatctataaggctattaaccagtacattaagagttgtcaccactgtgtgatagatttattcgagatgcttattttcttctttatagcttttatgttatttttataattaggacaattattttaatagcaggggaacaacatgtggcttggattttgtgtttgtggtcattaagttaaataaacagtgcatctcacaagaccgtatcactcagactaagaaaggagactctagtaattgtactataaagccacagaaagcaatgctgataccagtggtatatgtattattataagagactctatcatgacctgagacagctccctgagctcagttgatcaggtgagaaaaaggggagcagccctggaatatctcagtatagtacagggaaagtgagcacagcatttaggatggatcttaatgccaggtcagccacttactgctattcaagtgactttgtgcaaattacttcacctttatttctgatacttatatatatatagcactttgctatatatgtgtgtatgtgtgtgtctaatatatatttattatatatgtataatagtagttctgaaagtcagataatgttagattgatttctgcttccgctaatggatttgccaatcctcactcagttgaagactgattcttttctaagatggtatccttacaacaatgccttgtgacatttccagtgtttaagtgttcagcattttcaaactgctgcctgagtaatttctggctatagattcatctaattatgatgattccccaaaagggtgactttaatcaaatttattttataattagcttcttatccttaaccatatcaatgctgacatttattgaataccatcaccgagctacagattcgctagctacagtaaaagtaacctttccccagcccttctaaagtgagcctgagggattcatgtgcaatatattgggatgaaaccgagrattgctctgaaggaaggtcatagctttattgagggagccttggcctttctagctgctataggcacttggaactgtttctgagagactctgttcaaatggctaagyatttctgagcccaggatcccagcagagccagtgttgacttaggtggtgatgaaggttctagatctgtcatcttggtggaccattagcacaaaaggtgggattggcaaggaaaagatgtggtatcccaggctacaaaatactgtgaggaaacacacttgtccctatatggcgtctactaaacattgacamctgcttagggagggttttaccatgaagggaaaaatacagattgttgaaccacactcaactcttaggttacaaaggctcagtgacctactttccgcttaccacaaagtaagttgctccaagtttaatgttggtctaaatttctctaactttctcattacttttacatttccagtactagacattccatgaactacagaccattgatgtttgtcctcattttggaatctggtattattaaataactgcttattttattttcccaaatattaaacagtccaaaattttgtgttctcattattcatgtggccaactagawgccctcaatctgctaaaaaaaaaaaaaattatagatccagttttcttayttcatagataaagcacttcttgaggcaaaatgaagcaagccagtgccttctaaaccttgattattctttcattaaaattagatagtaggccgggcatggtggctcacgcctgtaattcccccactttgggaggccgaggtgggcggatcatgaggtcagggggtcgagaacatcctggctaacacggtgaawccttgtctctactaaacaaaatgcaaaaaattagccgggcgtggtggcgggcscctgtagtcccagctactcgggaagctgaagcaggagaatggcgtgaacccgggaggcggagcttgcagtgagccaagattgcgctactgccctccagcctggacaacagagcaagactctgtctcaaaataaataaatacataaataaaatttaaaaaatgaaaaaaattgggtagtaacattaattcaccttggtgataatgaggaatttagaaattctcaatttaaaaattctacacgcmgtaaactgtaaactcagtgtttctcagatccagtaattcttgacaagcattggagggtgcagcagcgcttagctcgtgaggtggaaacaccaaagggacaaatgcctttgcttgttgtcctctagagatggcttcaaagccccaacaggagtgggcccagattcacacctaatatttgcctaaattctcttggattaactgaagtcccagtttatgggttatatctaatagaaagcttaaagaaaaaaagtaaaaaaaaattagttttagatttttctttttgacatttttytccccatcaagaagcacaataaatgagctttgtcagttttctttatttcctcctatttaaattttttaaaaactggtattgctcaactgctgtttcttctctttgctttctcagttgtttctaaagaactcagaatgtggtcgcattccacattactttagaaaaaagtgggcagtggtccttttgaaatgtttcctattgatattttattcaactggcagagcactggagcagatggtgtagtttctgtgaaatccctygtttgcctgtgttacactccaatttgctttaatttgtttggccttcgtgcgcaatggaacttagctgtatactagtacatgcttccccctcctctgaatcatgcctccgtagaggagaccagtctcccagctactcagggtaaagttaacaagacagatgataggtctcagtcactgctgcctggtaattcatgtgcctctgcctagaacccatttctttcttccttccttcctttctttttctttctttcttcctttcctttcctttccttccttccttctttttccttccttcctttcttttcttttcttttcttcacagagtcttgctctgttgcccaggctggactacagtggtgsgatctcagctcactgcaacctccgcttcccaggttcaagcaattctcrtggctcagcctcccgagtagctgggattacaggcaccagacaccatgcccagctaatwattgtatttttagtagagrtggggtttcaccttgttggcsgggctggtctcaaactcctgacctcaagtgatctgcctgcctcggcctcccaaagtgttgggattacaggtgtgagccactgtgcctggcccctagaacccatttctatttcctgaaaatacttgatcttatctacaacatggaaatatcccaaacaaagggttttccctcatctctagtcctctttggtgtctcggcccacgccctccccccactttggagaaaaactgtggtccaactctaaatcccacaagtttattctatttgtggaattactcatccttagttttccttcagttctctcatagttcttagaactatgatgaagtttggaattagacattgcccagtaataaatcccggaaaaatagaacaaaaaattaaattttactgcatggtatagagccttgcccattgcaaacgatgaatatgttttaaagtttttaggaaggatggaaaatagtcataaaaacaaatgatagggaatcgttttgcagctcagagatttcagtagtaaatgtctatcaaatcacttgttgaagacagagttaagaattactgagttcccggtcccatgacgtggactctagtccacggagaaagtattgttcaatttcagggtgcttctcttcctcacaagttcgcatatgtctgatcgaatgctgcctcttggtcataaactcaactgtgatatccatcttgcttcttgaagaagtttttccaaacctcaactaagtttccttctctccctagaagacagtcaccccaattatgagagtgttgtgtatattttgattatacatacaattggctcttccaataatgatgagaaagtgtttaatataattattttctgatgcctttagtctgtcaccaacaccttctcactgaagaatcaggctgatatttttgatctaatgcagtgatgggatatatagaactttagaatatgatatatgtgtgtaaagtacttaatgtctagtgacacacatatccattttcttgcatattactttgttgatgttaattttttatattttcttagactttagctaattttaccagcttctaatattatgtacatgtttgatttcttttggagagaatttgaaagggcataacatcctaccttaaacaaacgactactagaaaggatacaagaatgttttaatccatgaaataagttgccagatattataatttctacattttactgaattaggctttgagaagcagactgtcttacataatttgtttagttagttgatattctattgccatctacaaaaaatctaaaatcccttgtcaacttcctctgcatttccccaacaaacttccttattgttcaatacagacatttaataaattgttgatgagttttgattatgtctcgtaccactgccatttcatgaatgaactttctgtatttcarctagttcctttaatcaactatttgtcaacataatcaagtataagtgacactataccttatgtttcacagccttttcactgttttctaagacaactgccactgtgatcatttatatcattagcccacaacttaacaactaactctttaatacctaacacatgcatagcagcctatttgatcaaatgtgggaccaagatttcaatccagcatcagcaatttttccctacattctgtgattttggttttataacttgatatattgttgctaaataatttctataactaatgcacmatttttttattctcaaactcatctactttgaattttttaaaattccagtggagcttttgatgtcttaaagacaaatactgaggttataactaaggtacataatttggcaatattcaaaccatgaatctgagtttaacttatttcttttttgtcctctttttccacatcatattgcttctaattacatgaaaaggccattgaagttcagtctttcactctttcaacttatagatttatgcccaattagaaatatttctattccagcattttcaaaataagggaattctttgaggttaatttaaaaatgtatatcttgaattgatacctcaagatttctgcaggctgaatagaaacttagcgaaggagctgaatgtattcttaaaatgatttaagaatgtgtggtaactctttaatgcacagagatgctttttaaaagtatttgtcaagattctttgaatggcaagttatcttcaaaagttagcttagatacaaagtagggtttataagaaggatactgggtgatttcatctcatcaaaggaagggcttctagaacaaaggaaaccagggacaagaatctgtcagcatgctctctcttccccgctctttttgctgattgctgcacaacttctttttcccttacggcagcctggcttccttaatgtgtcaggaaacatggctgcagacattttttaagtttagtatctttggctcctaccattgactcttactcagttgcagtttggacacatctgattggcctggattgggtctgatgccatgccttgccattgattgactggaattatcaatcagtcaatcaatcaaccatggtcaggatggtggggttgtataaacaatagcaacagtgactctaatcatgaaaatatctaccatatccattaggaggttttatggcacaattaacaggaaacttgattcaacctggtttaaacacaaaggagcaattcattggtttttaattctggaaggtttcaaagttgggtgtgcctcaaatctctcaattcagcattttaattatgtcatcaaatattcaactgtttctgtttttactttgtgctactccagtgtgagcctcatcctaaggctggctcctctcattgctgtaggggtgctgctctcacagtgggtactcctcacccacatcagaaagagagatggcttctatcctgtggtaagctagagttgggttgcaccatcttgcaagagtcaattttgctcatctattcctattctgcatttaatgacttgttgttaatagcttgaaattggctatcgtgggagtatttatacgatggaaattggcaaatgccacaaatctctcggagagttggttgttatatttaccagcatactactacctctattccaacttccaaatatcaaacaagggtgttgaaattcacctttattggactggattgggtcacacacccacctttgaaccaaggtctatggccaggggacttggaattataaagtaagtgtgcataacgattttgtcagcgtgctcttgtaggaagagtattctaacagcaaacagcaaacaggatgtctgatttcagagtccaccgtgccatagcatgtgcttatataaaataatgtagtttgggtcattcccaatggggcatttgtaagtaagtaaattttgtgtgttggggtgatgtggatcattagatatatgttcaagttagcatcgccatgaaatraaagcattttgttcttgtggcttgtaaatgaaaatgggaaaatatttcacattgttaatcatcagagcaattaaaattaaatatcacaatgaagtttcgtttcgcatgcaccagaatggctaaaattaaaaagactgacaatgtcaaatgttggcrtccctgcagagcactggaagtcccacacatccctggtgagaatgtatactgatgtaactactatgagatatagtttggcagtttcttgtaaaattaaatacatacctaatttgggggctaataatttcactcccatttatatacccaaaggaactgaaagcatgtgcccacacaaaatctcatgcatgaatgttcatagcagcattatccataatagccaaaaggtggaaacaaaccaaatgtctgtcaactgatgaatagataaacaacatgtgctatcactataaaaaggaaaatattcagccataaagaggaatgacatactgacacatgctactacatggatggactcaaaaacattatattaagtgaaagaagccagccacaaaaggtcacatattgcatgattttattcatgtgaaatgtccggagtagacaaatccatagaggcggaaagtagtttagtaattatgtagggcaggagaccatatacaggaaggatgagactggagtgattgttaatgggcataacattttcctatgggcaatgaaaatgtagaattgggaagaatgtcagatgccaaaaatgttgtgggagagtaagtcggcaacaccaatctagggatcatttggtaacctgaaaaatagtcttaccttagtgccagtatctaacttctgaaaacttattctgatgaaatgatgaaaaacttcctcaaatatttatgtacaggaatgtttgtttcaacaatatttttatttacagaaatgtggagaatatagaatttcaagcaataggggattgatggaatgtggatggcacatctatatgttggaatttgatataggcattaatatattatgttggtgcaaaagttaggctggtttttttcctttcctttcataataatataatgttttattttatttgagatggagtcttgtgctatcacccaggctggagtgaagtggcgcgatctcagctcactgtaacttctgccttccaggttcaagcgattctcttgcctcagcctcctgagtagctgggactacaggcgcgcaccaccacacctgactaatttttgtatttttagtagagacagggttttgccgtgttgcccaggctggcctcgaattcctgaactcaggtgatccgcccgcctaggcctcccaaagtgctgggattataggcgtgagccaccatgtctggccctaatataatgttttagaagaatatttaatcacatacaaatgcatgatggatgtaatttcatattgatacaaattaggttaccatatgggtgtcatttcctattaatacaaattaggtatgatccaagttaatattttaacagtatgtgttcacctacaaaaatcactggatatgttgtagtggacacayatctttttaatttcttgtttattttgttttatatttttctttgggggatggtaggctggagcatatattcacattataattggcaaacaaaacaataatatatattttatagtccttaaacactaatagtgtttgtgtgaacatctaaaatggttgttcaataaacattaaggagtttctaatgatatctccatgataggagtcccttatctggacataagcttggagcaagttttctcagtagcagcgctattgacatgttgggctaggtagttttttgtgggtcccagagggtccggggtgtaggtgctgccctgtgtatagcagcatcttcaggagcawccctggtctctactccactctacagtgtgacagcaaaaatgccttcagatagtgcyaggtgttcttggggaggcaacayggtccccagtttacagtcactgagttaaaggaaccgttatctaaagaaaggaaattctgaattgtttcaaggtggaaagtgtctactgtgaagtcctacctgttttatcatacctgtgcttgttttgtagttagagtaaacattgtttcaacaggaaactaagttaaatayctcgtttctcattttaatttttatagcaattgcatgagtcatcatcacatttttgtttttatttttatggccttaattgtttgtgtaggttctgatcataatgcggttgttccatgccttttccagctcgttccgctgtgacgggaagctgtgtcaacgatggcgtgcacrttatcagaggttacagcgtcatgtccaccccatttgctactgtgtgtggggatgrgatgccagctcccctcaccatcgcygggccggttctgcttaacttctactccaacgagcaaatcacagacttcggattcaagttttcctataggataatctgtgagtagccataatgacagagtttggaattttcttcttttctgagtaatgtatacaaagagttttcactgcgattcatacagcactaacttgaagattcagagaatttaagggaaaaagattgtcagtgaggttcatggttaaaaaatacatatacacattttttcttaaaaagaagaggacctttttcakgaactttggctagaactactctgaaaatcaaatgaagaattgacatttgttttgtaatttaatttaaataaatactactgctatttttttgtttttcttaccttacacaaagttgcctgttggtccaaattatccagatgcctgttttgtttccccaagtcattttgctaatacaaaaattaatattttatatatttagaagaaatataagagaatgtctttacagtctgataggaaagacttttttaaaacactatgcccaaaacaaaagccctaatggaaaagattgatatattcaactatgctataatttacaacttctctgcatcaaaggcaaagagaaaagaggagcaatagactggacagaggcatttgttgctacccagaaaattctaagattgcatttcctgatcttgaatagtcttttcccctcctgcctggttagtttgctgacaatatttatgcactatctaatagacatctcagctgcagtcaaactggcacacaaatcttgtaacatctttcttgagtctatttcatctttgctccaccaaacccattgctaaaggtagaaagttaaatagtttcccttggaataaattattgttcccatctccagagaagactaaaaacatgtatttacttctgaaaaggccctccataatttgttcacattagctgctatcggcatcctgactcccacagtttgtaaagtatgactacatatggctgtgtagctctgttggctctagcagaatagaaccacgcaattaacgtttcctctcccgtcgtcttgttgaataaagagaaggatggatttgttttattcttttggcacaactgctgctttggagaggtaaactcctgctttatattcttcttctctttaatctctcattttcctacaaggaagtagtcaagattcaatatattctagtataagagtcccacttaaagagtgtcgttgatgtgaagacttcaaatgctgatattgtgcaaagatgggagttatttaggccttgataaacttccagagaccacataattgtgtataaagtgaaaaggagtgattgctacccttatctgacatgtaattcacttttacagatggacctgggggtctgaacacacaagtacttacaggcacatagagaagagtgctccctgcaaggtgggctcagttgaggcaaaaacagtaaagaaataaagagcctgacatggcagccycaatttgttcctcatttctgaggatgtaaagtggaacgtgtccactgatagtgtataaaccatggaaatacttcaaaatgcgttaaccccattataattttagaatcataaatatacatagataggtctttccactgcagggagagtgatcatcaggaggtacaatctgatcctcatatgtaaacccaagcaaaaataatcactttatattgtggataagaaggctttattacatttttatgtctgtcgttttattgactaatggatctagctcaaggctctgagctgttaattgctggaatcctggagaggaacgggcctggcctcctcctgcttgttgaggattgaggatcagtgatattaatacaaactggggcaagtttagtccttaccagtctcacaactgactgcaaatccaccagactggagagctatacatttgagcccacagaaggaactaaactggaaagctccaaaaatgatttccagtagtttaccatataatattctatccctgacaggagagacagggatctctattatttcagatttccagatcacaaccttcctagatctgtacgcccagaacatcattctggccgccttttccgtacttcgttactgttgtcatccctctctcaacctgtcaatgaaatacagctaagtgatggtgaaatgttcctgctcgtcattttcactctggccattaatttgactcagactgattcctttccaagatgagcctttaaatattcttccctgtttctaccctcttgctgtctttcatcttccttcctagtggaaaaatcagaattatgtgtaaacacaatgaagggagatataagtcactttaagaaaaataattattacctcttttagggaaaaatgtacaatagtatagaatctcttaaaatcatttttccatgctgggactaatcgttgttctcttcatattcccttgtcttctgttgcagcctgtggtggtgtgttcaatttctcttctggaatcatcacaagtcctgcctattcatacgcagactacccaaatgatatgcactgtctgtataccatcaccgttagtgacgacaaggtgatcgagctcaagtacgtaagacaaattggctttcttaagaaaatcctttcagcattatttatagaagagccattcgtttattgatggagggcactgattctcatcggcagtctggagggaaatctacacagaggagtgatgttcctagatgacagttcaacctgggaaatgacgctccccctctccacacaagccggtagtaactaagggcaaaaaacaagcactcaccagttaaaacagtcgttatagtttcccaacaattgtgaaggagcatcataacatggattgtcaaggtataataagcccatcttgaaatcaaaggagagaggaagggcaagagaaagcagttgccatgtgttgggtatttattatacacaaagaactttgattcacacgtgccgtaattgtctcattgtattcttaaaacagtcatatgaggtatatatagattctagattgggaattgtatagattattcccatttcactgatgaggaaactgaggctcagaaggatcaaattgctttccaaaagtaacacacacataaagagtcaaaatgtgtattcatgccaggcttcctccaaacaccacatcctcaatgtttcccaatactgtctctcaaagkatacattttcttttttcttttcttttttttttttttttgagagaaggtctcactttgtcacccaggctggagtgtagtggcacaatctcggctcactgcaacctctgcctcccaggttcaagagattctcctacctcagcctcctgagtagctgggattacaggcaggcgccaccatgccctgctcagttttgtatttctggtagcgacggggtttcaccatgttggtcatgctggtctcgaactcctgacctcaagtgatcctcccgcctcggcctcccatggtgctgggattacaggcatgagccaccgcacccagcctcaaaggatacattttctaactacttaagaaatctatttttatacctgtgtcagaacacctctaaactgatgctatgagagatagcttgagtcactggtcaattttcttcccagtcttacctattcccaacaagactgatgagggcaatgcaacctcccactctccagaatgataaagttcaagactgttttcacctgacagcctatttcagtgatatacgtatggcatgtggtgggaaactctgacagtaatattgttcatggtcatgtaggactttccatacagaagcctgatgggctaagaccacacctacctacctacctacctacctacctcccctctatttgtctgtgatcattttctaccctaaagattctgtactccctgcagtttacttccagaggcctcatgtatcagttggctctccaagtgaacaagagatgtcttgatgaaagacatctctcatcaagcctgatttggttcctgtatcaggcgttctataggctggacctcgaagaaaactgcagctcttacctggactatttgtaggaaaacagagtgtcttttaggtcttggggacaaaagaacagaaactgtcagatggccaggagcaggagttctgtgaagtatgcctgcacaggcgtgaaagtgtaagggggagccatttgctactgtgactcactatttgtttctcatatgtgtaggattgattattgccttgttctgttcaggttgctttaacaaaatatcataaactgggtggcttataaacaacaaaaggctgcaaaagtccaaggtcraggcagattcgttgtctggtgagctcctgttttctggcttatagaaggtaccttcttgctgtgtcttcatgagctggaagggcctcttataaaacactaatcccatttgtgaggggtcctcccccatgacctaatcacctcccataggccccacttcctataccattagcttagggaacatatgaatttaggggaacacaaacattccaaccatggtatacataccaactcatagaggtatgttatatattctctctctctttatctgtctatctatmtatatatmtatrtatgtatacaatctaaatgtattttttcagttttcagcctggatcctggagctcaccataatgaaatttacatctgcrtgtttattttattttacttatttatttatttgagactagctctcactctgtcgcccaggctggagtgcagtggcgtgatctcagctcactgcaacctccacctgctgggttcaagcgattctcccaccttagcctcctgagtagctgggactacaggtgtgtgccaccagcctgggtaattttttcttttgtatatatatatatatttagtagagatggagttttgccatgttggccaggctggtcttgaatccctgacctcaagtggtccacctgcctcggcctcccaaagtgctgggattgcaggtgtgagccaccacacccagcctacatctgcaggtttagaaaattatttattgcgcactaagagcctacattctaggaaacagataagattctaggtgtggtagaagatgcagacattaataaaaggctctcaaaagattgtggttacacaagcttttctgtcaatgggcttttcagatctcttctgtgctctcctgggaaaatgatgtaaaataaaaagccaaagcagatttaagtcctcttagaaactcagattttatctctctttgtggattctttttgtgaaaaataaatgtgttgtctgtagagaattaaaatgaatacagtgttgttggaaattatctagctattgttcttccctgatcttttacaataacattaaatgttaaatgtggtaaaagaaaatcaatacggttttcatcttgttcctcatcagtctgaaaaccttcaaccaaccaaaaccttttagaaaaaaaaccaacaattttttttctcaaggctgttgaaaggaagcatttattatatattttatatataaatatatattatttagtctatattttcaaaattattccatattatgrattgtttattagagctactgccaaaataaattgaaaatgcaggctgggcatggtgtcccatgcctgtaatcccagcacagggaggctgaggcaggcaggtcacctgaggtcagaagttcaagaccagcctggccaacatggcagaaacctcatctctactaaaaaatatacatgtaattaaaaaaaatagccaggcatggtggtggacacctgtaatcccagctactcgggagggtgaggcaagagaatcacttgaaccagggaggcagaggttgcagtgagctgagattgtgccactgcactccagcctgtgcaacagagtgagactctgtctcaaaaaaaaaaagaaaaagcagaagaacctataaaaatgaggacaggatatcaaatattatttttttaaacaagttttaaaaataagctataataaacccaccacaaaactctaaagtaaatccatgtaagaagccttgcttgttcaggaactctagaaatcgttatttgaaatgacaaagaayaagacctgaattaaacactgtataagacagagaaaagttagggatgcatctgtcaggataggttatgcacatagtaacaaacaactccacctcacagcagcttaactcaacaagttgatttctcattgtaatgagcatgttcagtgtggcctggcatggaagctctgctcatcgtggtcatccaacaacccaggctgatggaagcttcgtttttacatttgcttccatgatcatcactgcagtgggaaggcagtgtggcaaagcaagtagtcatttgtaaagcttcttccgtaaagtaatatgtatcccttctgcttacatttctgtggtcaaagcaactcctagcagccatgtcaagcctcaaagtgtgcccctagggcaatcctaccagtgctggggaggcagagagctgggaccatgtgcagaagtgtcagtgaccaccacagaggtcttaaatgtaaatttcctgttcttcacctgaccttaacataaacttcattttaaaagaggaaaatgagactgtgaggagaatggagctgtgattctaaaagcagcatttcttctattatattaacatgcttcccataagttctacttcatctcataaaataacaagggaagagtaaatatggtatttttaatgagacctaaaaaactaaagtattgctgggatagtaaatatcagttcaacttgtcaaaagttgttctcagatggaytttaatatgcyctagactgtgaattccttgaaaagtaagactgtatcttactcactttgacatccccagctgctgtcacagtttttgttgtattgtaattactaaaaacaaatttggctaaacttttgaactgatcagtaaagtactgtttgatttctaatatttcatatcaagtgagttttgaatgctctactggtagttttttccttgtcattttttttgcaagagctaaagctacaatttaatagaagtccaaatggaaacatcagtattaacaaggtacatttcacaggttcagtgattttgatgtggttccctccacctcctgctcccatgactacctggcaatttacgatggtgccaataccagcgatccccttcttggcaaattctgcggttccaagcgcccaccaaatgtgaagagcagcaataatagtatgctcctggtgttcaagacagattcatttcagacagcaaaaggctggaagatgtctttccggcagacattgggtaagaattctggacttgtaaatctatttktcaggactgttacctttctgctttatttaatttccccrccccccccccacccccacctgattatgattgcttttccttgaagcttagaagaatatgccatgtaagggcttggttttaaaacttacgtatgacatattttaatgttgtaaaaaaatcactcaacaaatgtacccagcactttgggaggttgaggcgggtggatcacctgaggtcaggagttcaagaccagcctggccaacatggtgaaaccccatctctacaaaaatacaaaaattagctgggcatggtggtgtgtgcctgtaatcccagctacgcaggaggctgaggtgggagaattgcttgaacccaggagatggaggttgcagtgggccaaaatcataccattgcactctagcctgggtgacagaatgagactctgtctcaaaaaaaaaaaaaaaaaaaatcactttggtagcacagtggaggaaggctagaagaacctacaacatggraaggaagaagcttatgatagaaatctagatgggaagtgtcaaagccttgaacggacccagaggggaaagagataaagggaagggcagaaatctgagagacggaaggcagaatacattggaagcacagtgtttggactctgatgatattttaatgaggacatgaattgaggatgactttctataggtaatttgttggatgatggtggcttaggagactaagatttaagggagaaatgttttatttaatttggagtattttaagttggaagacctgtttaaatggagctgtctagttggaagctgatgcttgagaaggaatttggactggagagggtgatgtagcgggggtaggtaaagttaggtgagaggataaactgaaaatatgccccagattactcccactgcatgtgagaaataaattatccacatcaaacaccactggtgagaaatacccatatcaaattaactcagaattttgaataatttaaaataaaaggtagttaatcaattacctgtttggctattctaacagcatcagtgacacagtctaagatcattaatattcgactctggaaagtgttttgatccttttccttttgaatatagatgtgattaatgttctaaaaatgcacaactctccaaacaaatctcatactctgtgaagactcagaaaaatccaggcagttttctgtaataataaccctgattcacttttcaaactttctgtttcttccatagtgtggataaacttcgtttctctgatgcaaaacggagtttaccttcaacttcttgatattgggcatgtgaatttttccatgcagtacttgaggaaagcaattagacattgtgttttgaaggcttcccggtaaaccacacacctcaagacaaattgtatcagaaaatccctttgccacctcccctacttagctgtctcaacagtaacttgaaagcaagtctcacgggcagtgagagagtgttgccttaacagaattgtgtaggtgaagtagcatacaaaagccagaaggctattttgaaagaaaaattaattttcctttggagatttttttttgcacaaaaaagggatatattcttgcctttagcacagactttagaccaaatgtcctatgtctgcatttgctttgctacctttcaagttgtttttctttttcctaatatagtctcacaagaaaatggtaattgttgtgttaacaatctcctcactgctatcatctgcatgaagcttctcaagtgagccagggttccctagcctcattaaattaccatgtctttccaagccacaaagaagacatttttagacctattgtgatttaacagaaggaaaagtcttacactgtcagaagcattctctatgcacgagtcattgaacaattacagtcacttactgttttcctctggccacagttagggaaaaggtttaagtggagaatgtagaaacggaactccttgccagcattgtgttacccctgtatttcatgaagatgatttttacctctttttcatctgcataaatgccatcagccacttggaaatacttcaagtcattgtaactactctttgatggtaatgtttaagtgaaaacctaagtattatgattttgcattgcagtggtcttacaaagctttcaagaccacacactgacaagtttattgatcattctgcataactttcaaattttgtttcattttggtttttattgtttgtagtgaggagagggggaaggaacaataagaatagctttgactgtaaggtttatagggtcgtttagttatagctttggatgaagacaaacttggctaataggatgccccttttgcctccaactcatttatgtaaaacaactctgtctttcccctgaagagagggaaatcaactttgtggaccagatagtggattttcatttacaaagctgtttgctcagcctggaaaacaatatcttcacttagtaaataattgatgtgaagaggagaccattttagtctatgacatttccgtttcgatcttaactaaaacactaagtagggttttgcagatttgctatttagattatacacttggcaatgttttatgtacatctgcttcaatttttcaggatgaagagattggcttatataattatgtgactattaggttcaattcgccttgtgcatttgttatatttgtattgctagcgagtcacagcaaatttgggggaactatccctagttgctaattactaaatatgtagtgaaattgggtctcctttttcctcggaacttctgctgctggaggcccatatgcatggatgcaaggtaaggagaaagcacatttggcaagcatgagctgatctctaactgcaatggaaatgtgcctgcttgtctcccccctgtgctccaatgctatatgaataattgatcctgaatggctgacaaccagcaaaatgatcacactgggctgcagcaatctgtgaaactctgaaataatctgcaaatcggagcatttttcctaaccgagttcatagtttgcatcagattgtcaatggcttctatgctcctataaagtttaaaaagctgttggttctgtggatttggctaagtgggcatggcctataggcagaacggatgcttttaagtaccttctgtcctgttaacttctgctagtttagttgctgccccttcctttaccagcagggtcgtctcctgccttgactctgtttatgtgtgtcctgtacaaatcacttcacacttgcaaacgtatttttaaccatcagagcctccagttcttcctgagggggtctcataccagagagttgcttggcctattcacaatatgcatgtcacactacacatcaaacttctacacatagggttagatcaggggctttcagtaaacttatttatttactgtgcagtagcatcattgtttcattttttttttctaaaatgatgtattctataacacttcagcaaaacttcagtgtagaaaatggaacttggctctattagatgggaggtctgcaggcatttcaattagtgagttgccaaggagagactgaggggtgtcccctgcaagacagcagggggacagacagcacaggaagacagatggggaagacgcaccctcagggacaagtggtggcagtgcctgtgtttctggagttggttccttctggtgggtttgtggtctcactgacttcaagaatgaagccatggaccttcgtggtgagtgttacagctcttaaaattggcatggacccaaagagtgagcggtagcagggtttattgtaaagagcaaaaaaacaaaacttccgcagcgtggaagggtacccgagcaggttgcggctgctggctggggtggccagcttttattcccttattgccccctcccatgttccatttttgtcctatcagagtgcccttttttcaatcctccctgtgattgggtacttttaggatcctgctgattggtgcattttacagagcgttgattggtgcattttacaatcctcttgctagctacagagcgctgattggtgcattttacaatcctcttgtaagacagaaaagttctccaagtccccacttgacccaggaagtccaactggcttcacctctcacctggactcaaagctcccagccagcccctgttgcccagagcacacatgctgatgacgagggccactgtctgccttcctccacctggggtatttgtcacatggagactgagtcaggttgcattaaggtcagttcagagacctttgctaagagaccaaggcaaaaatacccaagcacatatataacaaggacagaatgaattacagtccaacaaatgtataaatatgttcaggtaggctgggcacggtggctcacgcctgtaatactggcactttaggaggctgaggcaggcagatcacttgaggtcaggagtccaagaccagcctggcctacatggtgaaaccccgtctctactaaaaatacaaaaaattagccaggcatggtggtgcatgcttacaaacccagctacttgggaggctgaggcaggagaatcacttgaacccaggaggcagaggttgcagtgacccagtgacccaagatagcaccattgcactccagcctgggcaacaagagcaaaactccgtcccaaaaaaaaaaaaaaaaaaaaaaaaaaaaagctgggcatggtggctcacgcctgtaatctcagcactttgggaggccgaggtgtgtgaatcacctgaggtcgggagttcgaggccagcttgaccaacatggagaaaccctgtctctactaaaaatacaaaattagtcaggcatggtggcacatgcctgtaatcccagctactcgggaggctgaggcaggagaatcgcttgaacctgggaggtgaaggttgtggtgagccaagattgtgcccagcctgaggaacaagagcaaaaaaatccatctaaaaaaaaaaaaaaaaaagaaagaaaaaaagacatatggccagatggaaagagctgattgatgcatgatatcattgcttggtgatacggctttagaaaagccctataacgttttgaatctcaatytttatctactaaaaaactgatcaatttgaaatattacaactrtttaagaatgtgatggggataaagcagataatttctggaaagcaccttagctgtcagagtgaaagactctatgtattagaaagtaatattgaagtcccaaattttcaagccccccgcccaaccctatttccaaggttggagggtggctgagggtggggtgggcagsgatcaacattctcaacaggaccacatcatgctacagtgatttttcgttctttcctacccactttgcagtgacacctaaccgtcaaatcctaaagtacattttataacctaaatctgaaatcaaaagctacattctgattaaatccccaggccttgcacaattgttactccatcgatattgtccatatgagtgatttacagaataaatggataaattgtgcctacttcaaaatcatattttataatgagatataataatataccatatagaacacattagattttatctagattcagctcattctcaaaattcaatcctggtttatataattgttgggtaagctctacacagggaggtaaattgaatcactttcatcttcagagaattaggaataccggatcacactcaatatttaggtcatctgtgtttctctcctgtgagtttttgcctgttaccttaacatctggaaaatgtctctcaaacacgttaaatgaagacagtgggagtggcagaaggaagttgaaggggataaaaaagaaggaaacaggaaagaaagaaagaaggagacagagaaagctgaagagagtctagggccacaaagatggaaaacatggtcacaacaaatggaaaaaaaaatctaacatgtccaattcagacttctgcttctagttatttttaagtttcccagttttggtgttaaatttaaactttgtgaggcattctaaaatagctaaacaatacaagaataaacttaaaaattcaatggcataaaaaatatatgtatatgtctctaggtacctcttggtggcctgattgaagttgtcagctcacgttactgttagaagtacaaatgtaataaggaagttgaattataacttgaataattggataaatcactgatcaaacaactctcagtttagcaataatgagggtattgctccaaagcaaccrtggaatgtcatttttctggtttcctaatgtcatttgctccctgtgatgaagtctgagaatgagatgagctgaaactgtaaacccatttaaagaaaaacccaactaagcttatttccgctctttttaagccctgtaccttttactggtgattagacttcccttgggggatgatcctaaagacaaggttatcttcacgttattctttgtgggttttatggggaaaggttttttgctgagctgagaatgtgggaacgggataaagaaaccaacaaatgcttagttcaccaaaactttacaaaagcaagtagacaggagttaaataccaaatcagcaagaagaaaggaaaggttcttaataaacatatttcaacactggagtctgtgcccccaccaatgactagattgccactcctggtcttgaaggatggggctgtccttgtgaaaataaaaccacatggtattgtggagaccaaactaagtgataaaattgagttaatggtaaattataggataacattttgaaaaacactgaagggaacaggtgctgggaagaagcacttattatgtgtaatctaaaacacaagacgcgacctagttttgtcgcaggtaactggttattttgggttaaattatttgtacccataaattccctataataatcaacatccttactcagatcagcctggctttgttatagcattcccaggaacataaaaacaaaatatatgcagtgagcaataaaaattttaaaacattcttttgttataaataaactgttaggaaatataatagtgggaccgtgttcttctcttcattctaatatgtgaaaagtctgttaacattacatggtagctgtacattttgctcactcacaagtaaagacttgtcaggaaatcccagggcatcgtgaaaatcactgcttgtccctgaacctgtgccctaccagatgtagcatgagctgcttgatgtatattactttatctaatcctcagagctaccagatgagacaggaattaccccattttacaaaggaagaaagaaaaatttaagagattaagtaatttgtctgtggtccaaagrgtttgtaagaggtaaagccaggctttgaacatgagtttgactgtcccccaaactcctgattttcttagtaagccttcattgcctctgtggcaattgataaaaatacccagggatgtgakgtgtgtgtgtgtgtgtgtgtgtgtgtgtgtgtgtgagagagagagagagagacggagtctcactctgttgccaggctggagtgcaatggcgtgatctccgctcactgcaacctccttctcccaggttcaagcaattctcctgcctcagccccttgagtagctgggattacccgcgcatgcaaccacgcctggctaagttttgtatttttagtggagacgggctttcaccatgttggtcaggctggtctcgaactcctgacctcatgatccaccctcctcaggctcccaaagtgctgggattacaggtgtgagccactgcgcccagcccccagggattctttttaacagaaatgtatgcaaaagggcactggaagcaagaaagaagggatctatggtacttggatgttccgtggaagaaaggacacaggactgttagaggatgcacctcagagaatgtgagtcctgaattatggtgcagtgggtaagagggtaaacgtggagcatcacatcccagattcaaactcagtttgtacatctcattgaggtcgatcttggacaatttacttatccactctgagtcttgatttttttttttatctgtaaaaacagtacactaataataatgaccttatagggttcagtgattaaattagaaaatacttgtcactcatttcacatgcgagaatttttagctataaatagtattattttggaaggataagaaggcattcattggccaggcatgctggctcacgcctgtaatcccagcgcttgggaggctgaggcgggctgatcacctgaggtcaggagtttgagaccagcctggccaacatggtgaaaccccatctctaccaaagaatacaaaaattagctaggcttggtggcacacacctgtagtcccagctactcgggcagctgaagcaggagaatcccttgaacctgggaggcagaggttgcagtgagtggagatcacagcactgcactccagcctgggtgacagagtgaaactctatctcaaaaaaaaaaaaaaggcattcaytgggaaaatggacaatctatggagaaataaaacacatgcacaaagttacaggtgcatcccatttcaatggatgccrgctaacctgaacattggtaatgctttggggcataaggcagagaacaataggtgctgagagaggagagatatgcaaaggccaggcatggagggctctgtatcatgtgcaaagaggagccagtcattgttttgagctggagcgtgctatcatctggtcagatttattttagaaagcacatcccagcacctgtggggatgatgttttgaagcagcattccagggaaaaagttagaaaagtattgcaatagtttaggcatgggatgataagagcagtggtaccatgaaaataaagaaagagactgaaaggagaaatcctcaagatatagaatcaataacacagtgttccatttgagagaagcagcttgggaagaagaaataataatgctcctaaggtttctggacaatgtcttgtgacaccactattcaaatagaaaattactaggagaggacagtgctttgcagaataaaataataaaaatgttgggttttgtctggagaatttgatgcctttaggatatccagctagtgatcagtaggtagtcagataagagagttagaagctcagtagaaacatcttggctggagttttgctcttttttattttgaagccatataatgtggcacatgtacatttataattattatatctttctagtggattgactgataccattatgtaacaacgtttttaaatgctttttgccttaatttctacttgttctgatttagtataacttccatagctttcttttgattcatatttgcgtgatatgtttttaaacccttttattttcaacttgtctctatcctgaagaatatatttggcttttgtttggctatgcctttctattgaagaatttaatgtgtttatatctgataaaattactaacaatattagttttagatagacctttgtactatttgtgttttgtttgtcccacttctttttgttttcctttaactatcttttytttttaaaattaatcacttttttattactccccttttaaaattattatttatacatcctgtgactcttgtttcagtagttaccttagagattacagtattcaaccttaatatgttagaatctaatttaaarktgatacttttatcatgttataatcaataatcaatccaaggaccttggaacattttaaacccacttacccacttcctgtcttttgtgctatctatgccaagtattttaattctacgtacataataggtacacaaaacatttttattgttttatacaattactaataatgtaaaattacccttgctgttatttttcttttcttcctgaaattctatgcttccatatgggattaatgtatttcttttggaagacctctcttttatgtttctttcattggagatcttctggtaaaaagtgttctttgtttttgtttttcgaaaatgacttgattttcttaaattctgtgggattcttgctctgagtatagagttctaatttggcatttattttcattcaggactttacgatgctattccatcatgctctggcttgtattattttgattaggaagccattgctttctataactggggacccccatccctcccctggtcatctcattgtagagtactgttattgttgctgttgttgttatttaattttattttagccattctggtaggtgtgtattaatatctcatgtgattttaatttaatggtgaacaattttcacgtgcttttcgtcatctatatatctattctctggtgaaatatctatttatatcttttacccattttctaattgaattgtttatttttctattgttgggttttgagagctttttatctattctcaatcaatgatcctttgtcagtatgtggtttgcaaatgttatttcccagtctatatcttgccttttaattttcttgccttatattggcctttcactgaacaaaagtttttaatgttgaagttcaatttatcgactttttcttttatagatcatgtttttgataccaagtctaagaattctttgcctaccccaaggtcccagagattattctggtgttttcttttaaaagttttatgattttacatttttcatttgtgtctatgatccattttgagctcattttggtttagatatgagatttaggtggaagtcagttttttgcctctggatgtccaattgctctagcaccattggttgaaaaggctgtccttccttcattgaattgcattggcacatttgaaaaaaatcagttggacatatttgtataggtctatttctgggttctgtattctattccattgattatgtgtctaactcctcaccaatatcacactgtcttgattactatagctacatggtaagccttaatatcaggtggagtgattcatcccacttcatttttctttgtgaagttgttttagctatttgaaggcctgtgcctttccatataaattttaaaataaaggctgggggcagtgtctcatgcctgtaatcccggagctttgggagaccaaggtgggaggatcccttgaggccaggagttcaagaccagcctggccaataatagcaagaccctgtcttcaccaaaaataacaaaattagccaggcatggtggcatttgcctgtggtcctagctaactgggaggctgaggtaggaggatcccttgagcccaggagttcaaagttgcagtgagctgtgatcacaccactgcactccagtctgggtgacagagcaagcctctatcctaaaaaaacgtaaataaataaaaataaaaataagttaagctttttgatgtttgcagaaaaaccttgctgagatttttataggaattgcattaaatctatccatcaatttggggaaaactgatgtctttactatgttgagttttccaatccatgaacatatatgtatctagacttatttaggccttcttttatttatttcattattttgtaattttcatcacataagcctgtatctgcttcattaagtatatacctaaatatttcatttttttgtaatgattataaatggtattgttttttaattttggtctccacatgttaatggttagtatattaaaatttgattgatttttgtgtattgttcctttatcctgagttcttgctgaactcatatgttagttctaagaatgtttttccatattacttgggattttctgcagctaatagttacttgcaaaagtggaaattttatttcttcctttccagtctctctatatattttttcttgctttattctggcaagaattctaatactacgctgagttagaggggtgtgaaatcaatatcgttgccttgttcctgatcttagggagaaagcgtttagtatttcaccattaattatgctgttagctgtaggtttttgcagatggtttttatcaagtcaagaaatttctcctctattcctagtttgccaagagtttttatcatgaatgtgtgttggattttgtcaaatcctttttcagcatcaactgacatgatcatgtcattttgcttagtaaattatttttttaatttccaagttggaaagaatgattctcataaaatgccctggggctaatgatgtatgcatagagcattttcagtgatatctaaataatgcaagataaattaaaagataacgataaaattttccttctcctaagttctttatacaagtattgctctttttctattaactacagctactgattagcttgctgaaattacctttcttttagtaaattaccattcttttagttttatgattcctaaatattaccagactaaatacacattttaatttagattaagctgggtttcaaattaggataactaaagtgagtsaaattaagtgaagcaactaaaaacaaacaaaacaataaaaaacctcattacaaaaactactaacttttttcttgtaaaacataaatattatacctgaagtattgtacacattggagattagggagtaaaataataaacactgtttacttttagagaaaaagacaaaacaggttcgtctgaaacctagtagaatgtttttacatgaatacactgctttggagcaattgtgtatctgcagctttataaattacagtaaggctgattccaaaaaaggataatgcatttctagccctgcatccctgggtggtagaaaggaagctgtctaggtgtgctcgaatttccctaaggcaccagctttaaatgtctttgtattctgcttcctgtagtttccagtaaagcttccttcagctgcagcctaaagccacagatggcttgctggaaacaggagagsgcctgaagtcaagccagtctgtatctgctsgtacagcacactgtgcaccttctcagtagtggtcaaccagagacaggcagagatactatccagacaacctcaggaaaatgtcagccgtatagaatgtgagccacaaaaatgtcarttctccaaataatgatttaaaaatgtatctaactccactgaagccttcgagatgttttatccaagagaatgtaactattttttcccttatcagattgatcttggcttaagcttcactctgaggtttagtcattggaaggtaataattcaggattcggttaccgatttttaattaagtagatttagacctggatctcactccttattatggggttatatttccaatatttctttagccaaaacatgtattttctctgaagaaatggctcttttgtgtgagagagatatttccaattcagggaagaaagagtgacgtttgttcttggacgcagggtgtgtcatcagagagtgactracacacctgattgatgaggcaggtgctgatggatgagagctgtctaggtggccccaaaatgtgtagtaatgaggaaatgatggattggtgatgctaaacatatcaaggttaagatggcttatacattaaaaaatgcaatttcaaaatatcagtatggtaaatatatatgactttctgatgcgtgggactctattgcatagtcacagaggtcgcccttgtttatattcccccaccattgaaacacagaaagagcaatgtggcaatagctccttttgggaaagaacccttcttttgttaatattgatcattacgttttctcaaagacatatacacttacatttcattttgcatggagcagttttgctatatttaagcactaaagagggggaattagagcaattgctattccctgcactacacaaataactgttcactcatgtaatatgatattcacttcaaatatttgattattttggccaggattatctcatgatatttttctccatgttctttattctgtgtgtatattttgtgaattgaacaatgagctctattatagtttgatagctcaaacaagctattaatattagttgtgtgtattagtctgctattaccatgacagtgctacttaacaaaccatccaaaattcagtgtcttataatgaaagcatttgtttttatcacttatgggtccacggactagcttgcctgcctccgttccaagctgcgggttggctgtagttggctgtaaagttgagtctgggttcaagtctgctccacatgaatccactttttctttgaaccagcagttactcagcacatgatatcttagtggatcacaggagcacaaagtcctagacaacaataaaaacaagaacaaaacgtaagcacgtttaaggcctctggctgcttcatgaccactaacactcattctaaagcaagtcgtagggctaagcctaacatcaagtgcacagaaaaatatactctccattttagtgcagtgcaaagagagatactgaagaattaaaaatcagccagttaagctgggcatggtggcatgcacctgtaatcccagctattcaagaggctgaggtggaaggatttgcttgaccccaagaatacgagaccagcctgggcatcatagcaagtcctcatctagaagaaaggaaggaaggaaggaaggaagggaaggagggagggaggggaggggaggggaggagagaggaggggaggggaggggaagagagatagagagaaagagagagagagaaagagagagagagaaaaaaggaaaggaaaggaagaaaaaagaaggagtgagggaggaagagaggaagggagggagggagggaggaaggaaggaaggaaggaaggaaaggagggaggatggatcagccaatttaccactcaatccatggcaaacacatcagtgatttaaggatgcttgttctggggttccctggaatgtgggtgtgctgctttatggcattagtcatagcagtagtactacataataagtgtgtgtaatggcattcactgggcccaagtacaattgccatcttgcccttatgaacttattagtaacagttaataaacaagtagtgataaatatagcttgaatgtttaaaaataacatttagtttttgaagctgatgattaatagaataatgcccagcaacagcattttcctgtctacctacctccaactcttcagtgctcctacctgcagccctcaccacagcaatgtcctttcacctggtctcatctycttcagtctcgttcccttgcatgtaaaatgctggttctggatcaatttttagatcagacttrattagcaagtgcatcctgattctaccacttatttgattaaaaatctttcaactgaatcccattagccaaagaacacagtctgacagccaaactctgtataatccagcattgaaggccctctgtagaagaccccatcctgttttcccaatcctaattctcattattctccttcatgtgccctattcttttctcagagttatgcttgcccatgcatataatgtaaattcttgcccatttagccttggatcaagagattctttcaggctggaattgccaatgccaattccatttctacatggttttattctatttatgcttcaagacccagatccaaatcacctcctccttggaacagttgagatcctcatagcccaaagtaatcttcatctttttgcaaaactgtaagacgtttctgcctcttttactgaacctatcattttctaaattgcgtcatcattatttatctatgtcttactactaatggactatcacttatctttttctacttaaatactaaatatactttcttgaatattgaaacaatatgtaataaataaatttatcaatccattcataccctcagtcatcgttcttctgtgctacgcatgccaataagcttaagtggtttccttaagtaacagtcagttcacactggaatcaaagctgctcaaactccacaaactccaaccctctcttgagtttgcaggcccatttcagattagcagaatcattagcaacatgtggtgaagcactgcgtattgcttacgtttcagaataattttgtcctatatgacctctgtgaatatatcagggactgggcctttggaagcatttcaactttgggaaatgtctgactatgcaaatactctatagtttcgcctgacttagaagctatggacaggccaagcctgacctactaagtaatgtgcctgtaacaaaaatcaccctgcacgtttgctatctatccattggatttacagacagggttcaggagagccaccattgttcatgtttactgccaaggtccaagtacaaaatcttagcaccccctaatgttgaaagcagtcttttcaccgtgagcagaaaatggaatgagaaaaatagactgaaggccaatcccagcgaagtttaactttggaactagccatgacctatatttgtgtagaatacaagctttatagacattaatttcagcaccagtttaatccctgttcctactagggctattttgagcttatttcaccatttctttcaaaattgtcaataaattgttcatccctttatgctcttcttaaatcatttctgagctgtctgcttaggccatggagtagacaaaactaaatcttatgttctgaggattgtttttttgtattcttttatggtagaccgtttaatcatcttgagattattctttatctctcctttgtatttttattctgaattataaaatttttatctgaaagaaggcctttttcttctataaagattttttcctttagcttctcatgttttggaaaagaaaaagttaaatatagagtgtggctgaatataaactggactgcagtgttaaatgcctctcagcctctttctatcacactgtgtaaataaaagatttgttggcagcaattttcttggtttgttgggtaaattcttcataaattcagttttcagtctgacagtgttcatgaaagcggaacataaaagtaaaacatatgcacattttccaccagctttattatgcaaagtacttgattttgtataaaactggatttttcaaggccaggaaaatcttcaataaatcacatcagcaatcccaaaaacgtctgtagaaccctatgtgttttcccacttctttcagcaactccgtgaataagaaggagacacctgaaggctctgctatggaagcaaagagcgagggaggcaaagatagagtgaggaagggaaagatagactgagggaggcaaagatagagtgagggagggaaagatagagggagggagggagggaaagatagagggagggatggaaagatagagtgagggagggaaagatggagggagggaaagatagagtgagggaggcaaagatagagggagggagggaaagatagagggagggagggaaagatggagggagggatggaaagatggagggagggaaagatagagtgaggaakggaaagatggagggagggagggaaagatagagggagggatggaaagatggagggagggaaagatagagtgaggaagggaaagatagagggagggagggagggaaagatagagggagggagggaaagatagagtgagggagggaaagatggagggagggaaagatggagggagggagggaaagatagagggagggagggaaagatgatggagggagggaaagatggagggagggaaagatagagggagggagggaaagatagagtgagggaggcaaagatagagggagggagggaaagatagagkgagggagggaaagatkgagggagggaaagatggagggagggaaagatagagkgagggagggaaagatagagtsagggagggaaagatggagggagggaaagatagagggagagagggaaagagagtgagggagggaaagacagagtgagggagggaaatatagagggagggagggaaagatggagggagagagggaaagagagtgagggagggaaagacagagtgagggagggaaagatagagggagggagggaaagatggagggaaggaaagatagagggagggagggaaagatagagtgagggagggaaagatagagggagggaaggagggagagatggggcgggtggggggaaggaagaaagaaaagaaaagagggagggaggaaaggagggagcccaggagggaatgatctgatcatgttctcagagtgtgacagaaaatggaaactatgttctttttaaaaaccctccatgtacaatgtaaggtcggttctgtttggtctgcatagtgatgtctttgttttaatgcagggcctcagcaaggatgtggtggttatctgacaggctcgaataatacctttgcctctcctgattctgattcgaatggaatgtatgacaagaatttaaactgtgtatggatcataattgcacctgtaaacaaagtaattcacctcaccttcaatacatttgctctggaggcagcaagtactaggcaaagatgcctttatgattatgtaaaggtaaggctgttttatttttttaacagagtctattcatcccagactctaatatagtgtattccagtttatatcgttacaggaagtcctgctaattttgagtacaggtgctactgctttttaaaatgaccttttcttcagtgatgctacatttaatattatagatgctctatcttcatatcaaattaatctttaatatgggtgactcaaatattttgtgtgactggcttccaacattagcatttaaatctcctattcatcaatgtcttgcaaaagacgatctataggaaggtcggttttctggagagagatactcaaaggacctttggcaaatcctaaaataaacaatgtcagtgacacaaataatcacctcttaatttgtctatttcttaggcttatagatttgcttatcacattatgtttagatattaaaatggttctgaaatcccattaaaagtaaataaaggctgggcactgtggctcatgcctgtaattccagcaatttgggacaccgaggcaggaggatcacttgaggccaggagtttgagaccagcctggccaacatggtgaaaccctgtttctactaaagacacaaaaaattagccgggtgtggcggcgggcgcctgtagtcccagctgctccagaggctgagrcaggagaatcgcttgaacccgggaggtggaggttgcagtgagctgagatctcgccactgcactctagcctgggtagcagagcaagactccgtctcaaaaataaataaataaataaaataaaaaagtaaatcaagaaacttctgttcaatttttaatgactttaatattaaattattatacctatcaggttatataggttcagattacaagtgttaagtagcatcaatcagtatttactactgcactctcaggggaaaaataaaaagtatggcaagatttgtatttatgaggagcttaagtctgattagaaaattatgggatgacacatgcaaattaagaatgcatagttcaggatagtcagcatttaagcgctaatgaatgcattcgatgcaggcttgaagcaatgtgcaagcttagaaggaaagaaagttcatgaaactcgtgtgatcaagaatgacttgatagagcgagggaaaacttactcaggtcaggagagaattcaggcaaggtgaacattttcaaaaaggcataggaattgatacgtgcatgttctcgaaagcgtaaagaggctggctgtgttgaagcagaatagtgctaaagagtagcaagaaataagatggcctacatagagaaataccgagattacaaaggatcctgaaagtcaaactaatgactttagactctgtgcgggtgaaaataaggagtggttgaaggttttccaatgagtgaggtgacaacagcagtagctagggaagactaacctgaaatcagcagctgtgggaactggaaggagaggaggctgggagggctccagagagaggtccctcctaggtgagaaggtcagtcttagacctggatcaggggtgcagccatggcggtgatggcaagaggggtgcaagagaaacttaagttctaggattgcaataaactttagagaaaataattttaaaagaaaaggaaggaaaatttgtggagggaatacccatttgagcacttagttacatgcttttgtttttactatgaaaggggctaaggttgggaggccagaaaaataacagtgtggtttggtgagagcaagacagacaagtgagactgcagtgggcagagaatggaacrgggctccggtgagaagacagctccacgaatagagaggacacagcaaagagccttccttccatcaggagaaaggatgctttcttagagggagtcagcatagattttcagagagtcaggctctcagctccaggaaaagtacccagggaggcaactggagaaggcaaaaggcacaggaaaagaacagacgcgtcatgaaaagataaatgtgaagaccaggaatagtgtagtatccctgaagtcaaggggcagggggattcttttacaaagcatgggtggtcaatactattgaattgtaaagtagaggccaagaaagggaaagatgaagaacagcctcattgcactggatgacaaccatttaaataaagtattggcacagaagctggatcagaggagttcatgaaagactaaagatagcaaggaatgtcaattccagtttaattctcctttcctaaaatgagacctggccggccgagtgcggtgactcacgtctgtaatcccagcacactgggaggcagaggtaggcagattgcttgagctcagaagtttgagacaagccctggcaacatagtgagaacccgtctctacaaaaaatacaaaacaattatctgggtgtggtgctgtgcacctacggtaccagcttctcgggagactgaggtggaaggatcccctgaacccagaaggtataagctgcagtcagtcgtgattgcatcactgcacaccagcctgggcaacagagtgagatactttcgcmaaaaaaaaaaaaaaaaaaaaaaaaaaaaaaggctgggagagaccaaaatgactagagcagtcctaaagctgaattcaaaactgtttgagagctctcctggctttacagaaaggtaataaggtttagagacggasagtatggggactctaacccaattttgctgtcagacaaatttcctaatctccccgattcctcatcatttcgtcaatttttctttaaatcacataatagtacctactgtgaaaggcagttttgaggattgaaattatgtgtactagagcgtttagcactgtgcctgacataaattgtaaacaaatttacctccctttttttccccgttggagtaattccaaataggcatgggcactatggaatttctttttcttaaaaactaaaaataatggatttgcatataaaattacaattttaaattcttatagaatgatttgagtatggccctgctaggagagttgactggatttactctcaagatccatttttatggagtgtgatttgataatgtcatcaaaacagcctgtcattgtctgaatttccgcaattcattcaggccagaaactgcaatatcaaaaacaaggagttattttcttgcttcaaaataaaatatcgtttttttcaaataaattctgttcagaactattcttgttttcccccttggaaaagcaatttccttccattggcaacgtttccaactaccactaaactggcagatcaaagaatagcccttggaatgtggagcttggagctttctttattaaagagatttttctgtgataaatgggacggttgattccttttagatttttttttagagattataatcaaatcactttttagaaaagctaatttaactgaactctgtggtagatacacaagtaaaatcataccaattccattattcattcataattctatcatgatcgtttgtgaaagggttgacttggagagtaattacggtaactgaatcacgtagtgaattgtgcatgtcactgagcagtctcttttgaaatccacatcgcatccattgcaggagttagttggcaagggtatgtgccaggccctgtaccagcatcactggagatgtagagagttaaagacatctcttgaagagttcaagcttcttgaggagctgctagtaaagtgtaggagactgacatgtaaacaaaaaacatacatttaaataattacatttaaagtacaaataaaatacatttttttttttagttggagtcttgctgttttgcccaggctggactgcagtggtgctgtcttgcccaggctggactgcagtggtgctatctcggctcactgcaggctctgtctcccgggttcacgccattctcctgcctcagcctcctgagtagctgggactacaggcgcccgccaccacacccagctaattttttgtatttttagtagagatgaagtttcactgtgttagccaagatggtctcgatgtcctgaccttgggatccgcccgcctcggcctcccaaagtgctgggattacaggcatgagccaccacgcccggccaaacacatttaaataacggacatttttttcacattgtataacgtgttgcataacatgacaaaaatcataaatagaaacaacatagaagggcagagcagaagaggctctgattggctttgttttggctaggaaaggctttctagagggtgatggctgagctggaatttacaaaatgaacagaaactcactcccttttgttatcctttacgaaactgagaggagcatgaacctagctgactttttctgccaggaagtatggaaccagcagagagaggtcctcatcctaacattgcccagtttttcctcaaccccatccgtgccccttttctttttctttttctttttcttttcttttttttttttttgagacagagtttctatcttgtcacccaggctcgagtgcaatggtgtgatattggcttactgcaacctctgcctcccgaattcaagtgattctcctgcctcggcctcccaagttgctgggattacagacatgcaccaccatgcccagctaatttttgtatttttagtagagacggggtttcaccatgttggccaggcttgtctcgaactcctgaccttaggtgatccacctaccttggcctcccaaagtgctgggattacaggtgtcactgccccttttcatagccaatattttgtaatccttcctttcccacctgaagtgaatgtcatctatgctataacctacccataatgtaatttcagaaaatcactgtactatcccaaaggcaatgaaaaggagaaataaaaggaaagtatataaaatagtgtgtcttcgtatatgtaaatactctaacactgctacacaaagtcacataataaaatagattccttttatatgtagaatggtggtgaataaaaagtataaatgtaaacaaatacgggtgggttrtatttgcaacccgcatgccaatagcagcatcaccatctgcaagataagtttccagaatggtggaaaaactcaaaacaaacatttctaaaccaaacaaagtacagtcttccctcagcttacacaataattgcatttctggaaatttggtgcatatcaaaactgtgcaaaaatatttttgtgtttatatataaaatggacttaggttctgggatcaaataattataaacaagtttttttttacacaaatgtctgacaggacattcaaaagttatgtgggacaaaaatcttcactttgcaaaactgtcctgtgaattactaaatgccagttataggcccaaattatagtgatgacccaaaaaccaccacacttgtgcaaaacactccctatggggtggtattgacctcattgagaaggtctgacttaatgcaccgggcttaaccattcagtctgtgtcagacactggagctgaggaggggctgtccatctttggggagaggatcagcagtctatggaaggcatcacgttcctatccacatgaggtcgtacctactattcattcattctttcattcagttcagtgttaattagcatacctactatattctagacattgctgcaagaactagagaagaacattgagattttagaaaacaatactaggaaaactcctgctcttgtagagctgattctaatcattgcttctttgtggctttttcccagacatctgggactagtataacttttttctccagaagattctgaaatgggtcagagtttagccccaaactggaaaagtcactctctattcttcttcccatactaaattatgccctggcatgttgcccagcagacctcatcagaggttctgcaataagatcaaagaattcatgaagatactctaagattctgctcccagtaagaatatcaaaatcctcttgtgatcaaattcccaggaaaatattaaaagataaagtcctaaggatattaatgtatgaaattattacctttgaaaagaattgtagtccaatatcaaagtctattgcccttgtgcattaaaagttcatagaaattaaaatccaaaaattttctttcccagtttttctaactgctcaagtcaatagctgggtgaaatgtgggattttgccgtggttgtagcagagcctgcctgccactaagttatttgtacaatgccttcaggatctttagcagattctaaaatgatcagatttctaaaagttgagaaaatataacattcttctcagcacttacccacatccacaagacttagaacgtaattcaagctccaggtccatcgcagttgtgccaggaaatgtttgctcccagaatgtggcccgtagctgcgtataatggtgtagatcctaaaggcaccatttatatcccagtttatatatgattccccctcctcatcattggatagggcgtcccctgcaacgcaytgtagggcaacctggcaaaagtctgtagtgaaggtttagtgttatcagagaacaagagagcagatagagatcttgggtttgaggcagaggagtttagagcctcctatgtcagttatcccgaggccacaagctatttcaactcacttaggagaaatcttactgtggcaatgaatgaactaacacaagaccagcttggggccaggtatgtatgtcatttccttccatccagccctggcttctgcctcctaccttccttcacatttaccagttatccatttaaaacccaaatctgatcttacatcacgtaggatcagatccagactccttggatgaaatgtatggaacttcacagctttgtttgttggacttcgtcatttctcctgttctctcaccctggcctccagggccaatgaagggggtcagaagttgttgacacgtgccatgcatttcacacttccatggcctggcatttattactgtctggctgggatacccttcctgttttgtaggtctggaaggtctttttttttttttttttgggacagagtttcgctcttgtcgcccaggctggaatgcagtggtgcgatcttggctcactgcaacctctgcctcccgggttcaagcaattctcctgcctcagcctcccaagtagctgggattacaggcctgcgccaccacatctggctaatttcgtatttttaatagagatggggtttctccattttggtcaggctggtctcgaactcctgacctcaggcgatccgcctgcctcggcctcccaaagtgctgggattacaggaatgagccaccacgccccgcaggtctggaaggtctctacttacatttaagggccaacccaaatgtctgtctccatcacgtgggttctcatgatacactcccattattttattgtagcacttatttttctctattttgtatataatttatatacacatatatttatgtgtatgcatagtgtatgtgcatattacacaaatatatgtatttgtatatttaatttgtagacctttactctcctttgttcatgaaggggtcttatgtcttgaagatctggaaagggctttacatgtccttgtatgcctgggatctagcacagaggcctggcatacaggtcccagaataaaaatscttgctaatataaatgtgatcataaagacagcaatgattatcatgaaattttaacttgtttaccagaaaaagtgcatgacctaaaacttggcaaatgtgctcttccatgaaacaaaggggtgaagattagaaaactcgastttcatctgattctgaattaactaaaatcatgtttaagttggaaagacagtgccatctagtggtgcatttctttttcttttacaatgactggttttagtcattcctgtcttacataatcctagcactttagaataatgtcagtggtcatggtcatggctgttctgaggccttgaacacatagctctgttatgaattgaatatttggagttagatacacacagacactcattttagaagtacaatggagattactcagaagaaaacattttctagttatgtgtttcagggaaatccaagcacccactatttcgatggatgtttctagaagggagccatggttgggaattgttctgggtgctggcgacaccacagtgaagaagtcagacagagtctctgtctccccacacgtgggacttacatccttgttgggaaagagaccggacaaagtaaataaacaataaataagatcagttttgattataataggaaaataaaacaggatgatgctatgggagggcaacattcaatagcattggcttctctgaggaggtgacatgtcaggtgagggcccatgacagggagtccttagctgtgtgggttcagcttcacctgaggaaggaagagcagcaggaacagggctgtggacaggagtcctcctgggatgaaggaagtgcagctagcagtgaggtgtgggcagcctgggaaggaggcacaggccagagcagctggggcttgcagactgtgggagggagctggaattttactttaggtgcaatggggatctgccgaagcattttagacagagcaggagcatcacctcattggagtttgcagacatgcaggcagttcagtggagaacactatggctgctccggaattaggcctattaagaagatgtttcagtgggaacaggtgaaggacgatggagatcacctggagatggagccctctgggatatattttgaaggtagattggagtagttgtggagtgaagagagagagagaggaatcagagatgactaaagttgtaggcttgaaacattgaggtaaagatggctctgggagaacagttttgggagggctagtgggacagaggaatcaaagcacttgtttatttatttattagatatttattgagagcctstcacgtgcagacacttttctaaaaactgggaacatggcagtgagcagaaaagaaatctgtacattcatggaacttgtattgtcttcagagagaaagccaatgaaataagcaagtttagcctggacaacataggaagaccccatctctaaaaattttttttaattagctaggcatggtggcatgcacctgtagtcccaggtacttgggaggctgaggtgggaggatcacttgagcccagaagttcaaggttgcagtgagctatgattgcagcactgcactccagcctgggcaacagcgtgagaccttatttcaaaaaaaaaaaaaagctaaatatgtagtatatagaagaaggtaacagttgctgtggagaaaaatcaagcaggaaaggagatgggaatgttgggagagtttacatctggaaggccttattgagttggggatatctttttttttttttttttttttttgagacagtcttgcactgtcacccaggctggagtgtagtggcaccatctcagctcactgtaacctccacctcctarattcaagttattctcctgcctcagcctcccaagtatatgggattacaggggtgtaccaccacgcccggccgagttggggatatgtgagtaaagacctgaagaaatgcacgaggacaaactatgtggatatacagggaagagcattccaggcaaagtgaacagcaaatgccatacccaagaagcagcaacacacctggtttggctcaagaagcggaatcgaacaaagtgaagacaataagaaattarattaraaaggtcaggggtgggagaggagagaaagccattgtgatgcctttggctgtttgattgagtggatgggaagcagttaggaggatttcagcagagcagkgacatggtgtgacttacattttaacagtatcctctcgatgacattttgaggatacactaaagaggaacacgagcagaatcaggggcttcatgggaggctgcagtgatcatctaggcaagagatcagagcagttggggccatagtgtgagtcggtgcagaggttaaagtagcagtgggtgagcggactctcataacaccttcttttaaaaatcatatatttcccaaagaggaaaaaaatgttaggcgtcataacaggtttttcctgaaagtcataatataatcaatccaattataattctgttcctaaattaagactacctctaagaaaatcaatgtaaaaatgtttaccgtgacctattgcaacttcgcgtccaatttagtgtgaaatatgcaattttttgtaagtaatggagaagtaatgaattgtttttcttctcagttatatgatggggatagtgaaaatgcgaacttggctggaacgttttgtggttccacagtacctgctccttttatctcttctggtaacttccttacggttcaattcatcagtgacttaacattagagagggaaggatttaatgctacatacaccatcatggacagtgagtaaatagaagcatttttatatgttatgaaatacacatgtatttatgcactgaaaagaatgccctgcttattatatcgaaatttcaatgttaattactaaactcaatgtcaattactatctaaactcaatgtcaattgctaaacaccatgttaattactgtatgtttaatctgtggtacaaatttgatacaatctttagtcaaggatataaaccctgaattcttaatagagtaatgaaaatatagctcctccggggtgggaggcagggaagacagaattgcaaagattgcctgagatgagacatgaataaaatgtctcctgtgttgctttttcctccctctccagtgccttgtggtggaacrtacaatgcaacttggaccccacaaaatatttcatcacccaattcatcagacccagatgtcccattttccatctgtacttgggtcattgattcccctccgcatcagcaggtcaagataactgtgtgggcattacagctgacctcgcaagactgcacgcagaattacttacagcttcaggactcaccgcaggtaacaattataagatgaatggcagtcacatctagtgaccttttcaccagtatttgcaaaacacttgaagtaatgaagccatgatgaaataattttcttttttttaattatactttaagttttagggtacatgcgcacaatgtgcaagtttgttacatatgtatacatgtgccatgttggtgtgctgcacccattaactcgtcatttaacattaggtatatctcctaatgctatccctcccccctcccctcttcccccaccccacaacaggccccggtgtgtgatgttccccttcctgtgtccatgtgttccgattgttcaattcccacctatgagtgagaatatgcggtgtttggttttttgtccttgcgatagtttgctgagaatgatggtttctagcttcatccatgtccctacaaaggacatgacctcatcattttttatggctgcatagtattccatggtgtgtatgtgccacattttcttaatccggtctatcattgttggacatttgggatggttccaagtctttgctattgtgaatagtgccgcaataaacatacgtgtgcatgtgtctttatagcagcatgatttataatcctttgggtatatacccagtaatgggatggctggatcaaatggtatttctagttctagatccctraggaatcrccacactgwcttccacaatggttgaactagtttacagttccaccaacagtgtcaaagcgttcctatttctccacatcctctccagcacctgttgtttcctgactttttaacaatcaccattctaactggtgtgagatggtatctcattgtggttttgatttgcatttctctgatggctagtgatgatgagcattttttcatgtgtcttttggctgcataaatgtcttcttttgagaagtgtctgttcatatccttcgcccactttttgatggagtggtttgtttcatgatgaaataattttctaagttacttccagcttaatgtgtttttcatccatacacaaagccctccaatcaggtgtgtcgagaaacttgaacttggtcctgcaggtccagagctctcaaagcttcatgtgcctaagaatgcattaagatgcatcttaaaagtgcatcctccctggcccaccctcagagaccgaatcccccatataacacccatttatctgaatttttgacaaacacctctggtgttttggtgccagtaccagaactccatggaccatgcttggagaaatacctctagttagtgggatttatgtataggttgaattgaaagggtcagtacagaacacaagagaatcagtgaagaggctgtttggcactagtctgataggtttatattcatggtaatataagagagataaaaagaaaagggctgggtgtggtggctcatgcttataatcccagcactttgggaggccaaggctggtggattacctgaggtcaggagttcaagatcagcctggccagtgtggtgaaaccctgcctctactgaaaatacaaaaaattagctgggtgcagtggtgtgcgcttgtaatcccagctactcaggaggctgaggtaggagaatcgcttgaacctgggaagcagaggttgcagtgagccaagatcgcgccactgcactccagcctgggtgacagagtgagacttcgtctcaacaacaacaacaacaaaatccattttgagctttaaaaaaggctgagtctgaatttcctctggaataagatgttgaggagacagttggacacaaagtgggttgttgaccaaaggcccaaagatttttgtgcatcatcattatcatgataggtaattgaaaaatgagaagaatgagattatctggggaaaatatgcaaagggattggccacgaactgaggatggataccaggagaacatctgagaatacctggattgtctttctgcagtttggggagcaactaaccctccccagttcattccagtaaaatgtcatggtcaaagccccatatgctggactagtagagtatctgttgtcttctgagttttcagggtccccttcattataaatctggggtcccctgcttctcatgtggtcttgctggggaaagaaaagtccaggttgtgtgactccagagtggagaggcgtgagatgtgctggcagctgaatagaccctggacttgctgagtttggtgcaaagcatatatgctgagatgagctcccaaggtggacaagatgctagattatcgtcattccattggtaatggttttcaggacaaaatctctattacccattggtaccctagaggacttacagccaagtggaacaggccctttgggtgaaagctctctcaattttccctggcttcacgaagctaagacaatggggatcagggtggaccactcagcggggcacagaatggcactttcagggcacgagacaccgtctgaaacataacagcagctggagcagcctcgagtaagacccagtgtttgtcatgactgaataatgttttccactgaatgaatacaggaaacaatcaagggtttcggactgggtaggtagggaggaaagacaaacattgacggatgagctgggagaaactgggattctcggggtatccaagagtagacagagcagccctaattggcagatcatgaaggaatgatgtgtagggtggttacggaggatgttcagtggttagctggcactggagatgaacagagatgcagagatagaaggccctaaggttaagaaatatgaagttgagggtgtttaatggcttgtctataaaaacacagaaacctctaaagggttcagaaaggaaatcaggggcaggagatgactatgagctgagacacctcaagtctttcataaatgaagggaagtaactgggagaaaagtaaatgagagtgacgataatggtaagaatatctttggccagatgtagagaccgtcgaaggagaaccagctttgagacgaggatggaagctgcagtgaggaatgtggagcctccctcccttcccccgaggctggccccccacccttcccactcaatgaactgtggagcatgggtaaagaacagcctctaccaggaggctgctggagaaccaggttttgctaaggccacaaagtggaaaggtgggggatgtataccgagaatgactgacagtgcagttaaagttcacaggatacagcaaagttagacaaggaccaagagcaggagacagtggggaagaggggtggaagccccgagcagttacaggagttttgcaagcagagacgggtggggtgtttcagtaggttcctaagaactgcagatattagagacattcctgtgacagggaggctgcaaataccctgactttggtacaacttgtttttacccaagaactgatgggcattcgactgcatttactccaggcttttgagaggtgatgagggctgccctagtgttacaaaggggaaccggtacctcatgacaggccccggctggcttgggggatgtacagtggaaccaaaggctctgattagatttgctaaggggtagcaagggctggatcagggtgatggtggttgttagtcccatggagctcaggacaatggcaaaagccccaggaggagagatccagtgagctctcaaacagcctagatcctcagagcaatggcacaggcctcagctaggaagttgcataaaaggcgagggatcttattttcagcagggaaatgtctgtggtttcagcagaagctttgcctcccttcctcctgcccctctgggaaggtgcaacttgcatcaattccaaggccaacgtgagtcttcttgcagagcacttccaacagcagagctggtttccatggctaaatatttacaccatgcttttatatgcagtctaatttctgttatggcctgttctcttctaagactaaatctaacatgatttggctcccatttcatttcagggtcacggaaattcaagatttcagttctgtggcagaaatgcttcggctgtgccagtgttttattcttctatgagtactgcaatggtcattttcaaatctggagttgtaaacagaaactctagaatgagtttcacctatcagattgcaggtgaggccaggaacttcatcttttattcaraaaagctgccatcattaccattattcgtagaataattacaattatttctagaattgactcctgtgagtaaattaggatttgttaacaaaaaccacatccctctcttaactagaacccagcccaatttagcaaattactacagttggtttctaaagagataaagagaatataatactatccaggatggttagaatgctagcattttcttcaaagtatatgtagttgattttaaaaatatgccaattatcttattaattatacacttaaccacattgaatatacatttttatttacaagaaatatatatgtttatttacaaaagctttatcaaaatataattctcatatcatacaatttacccatttaaagtttatatttcagaggtttttagtattttcacaaaattgaaaatcttagaaaattattttgtaaaaatcaaaaagccttgaaagagttacctgattattataagaagtttattttcacagaacactttatttagtacttattttgaattgactcaaatgaaagcttcctttggttaaaacaaacgaaagtacttttggtatttttttaccaaaaaaaaaaaaaaaggtaaataacgatttgccacaaataactcaacaatggatttaaaatccttgtgcaaaactctgtcttggaggtagcatccttgtcgaaaagagagtctgaatgctacttccacctcaacgtgatcagaaaagttcaaaggatgctcgagtattcgtctttaaaggagaagcctcctgtgtcatgcttcctgtaggcgtgtttgtgtgaacgagctgttgcrttgcacctgtgtgtgctgcttgagcaattcacttcactgctcagggtctcaattatctcaaaggtaaacgaagaagctggattacttttttctaaagtttatcaaatgcaatgatctttttgaatgattcctgtgaagttgaaagagcactaaatattggaatgcgtacattaattatgcctatttttcctctaagattgcaacagagactatcacaaggcatttggcaacctgagaagccctggatggccagataactacgacaatgacaaggattgcaycgttactctcacagccccccagaaccacaccatttccctcttttttcattcacttggcatcgagaactcagttgaatgcagaaacgatttcttggaggtgatatgcatttgaatatcgtttgaatgaattatttaaaagatggtggatcacttaagattttacaccttttatctagtgctgctaataytatatgattcttatttgtttcattaatttattcattaccctttcattccctaaacatctacagagcaccagtccaaacaccggaaattgggaaccttagggcccgcaggagactcctagtctggcaggaaggacagatggggtatagccaattacagcacaatgtggaaaggactaactgagtccagcatgggttggggttcctaactcagtctgggaactagaaggctcaagagggcaatatgtaagttgagacctaaaaggatcagagggaagtctaaggacaacatgctggttctgtaaaatgaarctcaatgatactaaatagctcacctaattttcctgacagctacagtaagtttggggcatcgtcaacatcctctaaagacaagtgtttccttgaataaatgctccctggtctcaggggggtgtggtctgtcctttcttcaccacaactccagagcttgaattkgggcacagaaatgacttcactgtttgcccatcgtccacacacccacccyccactcccaccccaggacacactgagaragaagcccccttgtgcctggagcaggcagaaccatgcgcctcgtgggcctgaaactttggggtcctccagtgcccccgatgagctccctctgtgctctttctgccccatcgctgcattgggcatatgagatggaacatgaacatcatcgctcataggcaggagatagtctgaataagcctcatgtgatgtggacccagtgtgtggaactcagcccctgtgttttgccagaaaaaccccagagctcacggggtttgagctttgcaagctctgtcgaaaatgcattcatccttaggaaatatacttaggtggaacctaaaaacmaagagcataaagatgctgagttcctctgtgagtggagtttaaatctaaacctcatcctgaccgtctctaaactggctttgtaccacacaagagtcttcagtaaagtttccaaaaagtgtgcttgttcctctacccctgatctggagttgtattttttattttattttttttctcactgcctctttaatcaggtcttcattcaaaataagctgcccaagaggatttgacctttgtagcataaagaaatgtaccggtgtaggcagcgggctcctttcattctgtgggacgattctttctagcgggcctctgctcagctgatagtttcttggtagcttcagcctttgttcccaacaaaacatcttctgcttcttagcaccaagggctttctttctttcttttctttcttcttctttcttttctsscctgcaayccccctcatccgatttggctcctagggctgctggcaccttctgcccagcctggccaggaagggtgttctggcatatggtctttgcatatgggtttagcttcaacatgattcctgatgcggagttttatcatcctggaaagctctcccctttggaattcatctaaatcctttattaatcaataaccttaacatatagtgccataaataacactcggaggaagctcatgccttttctaaaggaatactcgccacgacaggagaccgaaagatgtatatagcagggaggaaatgaagaggcaaatacagttattctttgtgccggtcaggttattcaacttggacctgtgtacctcccccaccatggagatccaaatatttatatgaagtgtaaagcagaaagaatgaggagagtgggatctggaggaaagawggaataatcccgttaggttggagtcacagygcaactaactcttaactcactccagcttgaatggaccattattgatcagagtcaacgtttgccrtttgcctgatagatgctgggaagcaaagccttgctttccagccgtggagagtgagaattcctcctcctagctgtccttcattactccacagaatggatctgaaacttcctgtcccataagcaaagaaaggaaaccaccgcttaggcctgtaaaatgtagctccatctggctctcagtgggaaggctgtgggcatagtttcttggcagctgtaccaggaagcctcagcattccgttcttgtgaactgcggtgggaacggaaatgtctgactgagaattctgactgtgttactaccaagcgagggccgagctctagaccatgcttggaatctgttttcatgccttcacctcccctttcaagatcctctgatgtcccagagatgcccactgctctaggtggccccattcttcctaggagaggaaagtgaataagacaagttgtcagcagtgtcagtggaaattagtatcctgctgctcctctcagagcaacggcattttgaaagaggaccctgagggaaaaacgcccaaactcaaragcgtggtgctggctatggcagccctcccatctactagtggatgactggctactctgtcatggcaaggttactttgtttaaacacttagcagaataatccccaaagcactagaaaggcattattctctcccatgggctactacatcgacctaaaaggaatctcacctgatcaacacagcccagcaagatgtcttaactttgtgacttaagataccagcaattaaccaaagtttaaaccatggaattatatagggaacagaggaacttccaatattttgaatacatagatcagtaaaatcagcatttccgcatgtcaggctggktccaacatacattgcccgcgtaacgtttccgtaagaagcgtcgagagccctcctggaagcagggctggttgtgaatgcagggtagcagccaggctgggggacagaaagtggttcagttcacagtgtagttctctctccccataaaacacaggctcatctcctgtttttatatgtgtctactcaaaaatgagttgaaacaaaaaagcaacaaggcctcggaatgtgtttgtaaaacacatttaacaacagacattgtatagatttataattctgtcctttgcccatacagaaattcctttcgttctgaactttattatactttgcattgtattttttcatagcctctttacagccaagtaattttcaatgggaaacacgtgcacacacacacatacacaaacacacacacaatgagaaaggtgtaatagttgactggaagcagagcaggcaacattgcccccgcccatctccaccttttaaaaattcactttacctacrttctccaraatgtttccccaaaagcaaaggctgcaggatcacagcacaaactacggtataaaaaagctgcctggtgttttaattgctgtaggttaacaggtatttctgaatccaaatgcaaatgttttttgatctacacgtggaacatttttcccctttgcaagtgaaggtgacttctgcatgtattttcagaaaaygcttcattcttaactgtataaaaagacaaagcttttccgaccaatgtcatcattcaaattgtctccattttaatgtatataccttagagaagaaagtgtaagtttaataatgaatgactccttcctaaaggtgagaaatggaagtaacagcaattcaccattactgggcaagtactgtggaactctgctgccaaaccctgtcttctctcaaaataatgaactatacctacgatttaagagtgatagtgtaacttctgatcgtggatatgaaatcatctggacttcatcaccctctggtaagacatttgcactttgtacaggaaagcactgtgagaaaaacatgaggtgtctaatagtaaaaggcaaagtaactttatatttttagctacctgtgtacctgattagtttatgttaagaatagagattttaacattgaaagtacagattacttttttttttttgaaatrgaatctcgctgtgtcatccagcctggagtgtagtggcgtgatcttagctcactgcaacctccacctcccaggttcaagtgattctcctacctcagcttcccaagtagctgagattacaggcatgcgccaccatgcccagccgatttttgtatttttagtagacagagcgtttccccatattggccaggctggtcycaaactcctgaactcaggtgatccaacctcccaaagtgctgggattacaggcatgagccaccgcgcccggccagattactttaaattytacatttattcattatttctgtttataaaagaatatatattcatatatgaaacatatataaggtaaggtaggaagattcaaaaattccttggtaaattaaattttgttagactttttgacttttggcttgaccatcaaggaagttctttgagaatttaaagaaaaatttttaccaaaaatccaacttatgaacacattctggcatatatatgagtagttgtgcttctcgcaggccctgacatttcttggcggttctggagagaaattgctttttttagggtagtaagtatcttctcacatttttggctggctgtttatcaaacaactaaagaaaatttaagtcatgtcaatacatttaattcaagagaggaggaatacctttataaaatatcccaaaataccaaaataccttcaaaataagaaagataaacagaactcactttaaatatcttaagaaaagcgttctataaagataatcgtgggtaatggaatcttggcacccaaaggaagcttaaaggtgacctccaatgctcaaattttatcaacgagcaaataaaacaccaagattaagctaggtgctgtggctcacacctataatccctgggagaccaaggtgggtggatcacctgaggtcaggagttccagaccagtgtggcccacagggtgaaaccccatctccactaaaaatacaaaaattaactgggtgtagtggcacatgcctgtaatcccagctactcgggaggctgagactggagaatcacttgaacttgggagatggaggctgtagtgagccgagatcacgccactgcactccagcctgggtgacggagcaagactccgtctcaaaaaaaaaaacaaaacaaaaaaaacccaccatgaacccgggaggtggagcttgcagtgagccaagatcgtgccactgcactccagcctgggcgacagagcaagactccatctcaaaaaaaaaaccaaccaaacaaaaaaacccaccaagattaatgagttgcccaaaatgctccactagactgaggtgaaggtgagattagacctcagtggtcagaggcccagccacgtgctctgtaactatgccagccagcttcttcctgtcccagagatgacctggatctccacagatatatagtctaaatcatgacagccttcatatacagattaacaaattgaacaaattaacaccaaaacttgaagtatttgaccttaagtatgtcagttattagcctggtaaagtcacttttataatgaagtcattcctgccgtcacctacaataacgcactccctcttggtttagtgctgaattttacttctaattttacttcactcayatcactggcgtcaactctgggcatgcaaagatctctacaccatcgaaagcacacagacaacaacttgattttctcccacagttactttatcaagtttkttttttttttttttttycattctgctctcaacccccmattttmaaagtacagtcctggaggaagttatccctgggttgtgatatgcaggcaaaggcacgtgtgtggaggatggaagaggtggaggtggcagtgggaagagaggggaagagaggagaaagggtgtagcccaaagaagaggaaaaggaaaagggatttctgcctccattattcttgcagagtctcagcaccttaagaaaataaagtcttattgcctaacaagccagactggacggcttatatgctgttgaatcaaacttcctgtcctgttttccttgcaggatgtggtggaactctttatggagacagaggctcattcaccagccccggctatccaggcacatacccaaacaacacgtactgcgagtgggtccttgttgctcctgctggaaggcttgtcaccatcaasttctacttcatcagcattgacgatccaggagactgtgtccagaactatctcacactctatgatgggcccaacgccagctctccatcctctggaccatactgcggaggcgtgagtaaaacaaacattttatattcccatttgttatttttagacaataatgagtcacttagtgtagactttttttttttttaagatggaatctcgctcttgtcacccaggctggagtgcagtggtgcgcgcaatctcaactcactgcaacctccgcctcctgggttcaagcaattctyctgcctcagcctcctgagtagctgggattacaggtgcctgccaccacactcagctaatttttgtacttttagtagaaacagggttttgccatgttgaccaggctggtctcgaactcctgacctcaggtgatccacccgcttgggcctccgaaagtgttgggattacacgcgtgagccactgggcccggcctagtgtagactttcaaaggcagacacactgcagaggaagaagcacagcctttaacaaattgagcagttttccaacttgcctttctattatgggagcatgagtgccatctggtgggcattgcattaaattactattaagagttmcaaaaatcagccctgcgtcagaatcacctgtggagttacttacattagacttccagttcccaccgaaacccactgaatcgggatttcccagggaggagtcacagcacgctgtttttttwaaaaaaagctccctctgtgacgtcagtgcactgcctagggttgaatacccatgtttatttctgcataaatagaactgtagaaaatttggacacgtggctctattttatctacttcttgctgaaaattgcagaaattatttgaagaaatggtgaccgatagtttgtttttgtaaagctctgatatcttccctaaaaaaatcagaatctgacgttgattcaatattgcaggcatctgtgcttacgatcctctcatttgatgtgcaagtagatacttaaagagagtaagggctcacacctgcaatcccaacactttgggaggcccaggcaggtggatcacttgagctcagaagtttgagactagactggccaacatggggaaaccccgtctctactaaaaatacaaaaattagctggtatagtggcacacgcctgtaatcccaagtactccggaggctgagggaaaataattgcttgagccagggaggcggaggttgcagtgagccgagatggcgccactccactccagcctgggcgacagagccagactccatctcaaaataacaagagagtaagtaagggaaaattggctgttggcaagcgggtatctgtttctgatttttctgccctttaatcacttagactttgtaatcaaactagacagagaactgtatcagctggaaatctagatggtttttaaaatataacttactatttataaaattgataaatgctgttttcagaagtatcagaaaataggctaatttttctaaaaccctgggcattctcatatattcttaacacctttctttgaatatatttgcatatattttacatgcatattttttactgtttgatggtgtgttttttctacttaccaatatatcattagtaacatatcaataaaaacactgttgcatcatatttaagttttggagagtattccgttgcacgagtgtggcctaatttatttaatgaagcccctctaagtggacatttaggtctcttgaactttttgcaactrcagacaacacttaataaactttttggtagtgatatctttatacatatagttacattacttggtgagaaatggtaatcacaggaccagcagacactgtatcacggggatgcacagaaggcccacagagagagagaccccagtaaatgtgccacacatcagatttagaagctaatcagctcttagacattgaattgaaatttacaaacatttcaaaagggaggaaaagaggcaattttaacaataccatgactttatattggtaggggtttttttgtgggcatggttttcagtggcttgcaaacatacaaccccatttgatccccacagtgacactcccataaggtggaaagaacaagtatatcctggacttgtataaaccgagttcaggtttatactgaacaagtataaaccgagtcactgagagaagtgacggccatttaatccaatgccacgttaagttgaagtatatagcgagataacatcaatttttttaactgttggtgtttacggtattttcccagttttacatttttttataaatgtggatataatttcatgtgtaattgttttttttcttaaaggtaccactgatttctttaacactttatcaatgttaaacataaatgaaaaaatgtaaaacataagtataaaacatgaagtacagaggtagctcttgttttgctaatatttacatacaactttttgtaagttgtaatattttactaatatttacatacatactttcacatgttacatacatacatatttacatgcatatttacatacatatgaaagttgtatacttttgtatgtatactccttaagtatacaattcaactttttatgtatgtaaatatgcatgtaaatatgtttgttaaacttgtaatatttatatacatacagtatttaaatacatacagtgtacatacagaggtagctccttattttgctaatataaacacaaaccctgatttggagatattttatattacggtaaataccattgttcacagggaaatcctatatcccttgcagctgcagaaaatgaagatctagcaaatgagagaataacgggacaaacaaggagaatcaaaggagattctaaaacttctgttgaccgtctgttgacatactagtttgtcaaaataaaagaagttattgaaatttggaagcagattaaaatgggagtaaaaagtagatgtgtataggaataaaaatattgtatattccttgatgtatctcttacagaaaaaaaaatctacactcacttgagtaagtgagtatcttggaaataagcctgtgttttgatgacttggggtagggctgaggcaggagaagccagtcatgtaagcatcatgagagcagggctttttgcctgttttgctcattttttaatgtcttaatacctgcagcgtggcagtgccttgatcaatatttgccaaatgaatgaatagaaagtgagagacaacggggacccatgtatccccccaacacmcacacacacacacacacacacacacacacacacacacactgttccacagaagtatatgaaaataaatctcaagaggaaaaactataaacactgaggatgaaaatactatattttacttaataggatcattttaattatatatgtttgtttcagaaaaattaaatttgcagtaagaacttgaataagaagttcaagttttttgataacagttttattgagatacaatttcaataccatccaattcatctccttaaagtatacaattcagtggtttttcgtaggttcacagagctgtgcggccattatcagcacagccaattttgggacactttcattaccccccaaagaaacccagtacccatttgcagtccttccccattttccctcaactccccacgcccagaaatattcctttgtaaagcatttgcattcattctttgcaaggttacttcaagaaatatatgcaggttcaccataaattctataaagtttctttatgtggtactttgttactaggctaacattcctagaaaaacgttcaaatatgtgaaatatataattggatactttttttttcaattttaggacaccagcatagctcccttcgtggcttcctcaaatcaggtcttcataaaatttcatgctgattatgcacggcgtccatccgcattccgattaacttgggacagctaagtgggtaacaactcgtgttcactcagcactttccctctgcagcacgctggacagcactctgccatcctgatacatgacccctgctgatgccacagagaataagctgaacttgtatggtttttcaccaaaccatrgatagaatcaatatttgtaggccaggcgtggtggctcacccccctgtattctcagcactttgggaggccgaggcaggttgatcacctgaggtcaggagtttgagactagcctggccagcatggtgaaacctcatctctctaacaatataataattagccaggcgtggtggtgggtgcctgtaattccagccactcgagaggctgaggcaggagaattgcttgaacccaggaggcagaggttgcagtgagctaagatcacaccactacactccagcctgggcgagacggcaagactccatctcaaaaaaaaaagaaacaaaaaaaaccagaatcaatatttgtacattttctcgaacatagaatatagcttctttagtcttgagtgtgcatttcattctaatattttgagctgaaatttaaaaaaactttgaaagagttggaaatgattatggcatatgtgacatacrtttttaaaagttaataataatagccaggggcagtggctcatacccataatcccagcacgctgggaggccatgatgggaggattgcttgaacctaggagtttgagaccagcctgggcaacaaagtgagacctgatttttacaaaaaatcaaaaaattagccaggcatggtggcatgcacccgtggttccagctacacaggaggttgaagcaggaggatcacttgagcccagtaggttaaggctgcagtgaaaccctgtgaattaaccactgtactccagcctgggtgacagactgagaccctatctcaaaaatgacaacaagaacaacaaaagttaatgataatatagaagcataaatttcctgtgaatgttcaattacacataataaacattattgaattgtacacaattatgctgcattaattttttgacttattaaaactctgtctttcactatgggacatatataaattttcaagtttaatttttacattttggcaaagaattcaatatatatatgaatcttccagagcttcatttctggagccaagctgcctgagtttcaattttaactgtactagttaagtgcttacacaatctctctgtgctcagtttcttcatttgtataaggggattattttacctgtctcacagggttgcaataattaagtatatatgtgtaaagactcagaacaatacctggtgcatattaagtaattggtaaatgctagcttctatgtcaattagtagtagtatgactctcctccttaccatacagatgtacctgcttttcccatactcctccaaagccaggcccaagtctcacctgtgtttaccttttgccatgcccctaggtcaatctgagcttctccaaagaccttgccttaactacagagaagtttgccgtaacctctgaattctctatttccctcccatttgactcaaacttctgtttctcctggccacgccgaaccttttcttcatttatccccaggaccctgtactctcctggttatttaatttctctgagtattctccactctcctgtagaatggtggccctcttcacacagctccactaggcagtgccccagtaggaactcagtgtggggcctccgacccacatttccctgctacactgccctagtagaggtcctctgtgaggattctgcccctgcagaaggctgcttcctgaaaacccaggcttttccataccacctccaaaatctggggagaagctgccaagaatctaccactcttgtactctgtgtgcctgcaggtttaacaccccgtggaggctgccaaggcttatggctttcattctccaaagtggcagcccaagctgtacctgggcccctttgagccgtagctggagctggagtgaccagggcgtggggagccctgtcttgagcctatgcagggaagcagggccctgggcctggtccatgaaatcattctttcctcccaggcctctgggcctgtgatgggaggggtttcagcaaaggtttctgaaatgcctttggggacttttctccattatcttggatattagcagttggcttttrgttatgcaaatatctctagcaagtggatgcctcacagcctgcttgaattcctctcctgaaaaagctttttctttctctgccatatggccaggctgtaaattttccaaatttttacactctgctttcctttttaatataagttccaattcgaagtcatttctttgctcccacatctgagcacatgctattagaagcagccagcccaaatcttgaacactttgctgcttagaaattttttccaccagataccccaggttgccactctttagttcaaacttccacagatccctagggcatggacagaatgcagccaagttctttgctaaggcataatatgtgtcacctttgctccagttcccactaagttcctcattaccatcgaagaccttggcagcctggacttcattatccatatcactatcagaattttagttgcaacttttaaacagtctctaagaagttccaaattttccctcatctttctgtcttctgagccttccaaactcttccaacctctacccattatcttgttccaaagtcagttccacattttcaggtatctttataacaaaaccccactcctggtaccaattttctgtaatagatcattcttgcattgctataaagaaatacccgagactgggtaacttataaagaaaagaggtttaatctgctcacagctctgcaggctttataggaaacatggtgctgacatctgcttggcttctggggcagcctcaggaagcttataatcatggaggaaggcgaaggggaaacaggcatgtcacacggtgaaagcaggagcaagacagcgagagtatgggacaggtgccacacacttttaagtggccagctctcatgtgaactcagagcaagagctcacttatcaccaagggtatggcccaagccattcatgagggatctacccccacgatctaaacacctcccaccaggccgatctccaacactggcttttataactcaacatgagatttgagcagggacaaatatccaaactctattatgtatttacgctcaggagtacaaagtttccataagcaccaccattgcctattccttaacacaatatgttaagttataaataaacaatatggtttgccacttaacaagaagtagaaagttcagtagcacatccttatctccaatgctgccagacatgtaactaagtgaggtagttattagcttccttttcataagaaaattcaatgcttttataaagtttttcagtgcctctagaaaagcggaagcctttacaaaggagatttgctttatgttaattatgcaaaatcaagggttattaacaaaagaccatgtgaatgagagaagctgaggaatgtaacttcatcttactctaatactcaaatggcagataattatttctggacagagtatggagccacagaaataaaatactctaaccttgaaaattcagctactcaggaggctgaggctggacaatcacttgaacctaggaggcggaggtttcagtgagccaacatcgcgccacttcactccagtgtgggttacagaatgagactccatctcaaaaaaacaaacaacaacaacaacaattcctgctccctttttgtattatggatagacatatcaactttatgggtgacaattacattggaaaggacagtgaatgcgataagtaacaccatcaaatccaaaaggtcttgataagctacaacaatgggccaattgtaacagacgaaatgtgacagatataagatcttcctcttttatcaaaaaatgaattgcaaaagtacagaatacagggaaagtttaacaataacatgaaatgacatagtacttttctgaaagaaagattaacatgatgtcactgtcaaaaaaatgatgcttagagcatggactgcatcattagagtaacggtatcatttccactcagaagggcatgcttttctaggaggcatattggaatatctgggaagtgtgtacctgaaattgaggaaagcatagtcaatattattatgtaattttaaaattaaaaatacagaaaaaaagagacaaaatgaagctttacaaaatcttccaggctgggcatctaggaaataagcagtgattttttagtgggttagggatggtcaggcttgggagcatgacattttcgtgtatagccaagggaagtagttattgagtaattcagtttttgagtaattcagctggaagaaggagaaaagagtcaactgtactctcattcgtaagacccaccgtatatcctctggttctgctttacatttaattcacttgtttccaaatgtttattgagcatcagctatgtgatacgtactcagcgcactgaggataaagcagagaacaagacagccatacaagactatcagctgatgtctcccagcttcacaaagcacacttcccagctccatcttgcttgatttcctgagccagtcctgaggcaaaaaccttaatattcttatctggtgaaacatacattgagccaacttcccagatctagtggccaagggataagtttcctgattccaaattgtgtcaccatgaagtttcactgctagcaatcaggaccctggacaggctaaccatcatcctagcaaattaatcaaacctgagaagggggtgtgggaaccctgatttatagctggtcagtcagaagtgtaggtgacagtcaacctaaagtcttgtggaaatgaacccttaacttgtgggatttgactataagttgaggtagacagtgtcagaattaagttaaactgtaagacaccgagctggtgtctgctggagaactgtttcatgtgtgggggattctctggtgtcagaagtgttgagccagtggagagtagcaaaaacagtttggtttttcctatctcaaacaggagtgaaaacaaattcctatgaaacagaagtgaatggaggcatgcagctcaaaataacttcaagagagacatgcaggagggctgggactctctgttccaggtgtaacctggatgtggggctggctggtgcagtgtgaggggctaaaaccaaagtcagggagttgccctaactggcactcacaatccaccatttccctccacctgcaaaggtagccgggtgatgacctgcaggcataatactgggttcttgcctctgaagaaattcgactatcagtctagggatctaggaggaaaacaatacaaacaaacaagagaccactccagctatctagaaaaaccagttcagatcttcacacttgaactcaaaagaacaaccaagaatcaatcaccagagaggggaagaatctttcttttctagggaaaagactagataaatacacgtaagaatggacccttgaagaaacataattgagtgaacagaagagaggtttaaaaactattatcctcggtgatacctgagaagagagtacattcatgaaacaaatgcagggtgttattataggccggcagtccaataggactggtgtccttagaagaagagacaccaagggtgtgactgcatagagaaaatgccctggagggacaccaagagaagacagtcgtccacgaggcaggggagaggccacaggataaatcaaatctgctggcaccttgatctagaacttccaggattgtgagaaatttctgttgtttaagccatccaggctgtggtatattgttacgacagccctagccgactaacacaggtactgtatgtcttcagcctacctaggcaagattcactattagaaattgatagaataagaaaaattctgattgcttcaaaacaggacttttgctttaaaagagttaatgattcaagaaataaatgtattaggagattacctactaatacgtattgatgaaattatgaagttagaaaatcatcagtggatgctaaaacttgtgggtaaaaattagatgaggaatggggtgtaatcaagtagcacctccccccagcattatttttaatcataaagaaaaaaatagtaactttatggtgaagaaacctggcagacactaccttatttaagtgaacatcacctatactgggagaaaccgatgccatctgtaccttgatatcatgcactggaaaagacacatcgctttagtggtgtttctccaaaaattcataacctgaaagggaacatcaaacttactttgaaggatattccacacaatacctggtctgtattcttaaataatgtctagttcaataaacataaaagccaaggacggttccagatcaaagaagactaatggaggaataactctttcatctggaatgttttttaagcaagaaatacctgctttcgaatttaagagtgcagatcctttttttatccaattggttcggagatataattacattattttaccacatctccttaaggctttgatccctgctacaatctacaatatataaatgcatatgtgtggcatccgtcttatcatcaatttaggtgaccagtagaagaaaagtgcctggtgccaatttttattccatagtataaaatagtctctcaggacagggtttttggtgagagaagcacaggatgtygctgggtgactgagaccgggtcaggaaatagggaggcagagggcaacagtttctctagaatttaaaatttggttgcttttggaagagaaagcaagagattcctggaagccagaacgtcatgtttcacaaatgtaaaagtcctagttgggaaagacacatcgctttagtggtgttttcaaatgacttttaaaatagtagggttttacttgtaggttctagctacaagtaaaaaggctaaaagccagccttagaaacctgtcaaaaaagatttccagcagggcgctgg

SEQ ID NO: 5630 - DNA, 105550 bp, Homo sapiens
caagtttgtgtcttaaaccttcagccatgctctaatcccaaatgtcaggaacaaagactctgactgatcaggattgctttaggtgtctactacggggtcgaatcagtcctgggcatgggaagtaggggtcacatagtacaactgtggctgccagaagctgctcttcacaatctggatgaaatattcagagaaggaactataacttgtgggttgggccacaaatccaaaaagggtcttgtgagtattatcgtcactgaataaactctcaggtgctgcaaagagaaaatggtgttatttctagtcagaatatacaaccatctcacaatgatactctaaggaatcaaggcatagtcctatgcaaatctaaaattgtccattgaatagccacggtccgagtctacacatttaaagttgtcttattctaggattctaatttgtcagagggctgtgagagtcaacattctccattctctaccttagcaatactcttttcacctcctccactccaacaaaagcttccaaaggaaatcttccttcttaaaagaaactgatttccatgattcagaataaaatttagtaaagactgatgaattaggactccattaatttagcatttttgctacatcaagaatcaaaaagggattaaacttttctatccccatatctcttaaagccaggaaagatttgctaagtgaaataaaaatgtgactttggacaagttttgtaacctctctaagactttgtttccttatctgtaaaatagaaattaacttttcataggattgttgtgacaattaaatgacattaggcttgacatgtagaaagtactggctattagctatgatgttgaagataatgttggttgtagtgatggtagtaataactctagtggtgatggtggataatggtagtggtggtggtgatgatcgtggtgatgatagtggcagtggtgatggtggaggtggtagtggtgatgatggcaatagtggcagtgaaggagtggtgatgattaattatgacagaaccaagaatgtataaattgttctcagcacatagtagtcacatagtaaatgagtgcagagaacaagcaatttttagataattacaaggctcttagttaccatttacataccaaccatggatatgtccaaaacaaatcatgcttaaatgttcatcaaaacagattcctaaagccttccaatagatgtttaaccactttgtatgaagtggagagaagaggaataaatatgaattttagttactacatgaacataaaataaatataattaaaaataaatataattacattcccttaagtaatagtgcataaaatatagactgttttgcttgtgttccttccagttagcttgctacataaagccacataccattaattcaaatttcatcgtcaaaaattcacatttctaagtttgttatcatccaagtctaggaattgtcctatctgcatactattttaacctccaaaggtctgcgtaaaacccattttgtggctaacatggatctatctaaaaaatccagttgcatctctccccttgggacttccagggtgcagcagccacaccaatttctttatttaccataatttgaaagccttattaatcctaaaggctcagctctataatcacatttggttagcttgagactaatccttagaggttatttatttttcatgaagattgcttcccagctactggtttatttagactttactaataattatttcgcaagagcttttttcaccactgctcatttatatgtgtagaattcacactgtgaatatgaactaaggatgaatttttttaagagttaaggtttaactggaatgtcattttttctttactgtgccagatcattccttttctgggaagctgtcccgtgaaataattaaatattgtccctttaaaagagtctgtgacctgctgcatttgtaatccttgaattccatgattcagcccaagatctcccagctttccatttcacactcctgctcacatttggtttagatttggcttttctttgctcgagaggaacaggatttattactaccagtcagaagccatcagtccccaatatttcagcaaagaaccctagtctgccagagtgagtaatgctctgtttgcactcaagtctccctgaaccagtcaccccaaataggatgtcactgcttgcatttatttagaaactgtcaagttgtctatgtgtttcctcccaccagttcatgtgattcctgaaacacccctatgcgctttgatgggagggaaaaaaaataacagtccctcatacatttatgtaatgcttatttatggagcacagtgtatatgttagggactgagagctgagtatgtgctggcaccccagaaggacatgtccctgttctcaggtagcttagaggtcattgagtcccaccatgaggcaggcacaccaggaaatggtcttgatgtcttctttcactgactactcataataaactatgggaaaggtctgattacccttgttttgtggctgggattaccgaaactcccagaggttaagtcatcctctgataagggggaaagccaatgctcagacctggactttctyggtccaaggctgctgattgaattctggattcttcccaaatagtgtaatctcgtgtcaactcaaatcaattcaagtttcctttccagtttcccacatcccatggtttggcttagaaagaaagatggtgcaacacacaacagatatcaagcatctaagagtttgggaagggtttgtgtgaccagtggtgtgggcagggtgtctttagaatggaaagtggatgagaggggagctcaaagaggtgatccaggaattcccaaaggtggaccttgactcagtaagtcaccaggtctgttatttgaaatgagtcatttgtggtatgggggcaaatgacctcagtccctcaccaaactatcgggaagcaagcaaacaaaataatccccgcttctggggagaataatcctaattacagcccctagaatttgcatgcccttctacagtttgcaaagcactttcacacctatattttccttggtggaattgtttactgcactaatggagaagggaccaggacttgatatggcctagtttgttggtttttatatattttttaagaataatcatctgtcaaaatgtaatttcatgcaatagtctggtatataaaactgatgcaagtggaacttctgtggttgggatggggcctggggagggagaggcacagcttactcctcagcttttactctgaccactaggtctgcttctgaggggtctctaaggaacctccaggttccatgaaacacagtaagacagacattgttcctagtgactccccacgtcacttcactttcttgctccaagaaaaggaagctgaaatccctggaggttgcatgaggtgaaaaaagctgctccttgtcctgtattcttgtgcatggaacctaccagggctggtttcctcacatgagtagggactgaagccttatctgggagccagtttgcccccagttgtttcaagaaataaagtgtcctcttggtcacagacagcagcagtaacaactttttcctgcggactggcagcattttccaagcacctgctcttcaggtgggagttacgggtcactgtcttcattccagacgggcggctctttgagtcatggcatgccagcttctgagtggctgaggactagatccagacaaggatttttcagtcccaaacactcttcctgaaaatgcaagaggagtagtctttagtcaaacagaatctccacaactgaaaaatttataccggactagacagtggtagtggttgcacaatattgttaaagtactacacgtcactgctataaacacttttaaatgggtgaaatggtaaattttatgttatgcatattttaacataacaatgataataattttaactaagtacgttgcctccttatttcctacagggycaagttcaaactccctggcatagcttacaccttgtagtccccatacctgtaacctcatgtctgctatcttcccccagccccttcatctgatctatgttcagatcagctcacattgctctctattctctggacaagccatgttctttcacttttctatgctcaaacacaattttgcttttagtaatgatagcaaacacttatttaaagtgcttactgcatgcatatgtagacataaatctacggcttaatacatgcagggcttttgagtcatttaatcctcaccaattctatgaagtaatagaattgtaatagtaataatagatactattattaagcccattttatacttgagcaaattgagctaattgccttaggcaaggtcacacaactaagaagcagccataatagggtttggatctaggtgttctagctcctgaatccatgctgttcgtcactacactgtactgcctgtggatgacttacttgtccctgtagtttcatctgaagaattcctcctccttttcctttgaggcctgcctcaaatatcacttcccctgtgaagactgcctggtgttctccaggagagagtgtgactcccttctctaggaatggtagcaccccaaacacacacattttgcagcatatttcaccttgcatggtaatggcctgcttgtgagttttattccgtaccagagggtgagggctctgaagatagcgccaggtcttatttacctcgataccccacaacactcattacatgtctgatgaatgaatgcatagggggatggctgggtgcatttctctcaacttttcaatttcttgaaataaataacaaaatcttaccttccctcagaagtcctggcrtggttcctttcatcttgccacagccactgataatcactttcattttctgtgtaactcaccaggcaagaagtccatgcagatttacttttagtagttcacatgacaaataaatactgcgtttgatttccaaacattaaaccatagtatattatagatagatatagagttatcattcaaagtatgatatttcaatctcaaaaggcttcccctgaagaatattacaaactcttcctctctttaagatctgctgggtaggaaagatgggagaaaatgaattaatgtttacacagaaaggaggataatgggggcaaaaataatagatgaacgtatgggtggatgagagaatggataaaatgataggtggatatgttgatcttggacagatgggaaatgagtggatatatcaataaacagatatgtgggtggatgggtggagaagaggatggtggatggttgtggttttatgaagagatgtgaaaaaggaagtgtggaatgatggatgagaagttgtatgggaagatgaatagaagaataggtggttgaataaattaaaaggtgtgtggttggatgaatgaatgagtgggatgatagatggacctaagtggttagtggatggacaggaggatggatggatgtgagagccccagaaggacataaggaaagatgggtggatagatggatgggcggatggaaggatatttaggaggatgaatgagcatgtgtgtggagagaggtgcccattcacactggcttgaacacatgggttagctgagccaaatgccagccctatgacaggccatcagtagctttccctgagctgttctgccaagaagctaaaattcattcaagccatgtggacttgttattgaggggaaaaagaatgagctctccctctttccacttggaagattcaccaactccccacccctcactccccactgtgggcacggaggcactgcgccacccagggcaagacctcgccctctctccagctcctctcccaggatatccaacatcctgtgaaacccagagatcttgctccagccggattcagagaaatttagcgggaaaggagaggccaaaggctgaacccaatggtgcaaggttttacggttcggtcatcctctgtcctgacgccgcggggccagcgggagaagaaagccagtgcgtctctgggcgcaggggccagtggggctcggaggcacaggcaccccgcgacactccaggttccccgacccacgtccctggcagccccgattatttacagcctcagcagagcacggggcgggggcagaggggcccgcccgggagggctgctacttcttaaaacctctgckggctgcttagtcacagccccccttgcttgggtgtgtccttcgctcgctccctccctccgtcttaggtcactgttttcaacctcgaataaaaactgcagccaacttccgaggcagcctcattgcccagcggaccccagcctctgccaggttcggtccgccatcctcgtcccgtcctccgccggcccctgccccgcgcccagggatcctccagctcctttcgcccgcgccctccgttcgctccggacaccatggacaagttttggtggcacgcagcctggggactctgcctcgtgccgctgagcctggcgcagatcggtgagtgcccgccgcagcctgggcagcaagatgggtgcggggtgctcagcgcggacccggcggcagcccctccggctgagtcggccctgggggactggagtcaagtgagctgtctgcgaagtgcattgggctccggaaagcagggctgggatttgcgcyaaaccgttggagaatgtgtctgtggaagcaccatttggttgaaagaaaaagagaaagagaagaaagtttgttgggcaggctgccggcgcgcagttttgggcgaggtcgctagagctgcagcacatggcagaaagtaaccgttctcccggatgcgcacagtcgttgtctggactaacaggctcctgtgcccaagggctcgccaagccccaccrggctgtgtctaggcagggcagagctgggcggggcagagactggggctggaacagggcgagtggctgttatcaaggtggtcacagaagggatcacaattccaagtgtgagactagctggcaatgggttttccagaraggggtcctgggttctcccagctccccactgagccttgttccaaagcttacagtccgcagtgtcactgccaccttagcgctgtggaagcttgaaccagctctgcggtgaggtcttgggtctccatgagattccagcctgggatagggagcatgaatatgagaggcaaccactggaccagctgcttggtcctcaccacctcctgcttctgccaatcagtgtggggaaatctcaacagtaaggtggctyatattccctgcctggcagcctcagagcagagagaagagccttgataccagggcaacatcagggaccctggagctagggctccaatatctcatccaaacagggtcagtgctttgtggtggctatggaggggaggggctgcgtgtaaggtatattctagcacggctcaactccaagcattctctttctttgtctatgtatgtacagataattacatggccgatttgcttatcgctggccaaaattaatctttcttttaagaagtgccagctgggtcattaagacagctcagcctgcatgcagtaaattctactcagcaaatatttattaacccagttccacgggagtactgagaaattgaaacacayagtctcacccaggtagtttagattgagtacccagtataaagtatcttgaattactttctgctttctctatcttcctactttctgcagtaggaagaaagtgaccctaggtggaggctaggcaggatgagttctctgtgcatatgcatctccctttctgtgtgagtgagaggtctttgctaggtggggatttggggatctaggatttatactactgaagctgaaataataataataatgatagcaacaacacagcctgtcatggtggcccatgcctgtaatcctaggactttgggaggctgaggcagcaaattacccaaggtcaggagtttgagaccagccttggccaacatggtgaaaccccatctttacaaaaaatacaaaaattagcagggtgtggtggtgcacacctgtagtcccagctgcttgggacgctgaggcaggagaattgcttgaacctaggaggtgaaggttgcagtgaaccaagattatgccattgcactccagcctgggtgacaaagcgtgactctgttaaaaaaaaaaaaatgaatacagtgctagctaccatttactgtatattttcactgtgccaggcattatgttaaatattttccatgtgttatctcattctaccctcacaatggcctagtaagaagcttcctgttatcaggcctgtttgacaggaggaaaactgatgcttagagacgttaagtgacttgctggcattcacatagccaggagcagtgctggatggaaacccagctccacygagctccaaagcctaggcttagaatatgttagactgtataagatggacgaacttggaaggatttcagggagggaaggattttggtggactctaggccttagggaaagttccaaaagggactggagctcaaataagcccttgaaaagtggaaacattcaggatgggagagaagagtcaagctggagatcagggagagccctgggcctggcctgaaagaagagggccctggtggtttccctatagtctctagggaagtttatttgtatgttacctaccagtgccatcttctgctttgtctttgggcattctgactcctgactccttccaacctgtctccccgttccttctaaaaggccccacttccaaatatttggcactgtcctaacccttgaggttctcccagagacccgcagtctccctcctgccccgtgtttccacggcccctttgcgcagcatcatttagaggaagtacaatgaagtgccagtagcaataactgccccggccctcgctttcatgtgcttgtaaagttgtttggcaggaactgggacttggaaaggagacatgactttgtcagagggcttggggctgggcatggtgtgrgtggcgaaggggagaaggaggaaaggggaaggaaaggagctcttgttgccccattctggrgagtggtggactctggacaaccaygaggaaactttggaaaggagcaaggctttgaggaggagtccagtctttgtatgggaaagcaaaaagtggagaaatggccaaatgtagttaagtgacattggacccagaaactctgagttggggaacagatatcttgaattcggggtcttgtgcaggaggaagaaagtggcccttggtggaggccaggggggatgagtccttcatgcacatgcatctccttgtctctgtgggtgaggggatctttttttttaattattattatactttaagttttagggttcaaccattgtggaagtcagtgtggcgattcctcagggatctagaactagaaataccatttgacccagccatcccattactgggtatatacccaaaggactacaaatcatgctgctataaagacacatgcacatgtatgtttattgtggcattattcacaatagcaaagacttggaaccaacccaaatgtccaacaatgatagactgggtgaggggatctttgcttgggaattgcatgcctggtgttgagaaagaggagagcgtctgagagccctgggtcttagggctggcacacacctttctgctcccttctctctaattgagcattagagactccgccccytgctgggagttagaactttagctgtgttttcccatgtgaaggagcaaagaggcaaagcttcatctctgttggggctagcatcaactaattcaggtattccccatttacacattggacatctacttgctgcaaaggcatggtgacaagtccttgtgtgggaggctggcagccagtaggaaaatgttccatttgttttttcccaaatttccccacaaaggaggggatgctggacagcatgaaattcttagttcatgacagattcccttccattcattcaggaactatttcctgactcattgtcatagactcagagatgggaactctaaggatcatttagaaaatctgaaagagagggactagtgacttcccctctctgcgacttgttaagatattagggcagggcatttctctcatgtatctctatcatgaggactgtgggagcctcaaccccaccccctgcagtgggtggggagggtgtggtctactggggtaacaacatttgtttcacaccttaaatactaccttacagactcattacagttttatatattactctacaatatacccaatttgagtttaatacaataataatgatatatatttttgaccatatagcaatgttggtgttcgacaatgattctctgtattgtcctggggcttctagcacctcctggaacatcgctagatggtcaggagcaccaaagttttaaaaacctgatgctctgctgtggtaccatatggtcctgtgtaaagcagggtcctaagtcctgagtctctaggaaatactgctcagtgagcactgactctatactagatgtgaagccgggggtagcacaggatatcttatctaagcctcccaacagcccaatacacctagcactctctttaactccattttctagataaagagatcgagacttgtggagatggcatgacttgccccaggatccagtggtggagttgggatttccgcattatctaacatcctcccatgttagactccaatgcttatgctccttcaattcattaygtgtctggaggactttggaagctatacgtggctctcccacactacctgtcccctgtggccagcataagtgaactcttgcatgggtggcttctctctccatccccggcaggctgtggactcttggctgccctgccctggcctgtctctccccaggtttggccaggtttggccacagatatcagagatgccaaccaagttatttgtaactaaaataaatcacatcccttatcagagtccagctgccctcccagatatgctctgatttacaggcttggaataaagagagaggtggttgcttgtctacaggacaagttagggcaatgccctctgcctgaatattaggaaagcagcattacaggagctctcactctgaccaggcaagcatttcacatgcacagacccagagacccactcctcacatgctcattagtaggttgtgcgaccctgggtaggaggctgacatgggtcttgaactgaaacccagtgtgtggctctaggtgacatgtggccacccaagtgaggtttcggatccacctgcagtgtcagatgcttcaaggctggggtcccctgatggagagraggtggttggagatcacctgggcctcctcagcactgcctcctggctggggctggggctggggataagagagtaactgcaattgtgcttccccrgcaccttcgctttaggtcactccaccgaagagcctgaaagggaagtggttcttgcgaaagaatgagctgaagcaggtggcagatgctaccaggcaccgtgtagttttcaaaggggatctttttctgcctcagagagaaattctggggtttgcacagcaagaaaccgatgactcaatttcctttgtgtccctgctttaatgggaaggttgtaggcgttctttagaatggcagggtaggttgataccttctaccttaaatttgaatcccacttttcactcacttagcaggttgaattttttttaagtgtaccccccacagctgcccaactgggtttgcgaggcaagcccaacttgccagagtaaaccggaaggggtgctttctaaagtttgtggttctggagtctggccaggcatggatacagtcattgtgcgttccagattttctgggagagtcaggatctcaaatatgcaaacactctaccaattgatgtctagtgcatattttgactaaatgtttatatatttttccacaaataaatacatgacttaatgtaattgaaagtcaaacactttttaaaaatgctttttgcataaagaaattcacatctttacaactccttaactaggatggtgtcaattaaattaatgtttgattcaggacatgtgtactttggaggtaagtatttcatattcctcccctctccattgctcaattgccccactgggtgacgtaccaagataagccacatgtttgattcttgtttgctggatgtggacatatgcacattgcaggtatgcctataagtacatgcctgaaggatctatgtgtgtggtgggaattggtgatgccaaagaatgctaaagactttcatgccccttaaaggggaaaataaccacaacaaaacaaattccaatgtatcttctcctgtcttctgcagcactgggggagtcccctgataacagggatcatgtcacattcatttttgtgggcccagatcycagtaatattgacccataactgttgaactgcaatgaatgtctagaatataaaagtcatgatatctatatatatggaagcatgctgtcagtatgggctaaggtgcaaatacatttatgtgtaagtgagaaccatggtgatggctgtgttgctcaggacagggctgacttggctggctgactgcccaccacaggcctcatgtttggtctaccccaaacagtgagctcacccatctgtttgtttgcggctttggtggctgcctgctgtgaccgctggggacatctggctaaagacagggttactagatagttgggctgagaagggagtgggagccagtgagatgaggacaccaaccccaaatttaagcctcaaaacaaaaacactccccagcagcagccaccttggggttctagttattttggagatactgatacgaggttgagatccttgggtgagaggcccacactcctccaacccccatgtctgcttctggaaggtggtggcagaggagagaagtagaagtactatatgggagatgcgggagattcttgccttctctgtcggtctctttgggcaattatcaagctgtcatctgaccagatactaccatagcttcttcgggggcaaatccgtagggaatcctgacatccgacggggagccactttggcaatggcaaacggtgtctcctctccacagagcttgtgatgtcagaaattacccataactggggcaggttttgtcttyccaaagattgtctgcccagctagacctgagagacagggagacaaacacagaatgagggggtgggtcttgtgggggtggggaacgatggaaactcacagagccagatctccccgagtttgagttgcactggctgcctgggtgtgtcctcctgaggtaagtgtccctgcgaagtgcaagtgtgggcagacagatctcaggtgggtggggagggactgagtcaccaaggaggtgatttgcaaaactcaggtcccagaaactttcaggtcttcagcttttaaaagtaaaggttaattgcaaaactccggggttgagggaagagattattcacatagaccagtcattttgagcatctgctgttgtggcattgcaagtctccttcgcagtgcctgaaagttcatttgtttttgagagctcttacgctttttctgtttgcatctttgcacaagttctatgtttctgagaaccctcaccactattagtaataatagcaaacacttacagagtgttgaccatgtaccagcgccattctaattgtttcctatatactgccttgtttaatccaaacactgacttcatgaaggtggtgctgttattatctgtcttttacatatgaggaaactgaggcacagagaatttaagtagcttgcccaaggccatgcagctgataagtgatggcgctgggattcaaactcacatctggctacagagttcatgctctttgtcactatgttagagtgcttctcttggtatattaagatatcgaggcaccctagaaatccagacgattgtacctggaagtactgtagttgttttcaaaamyttcatttgggaatctagttgtgggtgaggtcataacatccactgagcttttaaacatgatgtcagaggaaggggttagaattgcaaaaatgaaggaggaggaagttgtaatggaaacttctgccaatgcatattctgagttgactcattcattctgatctctgaatagaagctctactctcttcyatgtgatggaaagttgaggatagggtagggctgagagggatgtgaattgagttgtttgttcattaggataggatagggctgaaagggatgtgaattgagttgtttgttcattatcacttcattatttgtcacctggatgaaaggtaaaggtggctgattagtgtttctccatcagctagaactttgactgggaaatgagccaatcaaatagcagcaaaatatttgccctcaccttacaggcccttggttccagggtcttctctccaccggctagaatggatgagggagggagagaaactctgagaaaagaggctgtcaggagtagggctgtacatatccagggcacaaggaatttggcaaaagctggaagtrtactatagcccttctctccagccctagcctaaaccagatgaccaggcttctatttggcccagcatgtgaccatcccatcagggagcaagagagtttcctctgggtacccctcactgagaaaaaagccacccaggaagggaggaggcaaggccccctgggaacatctggctcagtccacaggaagggatgcaggccttttcctgggaatgaggactcatcccatattccagcccccttcccccaacttttttttttttcaattttagtgcatctctttacacttaacaggtctgcagtgacttctaggaggatccacacaccaatcgtggaactaggcagcatctttttccacttcctttccaagatagtagcacgataacagtaaagcccctttgcaagtgttcactattatgcacattaagatgccagggagagggctgggaaaggtggctcacacctgtaatcccagcactttgggaggccgaggcaggcggatgacctgaggtcgggagttcgagaccagcctgaccaacatggagaaaccccgtctctactaaaaatacaaaaaaattagccgggcatggtggtgcatgcctgtaatctcagctacttgggaggctgaggcaggagaatcacttgaacccgggaggcagaggttgcagtgagccaagatcacgccattgcactccagcctgggcaacaagagcgaaactcggtctcaaaaaaaaaaaaggtgccagggagaaatgaacaattccatgcagccaacacctggtctcctgcgtttggcttagaagggcatttctgcccaagcccccagctctagtctttgcacactttaaatgagtagctactacatgccaatcacagatgttgcctctgctgagtatccagtcaaaaaaccagaatctaacagagctaactaagcaccatcttrcaggaaaccagctgacgtcagctccgcagccaccagtgagttactgggcccacatctgcctgcaagagggggaggggaattcaggtaacccacaagaggggataaaagttcggggaagaaatctcctgtcaaggagtttgtttttgcagtggatcctctgcagtgagactagttgtctttacaatatcattagaggtcaggtacattcctgtagactcccttaagtgacttgctttctcctattgttccccctgaaaattcataaaaacctcacaaacacatctccatttaaaaagagaaagtttaaaggatgccatgtaatggttatctcttttcttttgccagtgagcataaaagctccttagggaaaagcccaaaccctctatacattttcatattcatgatagccctgagcggtcagcacagttccccaattatagtgggtgctcaataaacacttggatggcttactgaattaataatgtttctagacttggctagcaaagccatctccgttacttatcttttgtgatttttataggttctgtctaattctttttcttcattttttttctttctggtctatacaaatcttctttcatttttctctattgctacttgtagcgatcctcaacccgcctcctcccttgaaatttctgttctctgcactctcttcagtctaaagagatctttcttgaggtttgaaatgttacacaaggcaggggaagtttagagctaattgtattttgtccagtagaacggggatctggatttcctataggtctggctgcctctttgtctacacctttacttccaaatctggcctcatgtataaaaagaccccaaaccttaaaatcatgttctcaacaatactcagagaaaaattgttggctttttggtcaccatgctagaggaataaaagggcagttgtttctttcggtcaatggtttgaaaacctcccagactaaaaatcacctccatataatcagatgcttggtgtggtgtaatgaagatgaggaggtctggctttgataagagtcatttagaaggtataaaggcagtggaacaagacgggaggacccatacaccagttgattcccctcttgccacttaacagcagcgtgagcttgggcagttgcacttgttaaatgtctggaacaatacttagcacgtaatttctaaagcttaatgtttagttcacagaaggtatcccaagaatagaaatgattattatattttagcttctctctattactgattcactatgtgctgctaggcaaagtatttcacccccatttacttctatttttccatgtgtaaaatgcgagggttggattctagttgatctgtcaagtcctttccaggcctcatgttctataaattcaccactctgtgggcttactaacacctgagcctcataaaacctaatggaaagaataacacaaaaccaccataaggcagtgtcaaaaaaaattgatgcctgatttgtattaaatgtcaaaagtgaattattaatccatgccagaaataaacatatggacccaattacactctaactccaatgggcaagagtgttgtagggacaaagtgctttgcccgtagtacttcatagaatcctctagaccatgtggaaggtgagcagatgaagcagctctggccagagaagttaggaacatgtcccagtcacacaactgaaactgcaggaagtcagtcctgggattaactgcaggatctgaacactgtactctttatattgtactttaaaaacattgcttcacatggccagaaaagccaacctctgaagaagagaaaaattgttcccttcactctcagagcttcatgagcaccttggacttgccagctttcctcaagcaacccctgtaacttgttggcacaaaattaaccacaatattcagacaaagcagtacttacagggtgagtgctagtatcctatgcaactagggtagcctgagaatctaggggaaaaaaagctagaccaaacaaaagattatatataatctttccccaaatcaaggcactgagcaaggcaggcctgagagatggtgaatttctgcttctactgagagtcctccagacccccagtaaaaatttcttttcatcataaaaccagagaaactcttgctcaggaaaaagaaagaaaaatggaaatcataaagattgcacgacttaggattttgtcaaaatgtgtcagaggctataatataaggctagtttttggcattctgtcagtcaytgaatgtccttcrtcagatcacagctccttttggttgtgctgactttatacccatctggaatccactgaccattagctgaaataaaatcccagatgtgctcagatctcacatcctgtgcaatgccctcagttattgctgatacggttcagtcatctgtctctccagctaatcatacagacacagtattctaggagaagtgagaacccactcatagccaggagagcttctccctctcagtcacagggtgactgtgggcaaggtccttcccctgttggttgcctctgtctccccagttataagatggtgacaaactgaccaacttaaaatttccttaaaatgtattggcactgtggacagaaatgaggaaagtggaagacctagtttctgtcctcagggagcttaccatttggtggaaataaagttaaacaggtgaaagaattatgcaagagagcataaccaagtgtcagaagacaggaaaaacagacatctcgattgcatgtgaaggcttcaaggaatttgaggatgagttgaatgtggaaaagaagayagacagagagaggggagaggagagaaacccagggaaaggcaaaacatgagccaggtgtttaaagtgggggaataagaatggcttgattggggccaggggaggggtcwgtctgcttggataagagaattcatgaaaagaacagtgagagatgaggtcggacagattccaggcaatcaagtaacagtggcactgtccactggcagaagatccaatttttctgccccagaaactcagaagttctcatgaatcaccctctcagacagtgctagacagagttcagaagcaggccagctccaacagtgagaaagaactttggcaactttgcctgggttagagagtggcaatttaagtgaatcccaaacaagacctactgtggcaatagcaaatagattttagctcaaggaacatttcccattgactcctagaggcttcccaaaatgctgtactaagaagtcaaaccttggctcaggtatggagagtgctgtgatccattagtgatgtctgctatgggcacaatatgaaggatttgacccccatgcatcacatggacatcaccgtagtggagcagcaggctttctttgttaatgtttctgagagttgtgtgtatagtcctctgggagtttagccattctagaatctgtccagctagccatactatagactctatctccttctagaacagtaaaaaagcagtctcttgcccagagggcagaggttagtcacttgagccttttgttaggattcactcccattctgtcttcccatttacccacatgaagttagatgctgggagccagatatttcctgtgtttgaacaagggccagacttcctggcaaagggtcccttcttcccatcagtttcttcaactgcaaactgagaagacaaaagtgatgcctcacccgtggtggcgacaggaggaataactagctaatgcgaggaaagcttttgaagatgaaagggtggtatgtgcatgttaattacaacttttatcagccctggagcctctgcattctcagctgccactggaagctcttctgtgcctcccaaatgcaaacagcagccacattccatgagctggcctcactaagtcctgcttagagcatccaagtcaagaaggttggattttgagctcaggctggccagctggctcactctgggccactcaagtttcccactactcatccccaagggaaaaagtaggctagctacctgggcaggtaagataagatagaaccaaggtataaacaaaaggctccatcaaaagtctaccagaaatagcccctgggtaagattaggacactctgctctaattcccaccctgtgaaagcctaattgtttgaccttgggctattggctttatctgtctaatggttcaatatactgtgtgaaccatttggggataataatccctctgcctcccctagacctctccacctttgcctgctggtgtgaaagtgttttgtgctagtaggcagaarcacgtgatataaaactacaaggtcctattattacctaggataactttcgcctctatctatgtctcctgttgctggttgaccccaatcattgaaactgtattctttggaatgctcagcagtctcctccaagctgccattccctccttatctaggtgggcccagtattggctcaggcttcttggttgtgccacttcctaaggcttgcaaatgcattcagcctgcccttgctctcagtgccagctctcagtgcccttgctgggataactcaataaagggctagaggtgggaatgggataatcatcagatgctttgctagtgctgacgggacagcttagaaggtataaactgagctgggcccatgcagcaacaccaaaatatgtgttcaaagagggagaagaggagaaaaagagaaaggaagttatcgtggtctgataacagggcatgtcagaatgggaaagrgtgttaggaattatgtagccaacttgtttgattggaaagataaggaagcctcaagggctgcaagtgactttcccaaggtcacaaaactaattggtggcaaaaccgtggtcttctgacttgtccggtttcctttcattttatcctttgagacgataaaggagaggacactaactaaacaagaagacaatgatctgatcaggacaagaagacttggagtacaaaatgagaagaagataatagggkaatggattttttagtggcacagtgggaaatggcgtaggtgtttacactgcactggagccctcactgtgcttggaactggttccctgtgcacagtcttgcacacccatatttggtatttttttatcctttttgacttaatgagcatttggaaaccataaggcccacagcaacctgacctttgacttgcccagactctctgagcaattytgtgagttgagtcaacaatcaatggttttcaaattattcaattgttcactcaacgcatactagttgaacaccaatatctgtgctctgctaggcactggggataccactgtagacaagagaggcatagtctcctctctcctggaacttacagtctatctggaagacagacagtaaacaactaatgatgcctttgtttaattacacttgtggtaagtgctatgaagragaagcactggatcttgtgagagcataatagggagatctcatctgatttaaagcaccagggaaagcctcccaggacctgttggatgaatagcagtaaccatgtctccaggatccccacarttccttgaggacccttgttgtcagacttctcagagctgtaccagccctctcactgtctcaccattgggtcttctgagtaagaaagcaagaaaaaaaattttactcctcaaaattctgaaagcaagtggtttatcatgtctgccctgtaatagtggtgggaagaaaatcatgagaacctctaagctgactcaggattttagaagcacacatttggggagaagggaaacaaaaattctggagaagcaaaaagtgtcatatggtatagaagttattttaagctactggggaaaattcataatttacttagggatcttgagtgtcaagcattggtttagagacaaatcttatccatttcgttgaaagttccttgatcttgtggctgaagcttgggcctagggttttattagtgtacatttaggggatggtttacagggtgtctttcaaggtcatacaggtgcctcttttggggtcaggcaggaggaataggacaaactctgggatacgaatgtacaaccatttggctcctagggcctcagtcctttagctccttgcttctggtgacttcttggagacaagagtagactttttcagaacagcgagatagttgtgctgacaaaacaaaaacaaaaacatcatttaagatgccttcagatgcaagtacatgtcataatagaaatattyaaaaattagtagagtataggcactagctaattcaaatgcttggttgtaaacaactatgtcttgtaaatgagaataaagtttattctcycaatgacgatgataacatctttctcactcacttttactcaaattggctttattgggcaggagagacagagatggagttataggtatcatgattgaacttaagctacaacccatctatgcatcaaaccatcatgtgtctcgtgtgattgttatctgttgtgtatattttggtatatccctatctgtacataccagctgaatatttctgtaagtaacagaacaatcagctctcataaaatattacctcccagggcaagaagtctgggatgattccaggaagtcaatgatattatcaagactcaggtttatttttccaactttcaattctgccactcccagtgtcttcctgcaatttagcacccctcatgttcctaaactaaatcccacagttccaggcatcctaggaaaaaaaaaatcmatatttagcagcagaagaaagagtgtatattcacaaacatctcttctaaaattggaggagcggctttttgggaagtccttaattgacctctccttatttctcattggatgaatggggtcacatgcccacacctaaccaatcactggcaagaagagcttggaccacagtgcttgacttagaccaatcatgatccacccactggagctgggatttgaggtctcacctgtcctgaagcacaaattcagggtttctgaataaaattgcacttcaggtagaatagaataactttttttgcattggtaacaatgtgggctacaatgagtaagggagtccatttacctgctagagttgtggtttgagactatttgggctaaggaaagaaggcaaagctaagtttttgtgcctctgtgccacaccctcaacctttttctgaaaagacatgcctcatgggtagagctcacatgggggacacactgcagtttgaggtttagatggtctgtggcttatactcaatgataatacctaaaactttatcctttcctgtcttctacaaaagagaattatatcagggaataatcttaaatctgttataatttacaagaaatagccagtcttctgcacacttgagtactttattattagaaactcattacttgcaacccatctcagcactgttggagctacaccatgcatgaggaccgctgctctagagtcatccattaaaaaagaattcctacgaacctgaatgagcatttctttctctaaattatgagatgatgaccctcaagggaaatggccgtcttcccttttctactgcactcttagagtgcattaatgtgtgtgaagtgttttcggttccattatctaaagcagccctcatattaacatcgtggttggcattaytggcctcctgtatgggatgaaagtttaatgacttctgcaaggttatgaaaggtcaagatcacagctaattagtgcaaattcaggatttgaattctagtttctaccccagagctgatgtccatgtcaccatggacatcatttgctcccaatatacctgatttactttcaaggggtctggaattgactattggattttatattaaaaattgctctttcataggcaggaaaaagtccttcctaatagtttgagtccaaagcttaagggtctagcatctcaactttttaatgaacccaaaaatgaacaggagggttttctgagccagtcccctgcctccacacagttagctcatgaatccaacatcatgggaggaagtcttcaggattttgtttcccattccttttttatcacctaaatatagttaaaggatttgtgatgactgcatccagagatgtttaaaaatggacctgaaggatgtgattgtgtcttaggcaggaagggtgccggttcttttcagtatctaatgatgaacgatctaaaggaaatggattctaaaccatttgattctaaaccaaaatggtgtatgtttcttttgagggtgaatttcctgatcatgagccttgttgagcattagactggccggctggttcctaatccatccttcagttctcagctgcagtgacatttccttagagagacagatctcctttggggacagcacaggacttgagaaaaaaggcttccctttccactgagcttggctccaactacacctcatgtgtctgttacatttatcatgctgtgttgtcaacttgtttaatgtctgtcagtggctcatgcctgtaattcagcactttgggagcctgaggcaaaagacttactttgacagcagaggtttgcagaggttgctgggcaacatagtgagaccctgtctctacaaaaatatatttttaattggctgtgcatggtggcatgcacctgtagtcccagctgctcaggaggctgaggtgggaggagtgcttgggcccaggagtttgaggttacactgagctargattgtgctactgcactccagcctgggtgatggagccagaccctgtctctaytaaaaattargaaaagaaatagcctgtctactctattggtccataacctctatcgagacagtgaccttgtctgctttattcaatgcctggatcttttcctagcacagtgcccagcacatggagacwctgaatttggattctcctttttgaagtccccatatccacttcagtattggggtgattttgatgggattgtgacttaccatggtggatgcakcctgtgagttccaaactcaacttcttaaaaaaccttgtctatcatctatccatctatctgtctgtctgtctrtctrtctatctatctatctatctatctatctatctatctatcatcygtctgtattctatgttccatctatcatctatctgtcatatatctatctctatctattaattatctctatctttatctatttatatctatcatctatctgccatatatctatctctatctcttaattgtctctatctttatctatttatatctatcatctatctatatctatcatcttttaacctatctgtttctattggaataagagacaagtgcttgaaaagcagaggagagtcaatacacaggccacatcttctctcactccctccttcctcctcatagctgtgagccaccccagtccctgtacctgcttccttggctggcatcatctaagaaatcatctcttccacagtttcctgcaagggcatcaccccaagggaagctgaacacatgcaacatctgcccactcaggataagtgtgagggataaggaggaaacatttttcctctagagacaggactgttggggcaagggctggggaagcaagacatggatactccaggctacttcttgctggggctgaggggagtgctcggtgtggctcccctctgggacgtgtttagggcagctctctcgcctctgaaacaagcctcatcagatcatccccaggcttccttccgcatagtttctgatgatataggaaaggagcccgattatctgtttgagcttcctgttctttgtattgtttggaaggctaaagtcaacagccacttttgtattctgcattgtttgcrttgttaaaaactctggaaaactcatctggtttcttctccaaaagtagcttcccagagccctgggagacactcagaaataagatccttttcaaataggccagcagggaccagggtctctcagaaccagctttcctatcttcttccaaaggccggaattgagaaggtttactccagcccacataattgagtctctgggctgtcaaggacgcattggggagtttgcttctggtgtgctgggtgcttagaaagccgtatgaattgcagagatagagttgggttccagttctgccagtcaccaattatgtggccttaagcagtttacttaacttttctgagcctcaattttctcttctctaaaatagagttgtaatatacctatggcttagagttgtgtaaggactgacgcgatcacagacttgaaacccttgatagaacgactggcatggagtaagcattcaacagtcataattaaggtcattgtgatgattacacttggggcctctccattcaccatttgccccaactgtgttcctgctgcacttgaaaatgattccagctgcctctggaagattttcatcccatttctgggaaaaacattagccaataaaytctcattgaatttggcagggcgggcacaccagcaagctgacactatgtgcatacaggcttcctggaacaactgttgctgagcaaatgaagcagcatggaatgttccgggaagcaggattattgctgtagctggtgaaagtgaactgggaaacgcactccaggtcctgtctttacttgcacaattacagtcaatccccaaggctgcttgtctcagcaggatcagcctcttcctgccttctgtcctggcagtgggtggtggggctggaggaagaaatggtgttttcctccctctcccattgcaattgtttccttacagtgctgttctctgaggccagagaacagaagggctctttccagaggcagtttaacagagtagcttccttttcattctgagaagtttggagtttcccagagtccacttcctccctagaagcgcaagcttggaatttcttggttgccaatgaggtgccagcttctgagtgcataaagtgtgtccatcgtttttaatcaattctctcatctccaaaaatacctttaattgcctttagctgcttagttctgctgtcctctaaagaaaacaagatctggccactcccagccacacctcagaagtgagtaaggcttttgcaccttttaataggagtatttacatgtgtgtcggtttctcatctgcttttaatttcattagagtgtgattttggactgttgtttgagatgaaagagcagattatcaaagtgcagatgattttttcatggtgcaaacacatcataaattagaaactatgagacccctttgcagcggggaagactggggccagtcatccaaggtttcatcttcctgtaggagaagggaaaaaaaacggacatttattaactatctgttatgatccagactctctactggtgctttttgtatatttattctctaactcccatcaacttctctttgagagaggcagcaaatgacaactgaataaatgaatggctgaatttcatcagagccagtttacaggcagagaaactgaggctcataaagcggacgtaacctgcctgagatgtctcagcttttatatggtggggctggaattcaattcagagctccttctcccttttaacactacactgcaagttcccattcagcttcatgggattaatcctgttcttctgtccctagaatggagccttgaaagttcaaggtgtctccttttcctaagaaactggatttttctggctccttgagaattgaggagctcaaaacaattgagaactcttgggaggcatcttcaggaaaggaggtggtggaaactttcctctcctcactctccccaggggcaatggggcctccaaggccaycaaagatcaaggtgccaggtgggggatgcctcccagcttcccattcatttttcagttgggggccastcagcagctcctcaggtgaggattgtctcagaactgaagaatggttcaaattggcccaagatgctgaaatttattgcagggatcactgggacagtgtgtagcaatttaggaggcttctctctaagggaatcagtagctgctgcatttctcttaattgaaaccactctttccctccagcttcgatggggcaggttctcatatctgcgtgctgaaaggcgtttatttggtgtattctgagagcaggatgctggtaacactttcttttgtgttttgccaattgtttctttttactggctagtccaccctgtctgacgcattcattataccataaccaccttgacaccagagtgaaatgccatttctctgcaggtaggagagagtcacacggattccttgagtgtttgtagcgtaagtgagaaagatatgtagccttcttctagaggcagagggatgggttggctgggacttagagatattcaaatccaactctgttcttgtctgataaagtaaacgaggcctctgaaggtaaagtgacttctgtaagtactcacagcttatcagtaagaagcctgatattaaaactccaggtcactagaccttcaacctaatgttcttcccactaaaccaagttaacatttattgtacaccatactaaatggcagacactggggacacaaagatgaataaggcatggtcccagtggaacccactttggttatatgggttaggacacttgaggcaggatcctccttagaatggtgttttataaagtctctctttctctttctctctctctcatctctctccaatctatcctctctatcaagagagaacacatgtaatgtagagtgagagcccatgtattggataattaggcttctggctcctaattatcaggaagcctggaggtcttgagtggttgtaaccaaggatactgaaagtggttgaccagttaataaagaattaagttagagtaagagrcactttacttttaagctgcctttaatacactttaatctttgagatgattggctaatatctgttaagtaccaggctctttgcagagagtcaggtcctttgctaaatgatttaggtatatttcttcatctaatactcaaaaagcaccccataaggaaggcattacttttattttactgatgaagagactgaggcttaaaggttaagaaaacatagcatgcataacatcccacaagagctcaagccaggacttggacccaagtctttcttggatctttccgatccaagccatatggttactgcaatctcacaatacaatgagggtaaatccttgcaatcaccagttaccagcaattgtgaarcaatggatggcatagatgtcagggggtcaggagagccttgcaagcrttcagagggcttgggagtggacacatcacagttgcactctgctgggcagcgctgtaagtctctgattggattttgccttgaattttttctggtcaagactcagaaaggatggatgtagcttcacttacaccaattctacccagcttgtgacccaaatggaactcttatcccttaagccaggtcattcagttgttgtagcctttgccttccaagtttcccttgtctaccctactgagtctgaattctaaggacatcttcttatggactgtgggaggcaaagatgaattccaaatcttatttaatctgtgtgctgggggggaagaggagtgtatttccttttgccaggtatctgagcctacaaaaagccccataaataagtaaaatgtgtccatgagttcataaaagagtgagccttagacatacagaccacctgtcaaaagagccctgtcattctctattatattatcctcttttattttctgtgtaacactatgagtatctgaaattaccgkattcatgtattaatcatttacctgtatactatatcctcactctagaggtaagctctttgagggcacagatcgtgtctgactccccagcccccaagattgtatctggcttgtatcaaccatatcatagggaaggtgctgtgaattgacaccttgcaccatgctttatggaaactaatggtgctttaagaggcacagatttcatagaaagagacccagttgttcccaccctgatggttctaggtctaggtctaggtcaccaaygtctatggtgaaagaatgggcttttgcgaggtatggtctcctgtcatgtatgagggtcatttatttaagggaaaaccaagaccttattttctttgacaactgcacacaagggtcatttgtaatgtccttcatttccaagcctctggatctttgcatggatcatgctccttaaaagaaggaagttatgtttggcctgcttcagctaagcatggaatggtaaagattttggtccaaaccctgtgacttgagttggatttaaaagcttgtcagaaatgagttctctggagcttggcatttgagactggcatccgttgttccagatgagatttcacggattgaaagctcaggaagaggtgtgaattacaagcaattagttcacagggcagttggaactgtagtaatcctggaaaccttttggcccacattttaaaaatatccccacaatccagcttctccctctgtagggcttctgcttgggaaagtttgtgtaactccccaaaacatctgaagagtgaatagcagtagkgttcttggactgcgaaggagaccctgcttcttatgtgcatgctcttgtgcacacagacagaaacacacacatacatgcacacacacacagacatgtacacccatgttcgctttagcatctgatagaaaaagaggaacatgaggaaagacagagattgagtcaycaacatgtgacctggtgatttctgwgtcctctgactttgaaatcagtggaaatttagagctctactttgtcacttgtaatgctttgttgttgcaaataaatatttttgcagctgcatcacttcattgctaatatatttgaagaaggcaagataacctaaaggcatgaatcttgttctgttttaatccacctgtaagtcagtgktggttgtaaggtaaattgtaagtaagagctattggccaccaagtgccaagggttatgaatgatttacctttttttttttttctaaactgaagsaaactcatggttgttcctagaaaaacatgcacactcacttgcttgcattcggataagcttctttgagtaacagggaagaggccactaggattacaaggcagttagtgcccattggagtgtgactggcattgtgcaccctgtgaatcatagtggtggtatggggaaaggggtaaaaaagcatcaatctatggagtatgcgaaccagatggcatctgtcctgggaagaacaaatrtccttcataggagaattagaggactatactagtcaggcagaaatccagtccattcatcaagcttttcctcttgctgtggtccctacagggtcagccctgtttaggctcaagcctcttaaatcccagtgcaagaccaatttctctatgaaattctccctgtcttctttggtctcatggctacttcctgggaggaaaaagtagtaatcagctccctccccccagctaaatgtgcatggtrttagcaaattctaacccaagatgttaaaactatctgagaagaggcatgattctgcttcttgtctgtaccctcctaaagtcaaggtgcagcaaggagagagacatttgcatgtggcccctgagaaagaagagatttgtctgcctcaccccctgctggtgcaaacttgcacctctctcagcctcagttttcttatrtgtatcaagtttcaatgatcgcaatagtacttatctcatgtgactactgtgggattgaaacgagatagttcatgtgaagtaccgagcacagagcctggcacasagtaggtactctattagtgttaatatcactggaaaacccagctgggggctcagcagtagaagctgccagagccttagtgttacagccacatccattaccccaccattcacatacatttcatgccccagggtgagaatccacatatcccaagcagagaggcacagctttggtaaactgagtcttagctaactcatgtcagaaaccaagtgttatcctggggtttgactcctggctcttgccacattcatagcaggatgctgagtggattgtactcagcctcacttgttgcatctgtgaaatgggggtgattttttgacttctcaaggtatagcatctattaaggcacatagactacaatctgacacaaattagcagctccatacattgcagaatcttttctttttcacttaaggagatgctaaaagaggcaagaggaaagaaaatcaaatttggagatgccgtgggctgtgtgttgaagttgggctctggtggaattggtggtgaccttttgcttctctccatctggatggctgtatcttcaaagacaacaagtcttaactgcagtttttgattgtataaatctggccaagtccactatttacccagcccagtctccttagagtaggattggaaactcaaactttgctatctcctctgcagagtgagcaagggacaatctttatgaaaaactttaagttgcaagatatttgtgttcttaataatgaagggaagaatacaaaaatgataatactaagcctggctcatggatagcatttttgcacaatatatttcatttgggctgcagcctttgagctgtactaattgctctgagcatctgtttgtatgtccgttgcatgggatgatttaccctcctaggtttccaaatgctttggagcccctggtttattgcaggacttactaagtggtggccatcgtcactttgattggcccctaccacagtattttccagacttttccaccaaggctcttagggctttgtggtgggtgccagaacaattgatggggtagggtgggtgctggaagagaatgagcatctggtagattgagtctctgggtctgcccttccaccctcactccagcccccattagctcagcttgattttcaaccacttgaaatactgtggttgtgcctaagacatcatgtcagggagagaaagaaacatctgaaaaccatcaatcttctctctgaatgcttccactggtcccatttgcctgttgacaacccaagttgaaaaggcagcaccagaggggaatggggaaaattagcagaactggaaaatctgagttgagatctgggtttaccaaactctccgtaagactttgagtctgtgaaacttatgtccattagtttcttcaccttttaaatgggtctgtagtacctaccctctgggcctcacaggctgcttttgggtgtgaaagtgctttataattggtgaaggaaactgctacgtggcaagaatagcaaagcctgatgtactttaatccattcggttctgctgagggtggagccccaatgtgtcttaattcatatgaggtttctgagaagctttttgagattttaatactgtcccaggtatgcacatcaaccttctcacttttatcccccaagctccaaaatttcataactttttatttcatcttgggtggcaggaaggcaaggtgtgcctgggggagctacagggagttattcaaggtcacataattagcttataattaacagagtttaggctagaacyagtgcatcccactcccagatgggggcccccggcttatctcagcatgtcagcaacccawgaatcagccctgaaatatagatattacctatgagtaacagtttctcatcctacctcaactgttacgaaagtcttccctcaaactaaagctaagcagttccacaaaatgccagctatagacattagcagaaactgtatattgattaggtgatgtatcagtcaytgtaactacccagaaaaaaaaatacaatgacaaaaccaagtggcccaaccttattttctacttgcaagaggaaaaaccctatttgggccccaagatgcttttttcatttcatttaccacatcctgggtttgtgctagtcaatctgctaaatcaataagatccgaaaaagcagaaaacaaagatcgtgaggccagaggatttcctgatcaccatggcaacacacaggggtgggtactgtggtttctctgcctgaagacgcactcgtcaaagactacttggtgttacagaattctggtgcagtgaagcaacagttctgggacatatactttcttttgccagaaagactctgttggatccaggaccaggagtggggggttaaacagttctccataccctcacctccaagtccccatcatcccattaggagacagggacagtactgttctccaaactctcaaaacaacccaagagctttctaggctgtgcattgggttgatcatttggtggccttggctgaagggccagggtaacagctaggagaacccttgggattcttctccaatgtgacaggcccctccatgttggttcagcgttgactgccatgacaggctccaggctccacrgaaaaaaggcagagaaatcagggggtccagccaggcgccaagacgttggggtgccttgcatttctaagtgccaagtgatgaatagctcagttgaaagyaacccagggcacattctggaggaaattctctgggtatgattgtgcatgactgttttctctgctcattaaaccctcatctgcctccagggcaattccgggagagactgagtcactcaagactcatggtctgcactgggcagccaaaggcgattcggccaccaagtgtgattctggcctcattcagaagtggatgctaaacaatacaccctttcaccagsagcccatcacatgggcatcaggagatgggggcgagtgatgtgccagccttctagactggcaggcctggggggcagcagagggcacaatagctagaaagactcccagatgaaaacttctgggctttgaagccttcgaacaaatgaagaagaaaatgacttcttcgtgtcctattaagacagtgagttgtggcttttttgagagcagcttgctcagacctcttatgaaagatagatcagtagcaasagcactggtgtaggagtcagaaatctgcaattatgaaccactgagttttgtgtgtgtgtgtgtgtgtttttgtttttgttttttgtttgttttgttttgttttttaacttgctggaggaccatactcggctatccttgattttattttctcctgtgtcacaagagaaattggttagaagcttcccattgtgcctcctggctttaaaaatagataatccaattaacaataatgctttaaaacaacaaaaccttgtccttttcccttcctacttctgatcagaaccagctcagtaagatttattagttgtgcaatctgttttggacwtgagctcagcaaatcagaggacagaaatagaatcctggctttttaatgataaacactgtaaaaataaaaaatttggagagcttaccagtgcttctggctgcccaagtggtttgtgtgtggttgactcccaggagctcaatcactttgggtgcagtccacccagagagcyatgttccagctacatcaacctggagccttagcttggtcagtctagatttttgggtttggctgcagacatctcgtaatgtcacaaggacagcctgtgtccttggtgacccaaccctgggccaaccccaagtcctggagtcctctcctaagagccctgcctaattgtagagagagcattcaggctgtaaagggcaggaggcctgggggctacgactaggtttgggctttctaaattcccaagagtatgatgggaagaccaacaggcagaatcagagagaagcagtcagcccactgctggggaaagccagtcaaggtcaagacttcagaatctcctctctggagagagagtgaaaattccattagtgaagtttgttccactgaagccttaccaggccttggtaaaggcccctatcttgtggtccagaatcaagggacttctgatcttaaaataatattcaataagctcaaattcttctctctagggctctcttttcatgatcacctctccacactttattaaaaaatcacatgaagggtaagtgggcttcctgtcatttcagtgtctgacctgtgcataagttggaatttaacactggaaaatgatcagccagattgcccagtctgaaacccaggtcccccagtgactagcacaagttacttacatcttctcaatgaatcagttacctcttgtgtaaaatggggataataaaaatgcctgccacacaggattgttaggaaaattaagtgaaatattaggtgtaaagtgctgaataccttgaacccagactaggcactcagtgagtgctcactgtggttatggaccaggagctgcaggaattagaacaccattgagtagcaggaactggctttattctcatcttcatgataaagcaacttctccttacatatagcttaatctggaaccaaaaatctaattctgcctcatccctcctgaggagatgacaaatagggatcaggcacacctgggtggctcaagttagaaaacaaattaactcattttgcagaatctggagacgtctggtckggagaactgayagtgccctctctttgggcatagyatgactgtaggttgtctttgggtggtcttcatatggaatgtactgtgtttgccatgttccctaggagatctggcctcagaaatggccctgtgatggtatgtgaacatactgtcctgtaactgagatgatagcttgcacattcagacagacaaagccagttacaaaactaaaagttggtctctgaaacatttgctttcggggaaaacagcaaatgttcacagaagcaaagttctgggttaaagacattttaagtatccaataaggaattctcagcaaacaccagctggtgattcctcagatatgatgtgggaaaggaacctgataggtgatctttttgcaccctataagactgcagcctgtcgggggttgggggcagaaagagagcatttattaattcattatttcattcaacatttgcctaccatgggaggctgtactaggtactgggaatataattgtgaagaagggagacaccatttctgttgtcaacgaagcccacagagaagttccaaaatttcagaatgctggaatttctggttactagagaccttgaagataataatttcttgtaattctttacctggttgtgtcacagactttgaaaaccaatgaaaaccagagatgttgccctacctaaacacacacacacacacacacacacacacatccatacacacaatcttgcatataatctcacaggtccatggatgtattgaccagctcctggattccatattgaaaatcccttgcagcccagctccaatactagtaccaggccactcacctctcaggaaagtttgggaagacgtagataatggcaacttgggtgaaaattacacagtgctctcttcccagcacatgttgtgattttctacaacttcagaaataactggggtggaccaagaagctattattcctcgcaggccctacaatctaggcaaagctttgaaatgtgctcggacaattttatcagagatctattttccttgatctgaggcttagggggcagtatagatgagattaatggcatttgggatcagtgatggtttatccaggagagaatgcatagtacctgtaaccaggagcctgaataggaggcaacatagcatagaggttagaatsctgactttcccacttggatgacattgggcaaaggacttcaccactttgtgcctcagtttcctcatctctaaaatgggtttagcaatagtgcctacctcatagcatttttatgagaattaaattagctgaagtacataaggcacctaataagtgtgcaatgctcattggctctgattattaagtgtcaaacaccatatcaagtgtttgacataccttatttcatgtaatagtcccataaaccctgacaggttcgcattgtcatcccatcaaggaagaggtggagagtcagagaggttaagtaattaacaacctgtgtcacctaaagtgagtggcaggktcaggaattgaaccaggtttgaggaggtcctaactaggttgaactactgaccttmataaaagtttggcactacagaccagctttataggacaaaaaaaccttctttcagagctcctttttctcgccttcctgacagctccctagcagacctcttcccatgygggtagggagataaggttcctagacactgggacactggtctccatgacccctctgtgctgcccacagccctatagtaatgagcgtgctaaaggcctggtggcatttctaccacgggaagtctcctctccaaatccaaaagtggcctcaaacagtcagtgttttcagttgarctcatttatcgctcagagggaggcacttgggacattttattcattacatgatgcaggagatttattggagaccagagggctcaacggaaaacattcttgrtttatttccagccagaaaggcttgtttgagagatgcaatcagccatttagtattagcttcttgartcaaagtggatcctgaatcacagagttctctgtttctcaggagagacacacagacatctgaggagtcttgcctctctatagtggtttgcagcatggctagcaccattgccagagacactggcactctgtcaagcaatgttctgtggtccatggctattcacatcttaaccttgccttaattctacttcattgtgagtttgggcatgtttctttatttcttcccctctctgtgtgttagtttctccatctggaaaatgaggatactaatattacccacctcataggaatgttttaaggataaaatgagtaaataattctaaagtgcctaaaatagagcctggcatatacayaatgaatgcacaataaatattagccactgctcttgctgttggcattattaatatcctcccgggtaataatttgggtttgcgttagtatcaaggaaacctgatgaaatgtcttcataaattatcagggtttgaatgacacacagccttgaaaatgttggctccttttaagtcaagagggacctagagtagaaggattgtgaacattcacaggatagttgaccagaaatgaagtatttgacaccattcttgcaactcctaagtagctaaatagcgtcagggttaggagttggactttctcatgagatcaagataaatgtaagctgtggaatttttactttgcataggatttcttcatccaatcagcagccctttgcagatacctacaatgtgtcagaacctgcttaagccttcacatctaggaaggctaaaggttgagtttgtctgtttcatcctgtcttggctgatcacatgcacatacaaccacacactcacttgcatacamacatataagtatgaggagaattcaaaatgttcatggaaaaatgagattaaaagataaaagtttaaagatgtaaactttacttctcaacataagcaccatcacattcaagatactgttataagctatgatagcggccatttagtccatccctaaagaactgagggtcctgggaatttaatcacatcaatgcaatctttcttacwttgttaactaaagaaaaatgggtgccctttgaagatttttaaagattaagtaacaaaaaaaaaaaagtcagaaggagtcaaatttggactataaggtggatgcctaatggcttctccatagaaattctcaaaaaaattgcctttgtttgatgagaataatgagcaggagcattgtcatgtcatgatggaggaagactctctggtgaagcttttcgatacattttttcttcaaaagcttgggctacctttctgaaaacactctcataattagcagatgttatcgttctttgaccttccagaaagttaacaaacaaaatgccttgagcatctcagacaacggctgccatgaccttggctctacactggtccacctgctttgactkgtccacttttgctttgactggaccacttccacctcttggtagctattcctttgattgtgctttgtcttcaggatcacacacataaggccatgtttcatctcctgttataattctcaaagaaatgcttcaggatcttgatcccacttgtttaaaatttccattgaaagctcagctcttggttgcagctgatctgggcacaatggttttggcaaccactgagtggaaagtttgctcaactttaatttttcagtcagatttgtgtaagctgaaccagttgagatgtctatgatgctggccattgtttctgctgttaatcattggtcctcttcatttaagtcacaaataagattaatttttttctcccaaattgatgtggatggcatatcgctgcaggcttcatcttcaacatcatcttgtcccttcttcaaacaagttatctgtttgtaagctgctgatttctttgggacattgtcctgatgaacttttcataaagcatcaatgattttttcattcttccacctaagcttcaccaaaaattttggtgtgtgttcttgcttcaattttagcagaattcatgttgctctgagagaggatcttttcaaacatgtcttatccttgttagtgcctcaaactagatcctgttcagatatatcaagttagtgagagtttattttggtgcaaaaaaaaaaatttgaaatctatgtatagttttttcatagcacgtatttttcatggaacttttggaagacccgtcatatagacacactcacacaatggatgcatgtattgtcagtgaagttatgttggcttctgaaactcaagggattttgctgaaactcatgaaactcaagggattttactgaaaagtctcagcctcaattggttcctcttacatttgcatattctgtctgccaggtggcaaggtagaattgactgtaataagaaagaaactaccattgagctccaattattgtccatgcctcagagttgatttttaacctgagagtgacagcagccacctgggccaggggcagacaggtagtttgcctcacctggaatcagaggctcccctatcagccttatcttcaagaagctgataggaatgctttgtttttcttttgtgtgctggacaaggagaggccccggaaggtctgtcatgtagattgacagtttccttttgtaagactggccaactgaggccaaagttgaaaatgtcagtaaaaacaaatagtattgcaaaagggccttatgcatttccttctctatcctctcattgccccatcagccgagtgctgcatgagtggcttaagagaacaccattaggcttgaaaaagagtgaactgcaaaaacacattttctccatttcacctagttgttattttccccccatgtgctaatgatgcaaacaaaagaaaataaaaataatagacattggcttaygtcttttcaagttccatttcttgtttcttcttttactattttcagaatcaaggaagataatacagaattttaacagttttcttacctcattttgcatttgttagacattgtttcctcgtggttgagacctgcttcctgctcaggaaagagaaagcagtggttgcccatacaattcaataataatgactctttgtcattatttaacagttgtttaggtgtgcctctctcctttcttcagttgcactaatgatagaaaaggatccttgggcacatagtaaagtggttcaaatcatgggtttgggtggtaaacaggtctgagatagatttcctgctctgccacttaagagctgggtgacgttggggagtcatttaatttttctgagcttcacccataaataatacatacatacataaaactcacctttcaggtttctgaagatgatgcaacacagaatctcaaaggtactgggtacccagggacactgcagtaataggtcccctctcctattgctgtcagctcagaaatacagaacagagcaactgggattcagaaaggagactataggctctagatagaggtactcactcacttccttgggcaactcacttccctgagcctcaactttcttgttggtaaataagtggaatcttcctacccaccactagaactgtgcaaggaagagatggagctggttaatgccagttctgtctgattccagacctggttcttaactaacaacaaggagtggtgcctggccaggcacttggggcattgtcccaagaggatgtcaacatgtcttcttagagaaggacagtcattgaggcctgaggaagtgttcaggaggaataagcttcaccaggatagtttcaatgacttaaccctttgcatgcagtttcctcaagtgtaaaccgggggtcatatagtcccaggagttttcaattacagcctttgaagtcttttgagattgttacacaggatcaagtagaagaggatgatttctagctctctattggaatttcagattaatgtctacaaaactcactaaagtccttgtattgaataattctttacccaactgatagcagttaggcttcattttcaatgccattaactctgagagcaaacgacaggcttttggtctgccaatatattaaaagtgtgtttctgaggaaatttcaatgagtcattcgtttatataacaaatacttgttgagcatctactttctattgggtactgttatagggattagagataacagctgcaagcaagtaaaaggcccttgctttctcagagctttcattccaggaaggagagaaagagagtaaccacacacatcaatagatgaccaggctgttgtgaagacacaaaagccaaatgagttgagggagagactgggggttagacaagggtgtttagggaagcactctaaagtgaggtgacgtggagttaaaattctgaatgataaaaaaaatgaaccacctatgtgaccatttgaggatggaacattccagacagagaggaaggcagatacaaatattctaggatgggaaggagctcagaatgtctgagagaattgaagacaagctttgtgcttagagcagagcaagctactttgaggttagagagggagccaggagccagattatgttggttttagccataataagaacatttatactgggtatgaacataaactcttggaggttgtaagccagggagagatcacttgattgtgaaaaaatgctcataacataagattaagtggaaaaatgactcttaaatctagaactgtatattcagtaccatttcaattatgcaagcatatgtgtgagtatgtatatttgtgtgtatgtgtgtatgtgtatatagatacatactttatgtatatatgcataaagtacgtgtgtgcatgtgtgcacgtgtgaatgtgtgtattcagtaaacaaactggaagaagatatagaaaagtgtttgctgtagtttttgtagtggtggacttattttccttcattgctttcctgtgttttgtaagttttctgtaagtttgtatgacatcaataatcaaaattaaatcatttgctttttaaaaactttgttgcagagcaatcaatggagagaatgtaagagtgatattattttaccatgtcttttctcagatttgagcttaatatcatggtgctttggaatgctggagtgaattttgaaggctctggctagcagagaagtttatttggctttttgtttgtttgttctttttttttttttttttttgagatagagtctcgctctgtcacccaggctggagtgtagtggcatgatctcggctcactgtaacctctgcctcctggttcaagtgattcttctgcctcagcctcccaagtagctgggactacaggcatgtgccaccacacctgactaatttttgtatttttttttttttttttttttgaaacggagtcttgctctgtcgcccaggctggagtgcagtggcgcgatctcagctcactgtaagctccgcctcccaggttcatgccattctcctgcctcagcctccggagcagctgggactacaggcgcccgccaccacgcccagctaattttttatatttttagtagagacggggtttcaccgtgttagccaggatggtctcgatctcctgaccttgtgatccgcccgcctcggcctcccaaagtgctgggattacaggcttgagccaccgcgcccggcctaatttttgtatttttagtagagacggggtttcgccatgttaaccaggctggtcttgagctcctgacctcaggtgatccacccacctcggcctcccaaagtgctgggattgtaggcatgagccaccgcgcccggccttatttgrctttttaaggagtctgtcctaaactgaacttattactgtctccaaattatttatgcaaaagaatctaacatttctrtttcttcccatagatttgaatataacctgccgctttgcaggtgtattccacgtggagaaaaatggtcgctacagcatctctcggacggaggccgctgacctctgcaaggctttcaatagcaccttgcccacaatggcccagatggagaaagctctgagcatcggatttgagacctgcaggtaagagaccagcacccgaccactggggaaagctggcggcctgggaccaggcagctgggcttagaactggaaggctcctttcccacagctgaatggattattgcctaaggagtcaaccccacgtattaatttggccaagtcaatctgcaayctgtatgacaactggagtttaaagtcagctaaagacacctttgtgaatcatagagcgggaacccagaggaagccattaggggtcctctcggctggaatcctcttgtctaacctgcttccacagagctctcctggctttgaagaagctgcagtatcattgtcagaaccacaagaaaacataaaccaaataacagtgtttgaaataaatatgtggctgttagagtcttggccctgcagacttggatcaaagcagacttttcaaactactctctcttactctctcttaaaaaaaattttttttggtttctcttctatgtttctctggtttgaaaaagtaaataaaaaggcatgaaagttattaagctatattatattaagatatattatttttgggagccctgagagggctcctacyagttattctagagctgcatagagccttcctcaaactatggctccaagcaagataawcacaacaagcaaggactttattttttgaatttccaatggccttgcggtaagcggtgcacaagaagagcaagccacggtggcaatcacagtgaattgttgtggttcgatttgttttcactagaagaggactgagtaacctctgcaactgctctgaagtttctaccccagcctgtagctgtgcttttgcagtgtctttaggtaatatgattcccctttctctgcaacacacactcacatgcacacagactgcttttgaaaagtcaagctgcagaactctacggaaaccatgaagtgtaagttaagtgcttctatcctccaacactggttacagtcatgcacccacattatgagtgatggctgagactcttgctgaaagggaaaaggaaagtcttttgcctaaaattgccctgtctgatatggtagccactaaccacatgtggtgacttacacttaaactaattaaaatactaaaattaaaactttagttcttcactagcactaactacattttaagtgctcggttagtcaccgatggccagtggctactgtactggatgacccaggttagagaacatttccatcattgcagaaagttctattgaggagcactgctctaaaataaagagcagatgtacatagacatctgtatgtgttcagagctaggtctgggggaatatgaaaggagcagagagagggagaaagctctggtggctactgaacttgcactgtaggatgcaatgaaaaaaggccatttagcaaatccattattctattcccaaggctaattgtttaattatggccctgactaggccactggcctaagaaagtgaatttagtaagctgaactttgattgtgaaatacaaacaaggcatacttgcaaaatatagatatgctgccatgtgctgaggaccaggggagttcttacaactgccactggccaatcatcaagcacttagatgctgggagccctrctgcccacctggccaaacccctcacttaatcctcaaactgcagtattggtcaatattatcacctcattttatggatgaagcagccgaggcttagcgaatttgcacacacagcctgcctatggaggagttaggattctggttctgcttagcctcagcccaggacaggattttaatgaccaagtcctcctcaggggcttaaaaggggaggaaagtatgcttcctggatttgctgaatattctttcctccttgtgaacagtaacttactcatgccacatacacacatataaactttaatatccccaatttacagttagcatgacccataaaaccggtaggcaacatgaggtggcaaaaactcagtaatagcttacaaagagaatgcaatagattctagaatgttggtgttatccatacttgatgacatgatgtgatgggggtgagttggygggtaggttcaccaagaagtattatttagaaaaactgtgccaaagaaatctatcatttcacccataactggtattaagtattgcaaaactcatttccataatttctctcaggtagctatgaatcagctttctgccacaggacagatggcagagtctcatgggttaggataaaaccttagcagctactctcttttgtctgccccaccctgattggtagcaactcttagatatatgaaaactyattaccatttaattgtgcccacaccccctgccaagctaaggaggctttggggaaaccagtttgtctgttcagatgagaaattagtcatgcgagctacaattgccacataggtaggagttctgtgtgcttggaaacttcagactcacagacatttccatgggtcgtgcagggtgatgcactccatgctgttgcccctggcaggaaagatgaaaagcatcaatgtgcattttagccagaattgcattttgaaaaacctgctggatttagcttcctcctctctgccctcctgctgcaccacagcttcccttgcacatggcattttctcagcccacatctcattttttgagrcatttwatattcaaaaaaaattgtgtttttagcacaattaaaaaataagcaagtttttagccaccaggatgctgctagaagaggctgggctgtgtatgttgtatctgtatgtcgtatccagctgtaacacactcccagagataccttggtggggagagaggggctatgcatttctctggctgtgctacttctggaaagttcctgagctacatgagccgttgctatctgcttacttaattgctatgactcccattgtaatgatggttaatttattcccactggcaatagaattatgcctgcaatgctcaggaggcagtgtgctgtgctgtgtacttggcatataaacaaggcttcatgtttagggcaatggagtatggagtaaggggactcacaggaaaagttgtggctgagaaagaagtgggggaatgggacatgaggcaggtctggaatgtgtgcactgaaataaagaagcaccccttcctatctatggaagctggccattttgtgtattttctggaaaacatgaaggtattccagagccagcatgaatcttacatcaaaacttctctcttctgtgactcaggcttccttctgtttgttcaaatagactcaacactgctgaacacaaattttaactgaaactaattattcctttcatgatttttttttaaagctctttataggtctctaaataaaatcactttgtttctatcagtcttgttgatctctttccctctctatgctgttatttttggatttcaaataactcggttgttgaaacctccgatatccctaggggtgaactgaatgaagtgttgcacggcattaaatgtcattgaatgggatattatgaaattcccatcttagccatttaggtcaatatcctgttgtttytctcttacaggtatgggttcatagaagggcaygtggtgattccccggatccaccccaactccatctgtgcagcaaacaacacaggggtgtacatcctcacatmcaacacctcccagtatgacacatattgcttcaatgcttcaggttggtyctcaggggggtgtctgttggygtgaaaggctgtgggagcctggtctttggagctcagcttaagtggggattcatgtagcctccatttacataacaaatgctcactgaatatctgtacagcagagccaacattcctgtctccatggagcttacatgctaaattggggaggcaaacaataaacaaataaatattaaataccattcaggactgtccaatcttttggcttccctaggtcacattgggagaagaattgtcttgggccccacataaattacactaaaactaagagtagctgataagctaaaacacaaacaaaaatcacacaaaaaaaatctcataatgttttaagaaagtttacgggtttgtgttggaccacattcaaagtcatcctggaccacacaaggcctgtgagccgcaggttggacaagcttgccctatatgaagtctgaaagtgataaaagtkctataaaaaagaaagcaaaatacgaggctaatgagtgctagggatgcttttattttctgagaaggtggtcagggaaagtgcctcctggactgttctgagaatatcagtgctcagaagggagaatgccaaggaataaagtcagagagctaagcaagggccagctaacggggtgattcattctcagtgtgatgggaagtcattacaggttttgaataagggagtgacatgaatctaatgatagctttggggtgtaagtcaaatgtcttagctgagaggtatttattatatgagagggctggaaaaaagccttggagagtatatggtatgcctttgaccttcttaaatatcccttacccaacagttgaaagaaccagagaagaagaaacctaagttaagatgtagatgctaggacacaggccagcctttctctatgtctttgtgactttctcccaaccattaacctagaaaatcaggcttatgagccttattcaagtcctagcaaaattaaagaattctatgcatcatgaattttcagaattttttgagaaggatcaaaatataaatgtcaaatatctcgatgccaactatcaaaagtcttacctcttaaactgggccttctgttcccatggaaggtttgaagttgggtgaagggaaagatgaagccttgaggtaaacttggtacatcttgctggagtgtcagttttccctaaagatgtgaaggggatgttaaattagctggaaagggacttaagacattatcagcctgagacaaacacagatatatacatatacatatatatatatttatatatatatttatttatatatatttataaatatttatttatatttatatatttatattcatttatataaatttatatttatatatttatatttatttatataaatttatatataaattatatttatatatttaaatatatattataaatatataaaaattatatttatatataaatttatatatatatattatatataattctatatataatataatatataatatatattatatattatattatatataaattatatataatatatataaattttatatatataaatattatatattatatataaatttatatttatatatatgtatatatgtatatataaatatatacacatttatatatataaaatcaagatatcacagatatatataccatatacatcaaatataaatatacatataccatatatatggtagtaaaatataaaaagctgcatggatttttaaactataaaaaggacatcaacttaattatgagatctttcttctactcactactaaaaaaaacccaaaaattaaaattaattgtgagattacatcagtggctttagtctacaccacctaccctttgttgtgtgaacagtagggatcagagtggaaattcagagaagaaatctagagtttaggacaaagtatcagggctggctagttgaaatggagtgcgtgaagccagtagattttgacaaaaatttacaggtcactgaatctatcgagagacatacgaaacaggaacagaaaactgtagaatgtttactcctccctgttatatgagtgaagaacacaaatggagtttgactaaagggaagggagtccaattaacactaagtagtacacgactcatacatactcagttcccatacccatgtctagcatgtcgttctaatgatattataatgagaaaaccacatataaaaaagtaagaaatagacatagagcaacatgtggtctagctagctccatctcagtgcaacaggtcagagggagacattgggaaaagcttgtgctttagatgaagaggttgactcattgggaaagggctggcatgaggctatacactcctgagtctctgggcactgcttattgcatctcccattgagtcttgctgagtgaatgtatgcaataaattatgtagttgcatacccacattgtcttacctgttttgcaagttggtttcacttgctaaaaggaacctcaactcagatagaagctcacactgttttattgcctggcatcgaagccatctaggcaggctgcgactgagacttgtttctatccttaattttgttcatgaggttgggcccatacctggagttgggagcaagagcattgattaattttcttctctttggagggttagttcagttgaaaagcttgagaagtacagggggtatgttccttactaaaatggatgaattaaataataaagctagaagtaatatttttccttttgtctattttccaaattgactcgatattgatggctacttttgtaagtttttatttaagtttaaagggaatatttattgatcacctctatgtgctcagtactgcactaggcagagatggagtaagaaagaactggaggctacatttcttgtcttaaaggagttaacaatcttgttgaagcaatgagacaaaaaaaaaaaaaagaaagaaactggagaagaggataaatgtgtttaaggataaataaattctgaatgtcttggattagagtcagatgataggggtattaagtgagctaaagattttgataaactgccctatgcaaagatttcattgcaaggatccctgaatctaatttagcctgaaagctgctagcaggtggtcatgtcccagtgctgtgatcccccccataaaacggctacagggataaaagtcagcttgatcttagtagatagcttccataagcttaagttttagcagtatttttagaaaacatggcctgtggctaacaaatgaaaataaggcagaacttgaaaaggcctttgtgattttttttccctcattttcagtggttgaggcccaacgtgagcctggtgacttctgtgtgaacacagaactgacttgaattgattcatttattaagcttgctttcagtcaagtgcctcattttcttttgagggtagaattaaagggaagattctacatgtacttgtttatccatttcctcctttattcaacaactatttgagaatatttatgagatacctaaaatgtatcaagcattgaagagggtgcctttctatctggcaaccagagattagtggttagactgaataattaatgtttctcttggttattttggtgtgttgaagccaaggtttatgagaaagcccacctcagagaatttctaacaagtcctcagattcaggaacacctcaccaggtctagctttccaagcagtacagagctcattaaatggaaagaaaggctatctaataaggccctggaatccgacatgagagcatgagtctgttaattgcacatttgggtcaatccactaagcatatttgccagatttgatgttctttataaaagttaaggtgaattggagcatgaagggggtccatgtgaacaaatgctctaataatttacaaaactgtcttagggtttgtgacatcatgctccattctattacaacttgctgcctggaaattcccagtgtactgttacttgcagttatatttgaagttaggggagattgtttcatccctggcatcaagaagccataatccaaagcctggttccaggtatgcacaacatacaaatatcagaagcatctcataggttgcgtcagtttctgctgatatttccaagagaaacaagatagatactcccctaaatctcccaggttggctatatgcccttattttcaagtgtaataattttggaaaatatttttgaaaactgtaaaaagctaaattaatattaattattacagtcccccatgaccttgtgagtttatcagaagcagggacagaaacatgctcatcttcttttctccttttatatggtctggcatataagtgttgagtagatgcttaaaaataataaatgaagagttatatctgtaacttcctttaattatttcttatggcattaccatttaaggataatctaaatgcgtgacctgtacatatttggagatgcatttagggggctaacatcttargtgtgtttactggaagaatagacccttgggaaattatatcggtacttttttcttttttcatccattcaacacatttttattgcatgtttctctgtccccatcacacataaatgttctggccaagacagataaagttattactcatctgtggagcttatacatttctagggagggaggcaggtagcagaaggcagagattgagagaagtgccatgaacagccatcaagtaagatgaacaagataagtttatatggtggtaaacatgaagaagaaatgagagcaagatgctatgtgatggtgacaggtgtgggggagtgatgaagcagtttagattggatggtaaggaatggcctcgccaaggaggtgatacttctctttaaagaaatctgagaaatcttttaggacaggctttgcaagaatggtgtttcctaaaactttctgtttttttccaattgaatgtataaaactgccagttagttccactaactgcccaaagaaatgggcaggttaaggttatcctttttatctgtgggaaaagatgctcccaggtactaggaagcaaacaaaacctgttttgttcaacttgtgtttctatccacttttataagtacacaaaaattatagcaggacacttaaaatacttgtgataacagcctttcttgtgatagcagtctgtctgtctgcctgcctgtcttcctccctccctctctccatccatctatccatccatctccatccatccatctccttcttcctctttgccaggagcaattctgggagaaactaacctaacaaataaatttccattttaatttaagtatgcacacacacacagaataaaagctgtaatgcacaaatggacttaacctttctataaaggcaaaaccagtttaaagctctctgaggttttagagctcaatacaaggtatagtcacagaataaagcactttggcatgaatagaaggttgcttcagctacactgcagtctgcttttaagacacaaggaatggaatgcagggtggaagtttcagggcctgttatcagaccgcttgagacagtgctgctcagagggctaccagtaacatctgtggatgatcagtcaggcccaagattcaggcagaaatctttattcctaaagcaagggatgaaagagtagaggataaaacgagaacaagagaaaaaaaaaaccagaaatgcccatgatgagatatgccaaaacagtaaccttgaaaaatattctgggcacctaggccaaaggtggtcaacctcagaagcaacatgctgagaagcagtctatacagagtaagcacctaaaagatcagctaaattaataaatacattattacattaatgaaagactagagattcatttggtttttaatatttcaactgagtaaattctttgttgtgattatgttattttaaccttcagattgtcatgctgttcatgttgataaacatttgattgtgtgtctgccatgttttctcatcatttctgtggacttcccagattataaatgattttctcatgatagttcatactttacttttaaatttttttacaatgttcctgcattacttttgtaatcacaaattttaaaaatcctccctaatgtgtttgcattagagaaggagccgtgtctatcttatttaaaattgtacccccaggcttccacagtgcctgatatagaatgtatatttattaatgaatgaattcactgtggtgggaaaatttccggaaacttcataagttccagaaatttatgaaatcaggtaaaaacggaaaatccatcaggaaaggcagagaaattcctagccaacttaggrgtttcggaaaaagaaagttatttggaataagttatagtaaaactccattctaactgactaataaaaatgagggtagattttcctcatgtttttaaagggttctcatcctttttttcctacctcatagctccacctgaagaagattgtacatcagtcacagacctgcccaatgcctttgatggaccaattaccataagtatgtctctcttctaatcttaattaaattttcctattttggggaaagggctcaggtgtgttctctgtggtatatttgaatagaatattaggccaggtgtggtggctcactcctgtaatcccagcactttgggaggctgaggtgggtggatcacttgaggtcagaagtttgagaccagcctgaacaatatggcgaaaccttatctctactaaaaatacaaaaaattagctgggcatagtggcaggtgcctgtaatcccagctgctcaggaggctgaggcaggagaattgcttgaacccaggaggcagaggttgtaatgagctgagatcgtgccactgcactccagcctgggcaacagagtgagactccatttccaaaaaaaaagaaaaaaaaatattagtcatttccctaagactaagtaaggacagttggctttaattcagtgtcccttcctttttttctgcaatgacttgaaactgctctctggtttacactcatgcatcgttcctcaaacttcagtcatttgaaaaccactttcacattttttttggcatctctatatgtacaatgctctcatttacttgatatttttatttaaatgatccactgttttctaattaaaatacacttatttttaaaaagaaattgcacatggaaaaccaacatcacatcgtaaatagaaggcaaccttaataataaacttaaatgtaagaaaaattaaataatgttcttaatttgcagctgctgaaagctctgggtctgagtcatgttctctcttataaagagggattaataagtgtcaggtgtaggggcattttggccctaattagcaattttctgtttgatataactgaagtattgaaagataatcatgaaggatataaacttcctgatacgtgttttgacattgtttataccacatccatcttaaatcatcctgatatatgattatccacagatgtatatattcgggcactttttaaaaatagacatgggggtctcactatgttgtccaggctggtcttgaactcctgggctcaagcaatcctccttcctcagcctcccaaagtgccaggattacaggcatgagccaccatgcctggcctattccagcactttagaaatcagaaaatctcaaccagaactttcaaataggctaactgctaaccctgatcttacggcctctgagcttcatttaatgggaaacagtacagtgttgagaggtctgatttctgcttcctcacagctggatactgacagtgtgcacaggcatgatgttggcagtggcagagggatgagaatcttcgtagaccatacaaacccagccccacattgttatgtaaggaattgtccctgacctgtgccttgcaataggaaggggaggcttcacaccatgatggctacgacatgagatgtgctgtctcagcaggcctggtatgaaatcctagttccctcaccatgtgtgagattttagaggagtgactgatcctcagttttctcattcatataatggaacaacctatgagaatattcaggaaatttgtaaaagacactatgtctaatgtatgtccagcccatagtagaggtttaataaatgccctgtttctttgatgcccacagttctcttttgaagtccagacatgtaagagtgtggtcaacaatatttccttgtcaaatcctcacctgcagagattaccagggtgactgagaccttgattttttttttcatttatgtattattaatagttccacttgaggcttgccacagtggctcactcctgtaatctcagcactttgggaggctgaggcaggcagatcacctgaggtcaggagttcaagaccagcctggccaacacggtaaaaccccgtgtcaactaaaaatacaaaaattagctgggtgtggtggcatgcacctgtagtcccagctgcttgggaggctgaggcaggagagttgcttgaacccaggaggcggaggctgctgcacactgagattgcaccactgcaccccagcctgggcaacagagtgagactccatctcgaaaaaaaaaaaaagtttcatttgagcaagctaaatatgtggccaaaaagaacctttagtcccatcaatgcaatacagcagaaaataatttcatctaaatgcacacctgcatagtgagtggcccagacttgagagcagcaaatacttctagggaggaataatgaatgaatgcattcaggctttttcttctccaattcattctagtcatttgttgaaaccacagatgttgatcttcatgtatatctgtgcttgttaatttccaggttgaatttcacagagaacggcaaatgctcttctgtatttagacctgctgrtttcctagccagaagtgggtgtttgcacaagtggacaaaacttgccccttaaaaaagaaaatcaaaakcttcatcattttgcagatgtatcttccctgctgaggctattagtctgctacttcaaatccttttcggaggaatatatggaattaatagcaacacattttatatgtacttcagaagggagagtagggaaacaagtgggagaatgattatttattgagcatccactgtattttgaatactgtgctgagcactttacttacaatgtatcacataatccccattttacaaatgaggaaactgaagctcagagttgccttgtccagagctctatgaagctaggattcaaacacagggatgggactctccagtacttccttgtttcctgcctcatccccagggtgtgtgggggatgggagggtgcactttcttagtgcatctgccactctctcccaccactggatagataggtgtttctcattacaaaggaaaatagctttgaagtcactatgttaaacgctaatccacatactcaaaatatgagctgtgaagttctgtaagtaccttttctctctcccagctattgttaaccgtgatggcacccgctatgtccagaaaggagaatacagaacgaatcctgaagacatctaccccagcaaccctactgatgatgacgtgagcagcggctcctccagtgaaaggagcagcacttcaggaggttacatcttttacaccttttctactgtacaccccatcccagacgaagacagtccctggatcaccgacagcacagacagaatccctgctaccagtaaggagaataaatcactgtgcttcccaatagcaattccctggcaaaatgtctctgaccttcctgagcattgcacactcacgtgctgattttctcgtctctagacagctggaagctggtgatgccattcagggaggtgggctcttgtggttgtcagtaaactgcctgcattgactactactgcctaccttttttcctcatctataactgtttttcttaccttagcataagaagtgccatattggaagttttattttggggagagccctccttattctcttatccccaggtatacagtaacaattcaagcctgatatgaaaactgttttcattttttcatgtttccttcttgttcttatccacctatggataagattgttttcataaagttgggatcatagagtttgcataccactccactagcaccttttaaaaaacccacttatgcctgaggttgcaattttttgaatttttgcaatcagaccttggtgatgacaatgagcagtaggatataaataactcccacatgcttagctttccaataatggaacagtaggcatacgtgggtcaactgtggctttttatgttttaacttgatttacattcatactattgatagtgtaatattcagtgattttcaccaacgataatttactcaacaattcctttgtttttrgtccaaggaagcatatctggaagagttttctggtgaaattaaatcagcttaagagctctataatccagcctgttggggaatgttctcaatacttacttggtgtgtgggggtaattcattacttagggttgcaagagtggaagtatgtaaacattgcgttccattcctttggagtttgcccctcgcgcttcagctccactggaaagtgtttacatctctcttgtctcctgtttccctctttgcttttcttctatggtttgttttgaaatgggctcccagatgggccatgttcctcctgtggaggattaatcaaactcaaatagggcatctgcctctggagcggttttcctagtatggtgtggatgttctcttttcctggctatagctcctgaggggtgaaacttgggcctccaaagagtgtggcagaaatgcgctggcttgtgaatactcaagacagggcccttctctattccttgtcacccagaagccagggaaacccccacagtactgtgatttcatttaaggtcacttgcgcaatagtgttttaaatttctgtcagtctctggctgagggcatgatacaaataggcttggggttcccatcactccctgcacattctttgaagctttttaaaaagcagagttttcaagctgcccatactttcttgggttattggccctcttgagtttgcatcggcttattgttggtagtcccgtgggcaacccttcttgagagaggcttctgcaaaccaagcgggccgtgctgctagctactcactgcttcttgggttccctgtctttttaaagtaaccatgtcgaaggtgcttatcattatggtakgcaattttgtcggatgttagcgaacacaataattagtggtctcagcaggaaggagaataggtctaccctaaagtaccacttcccaccaaagaagaaaatcctgataaaacataacttgggactatatgtagttaacattcaaaccactaatagcctatataaaatagtatttcatgtgtgttttaaaaacacacatttcattaacccctatagaatatctcttaagaactgtatcttcccttcctaagttagtcagcaaacgtattttgagaacctactacgtaccaggcctattagaatgcttgggatcgaaggataaacatagttaggaagtaatattgaagagaggcaaggattactgagatatttattcattcaatcaatatctgaggtcttctgtatgccagacactgctctaggatgctaggaattcagagttggacttaccttcatggagactacatattattggtttagaaatcagggaaaaggagtgtttatgagatttaactaaaacatagttcaggatttgagctgagaaatgaattgtgcctttctcctcccagataaattagttaagtttccttcagcagctaaaaaagaaagagactaatgagtctaccaaatgagtccagggctaacctgagagtcactgaagtactataggacccaatgggaccagtagcagctccaagtggatcacttcatgcaaagaaacataccaaggcaaacaacctggtggaaacttgaacgtagcataatggcatgccaggaaaagtcagcactgttaggttcctgagtagaatcgtatttctaaagtccagtgaggagatttgcaaaaccttatcactgttggactgagagctgggacagagtgacagggagtgattgcaaagcctccctcatgcattgcaggagggcaggggtcaagaggagtgctggctgagagcacagaagaagcggtctttggctcggctggctcattccttcctgaagggcctgtagtgggtggcaatagggacagctagtaagaataaccatctgggtagctttaggcttccagcaggctgtttatcttgagtgtcatcagcctcttcctattggtgacctggaactctctgggatcaagaaacctaaactaattcaggaagcagactcctgccttggaacactgtatttccttgtcttctgggtgtcaaaggaattctttcttttttttttttttttttttcagatctggtatggcctatttgggtggggaaaattagaaattctgctggctaggcagtagctttttccatttttccccctcataccactcctttcaggaagacaaaaataacgcctatttctatcttgttcttgtaggtttgtttcctctggtactattttttcctgttgtactattgggtgagggtggtgggaattatgcatctttaataaagtttctgaggtgagaatgtggtgtctgtggattttcccggggatgctcaggtttgtctggaggcttcatgggtaaaattggctcctatttctctactctctgttctgaactaatgtgtcctttgcagcaggggtgtccagtcttttggcttccctgggccacattggaagaagaattgtcctgggccacacataaaatacactaacactagccatagctgatgggataacaacaacaaaaaaagcttataatgttttaagaaagtttatgaatttttgttgggccacattcaaagccatcctgcatcacaggtggcccacaggctacgggttggacaagcttgatttagaggacagaacatactgtgccagctgttggcattttatatagatagagtcaaagtttttaacctagggttcatggaccttcagtaggttcaatggtagaccataaggcattctagaactatctgaaataatatgcaaaattttgagtgtgtatatgtagcatcacttttttgaggaaggaggacataacgtagattttcaaagggatatataatttaaagtggctttttaaaatctcagctggcttaaattagatatttatcctgatggtttttgccattccatttcaataagaaaacatgctggactcaagtcaaacttgagagtcgaatgagagattttaaattgcaaaatgttactgatgatattttctctaatttgagaaaagtctggaatttctctaactttggcaactctagtttttggtagaaacacatattgaattagaataaaaagtgacagaaatgatagatggatacctgaggaagttttatctgatttcgacactttgaacacattttctttgcaaagttcctgctcaagtatgaagtttgacctgaggctgatgcgtgtgggcggagctttgaaatgccagttgtcatcacaaactacctgggtacaatgctagacagatgtgaaaaatacacactagcaacccaaagataatccaaagataaatgcatgaaagcagtcgtttgaaatgctgcttcgaaaacctccagctcatggctcagtcgcccaatcaagtaaatagaaaatctctttccttcacaggttattaaattgctgcttgattttgctttgatcakgaattcaggggattcagtttgaagaatgagtagcatgaaatttatacccatgaggaatttgcatttctgatgttgtcctaagattgtgggagacattaggagtctggaaagataaaaccaggcctagattttcttttctaattatcattcaataatagatacagacatcatatataggcagaactgaaagtaaagatttgtagagggaatatcactaagtgatactttcataattgatccagttacttcaactgtgcactcaaacagccacgcaacagctcaggagcaaaataactagatatggtcctggtttggtaattcacagcctaagactcaggatctcacaacaacagcaacgacaggtaaactgctttgtcttttgcttatcagctctcctggatgtcagaccttttagtgttaggggagaggacgtccattatcacgtcaaatctccttcatcattcttagtgagaatagggtcttgtaccacttcatatatcagaaaggcctgtggatctggggatatgattgatattcttaaatgtcctgtatgttttccttttggcaatgtgtatatagaatcagaatgatttttccatcagaggaaggaaaaactatgaatcaatagttttgaatgaatgaatgaaattatgaaaaactacaaatgaatgaattgactgtgtgattcaatgagaaaatgtcctttagaaagaagtctgccggaaagtgcaggcttctcctttctgctgatctgattctcacagccagtaataagagaaggaaatgcagatttctctcatcaaagtgtaggccctgaacccttctttggacacttaaaatctcaactgtaaagtgtaggaaatgacctgttgctccatatcagaatctaggcctctaaccagctccctgggtgtgtggctcttagctctatatccctgcaaagtgtattgttacaggagctttggggaaaaacgattcaaggcctgtaaatatgggagattacaaggacaccctcatttattaactttcattgatggagttaatggccatatttcaaaataactaggcattctttctgcagaggggggtaataaacatggaaaaattattctttacatttgtttgccttatatgacattggataaattatattctttacttctataaataatcgtgaggaaaatagtgctcatgttatgttatggttgycatatcacaatgtctaagatcatgcaggggtggggaggggggatacagagattgcagaataaagacaatgctatttttaaatgttgacaatgtttatcttcataggacaaagaatgtgaaggaaaaggtctttttggcagtgtttcatcttcttggttcatttttgggctttcttgatagctgaaaaaaaaatctaactcaccttactattttgtttgggsatgatggtttcagcctctctgcttgaacttgttctcagttttttgtctactgttagctcatattcttccaatgcacatttttgggcattattggttatagaaatggcagtctttggagatttttaaatcaagactcttgcttctggtcttattagcaagatcattggggtcacttcatctctgtctgtctttcctgattgattatcctattttcaaagaatgagactcaaaatgtcctgttctgctttgcaaaatatagtttcacataagaaattaccttgggcaaggttgtgagaggatttggaatctaaatggagaaaagtgtagaggcatatttttcaatcttctacttctatgtcattttycctgtgtgttggattgctaagattatgtatctattgctggcagaaatatcatatcctaaattcttggagaatgatattggttgcccaagattgtatagaagattaaggagctaggactctgaagagctgggttttagaatcataaactctcaggtttggaaaggatgttaaatggtctggttcaatcaacacttctaataatttaatctcttacacaactttcttgccaagtgatcttcctgactatgggaaacataatactttatgaagaagttcattgttggatagttcagattattggttttttaaatccaacatttggaagaacattcctcttcctgaaattttcaccacagatcctaatttggcctcatggatccagaggcaaaaaagtttaatccctcttttacattatatagactttcaaaattcaaagacggctgtcatgcgttcctggagccctcactcttgctaattaggcttctgacttcagacaggtcagaagctctgtccagcaaaatttttaaatctttaatataaggagcatgaaccagatgacatttaagatccttccctctctgacattctataaacttcagtttgagtctctgaaaaaaatggaacttttttgctttttccctttcttttcaccatctatatcaaatatagatgattctcttgagtagtaaaagagtacaagcatattcaatgctatttcttaggaaccgttaattaatctttcaacaatcaattcaatcatgattacaacagctttgatgagcactagtgctacagcaactgagacagcaaccaagaggcaagaaacctgggattggttytcatggttgtttctaccatcagagtcaaagaatcatcttcacacaacaacacaaatggctggtaatgagttattattatctcatagcgtatgttttcttgacagccttgaataattttgattgacctctgggatgttattaaagcctaacgttccttctattctcacaaattttcgttatgacttcagaaggatcattaactctggtatctgtttgtttgcttgtatggcaccaataagcagatttcttctttctaatctatggattagtatagaccaggagaaggctaatacagagactatgaaacgggaataagtttttttaacgatatggcaaaattgtgactctgaaagatcattcatgtatattctaaaattaccacagtcataaaaagtcttggactttcatgaggaaatagcatagctagatatgaaaaaatatagaaaatcttcatcaatggaactattcttggggtagacactaatcatatgaaaagacaaatgctcattccctaagatagcctgaatctcatttaaaatgtagaaaacccctttttagtaaagagacatcttctacagtaaccactgagaagaagtggaagtttttcatctcctttttttattcaaaaagaaaaagaatttctcaatttctgaaccacagttcactttagttaacccctttgattgcctaataatgccaaaaatgatttctctgttaattggcttcacatttttgctctatgctgaagtagtattgggaactgcagtgtagcttccatctctgtttggaggtacactgatctgatctgatactagagaagataaaaaatgaattagcaaattgtgaacacaatgaaatgactgacgtaggtgtagattccaacatttttctgaaggtgtcttgaccaaaaaaaaaaaaaaaaaaggcacgtgtgaaacctttccattctgttcttgatggcttggctttaatggcatatggttaatgagttaataataaacatatctgaaagtgtgggggagttttcattagcctttaaaaacttatatggtgagattatgtccacacttattctttcagctttcttaaagagaatattcagttttaaagatcatagccacttgttttgagatttatgtattagcttcggagatcagaacataagaatttggggtatgcaagtcaactccctcactttcttttaaaaatcctgggaaatccattataccttctgtgcctgattttcttcctttgcaagtgggttgcttgscgtccagctcagccactaatgcaagtcaccacaacaggtacgtcttcaaataccatctcagcaggctgggagccaaatgaagaaaatgaagatgaaagagacagacacctcagtttttctggatcaggcattgatgatgatgaagattttatctccagcaccagtaagaataatcaattacagtacagccatttatgcaaggcttattgattaatctgagtgataccaaattgtatctctcttgagaagtagttaatgtgaaaaatgggtgaacctatgatcataccttagttatatcttgatgagattayrgaagaagaaatagaatgttttgagaagtggggaaaatrtctcacaaaatttctcttgtctcatgttcttcctgttttatttatctatgggatctactgctacagattgtctttgaatgatcaggctttatcagagaatgacattaaaacagtacaaaaaatgtacattgtgtacttactgtgctaggtgctggaaacacgaagatgaaaagagccagagcctttgcttttcagaagctcatggtctgttggagcaatagacttgaagaatgtgatgaggagggtattaattaaaagttgtaggccaggcgtggtggctcacacctgtaatcccagcaccctgggaggccgaggcgggcagatsacgaggtcaggagatcgagaccatcctggctaacacagtgaaaccccatctctactaaaaaatacaaaaaattaaccaggcgtagtggcgggtgcctgtagtcctagctattcgggaggctgaggcaggagaatggtgtgaacccaggaggagatcgcgccactgcactccagcactctaacctgggtgacagagccagactccatctcaaaaaaaaaaaaaaaaagttgtggaagttcctaaattgaaggccctaaaggcttaaatgatgggagctagaactcaagaattatcttagttaatcaaagcccagctgaggtcaaaggaacaaatccagagttttaacaaatgagctggacaccaatatagcagaaagaccttgaagggaagggcaaatgtcaggttagctttagcaagacattgccacttattaaaagcaaataatgaaaccactattggtacataatagtatccaaatttttgacaattataaaactttttgagaacaaagagatggaaattgagctttaaagatatccttaaaaagttaaaaacatgcaaaggttggtctaatattctgccagattactgagttttccacacatacctgtaatgacttaagattttgctgaacagagctgagaatcctgaacctgactccatcacagttctgcttttccttagaaaaaaggcttttggggtgctgtgtgagctctcccaattcactgaagttctatccattccattaaaatctgagaatttcatcctcaaatggacagagaagaaagggtccagaaaaaaaaatagcttaggccttgaaggcatctgagtatataacattgatatgacaaatactcaaaaggaactagaattttctatctaaacttttaagtgattttttttttagacccgacacccctccagagcttaatctatggaataagaaaattccttttggtaacttcagaacaaaaaccaaataatcaaaaacactggagttttacattatactgtctcctgtgttcagcatgtggcccagctttgcagatgggcccatcagtaaatacgtggtcttgatactgaagaaattaaattcccttgggtggtaacccaaacagatctacctgtaaatgaattgtatggtcaggcttcagggaaaaatttcccatggtgttggttttttttttttttttttttttttttaatttkttaaatctctatggcatatttttccaatttctgcttttctttttttttcttttctgcttagcacctatggacataattcaacatgatgccctctttcttctggaggggtgtgataactgcttgataataagcactttttcaggcctattgagaatgtggttaatgattctaaacttgatttttcataacttgtaaaatagagctgacagtattatagttctgaaaacagttttgcgttatttgggtatcaaaataaagtttgaaacaattaggatggatttgcaaataacctttcacaaaacatgttgactcagattttgtcatgatccttctgttaggtgcatctcwtattccagccctaacagattgggtgacaatatcagggtgctggtggatgtacgcctctttctttccagtgtgctgctatgatggtggctggttacctgtggtgtcttattttctttcactggctatgaatggcttgctcatgacatattttgtatttgatgagaataccatagtgtttgataaatattcagaaatgtatcgctaaaacatatggctattckaggtattctttttcagaatcatctataggaaagctctagctgctcaggcattcctttccccactgaaattactaacaacataaagtgattatcatggtataactttcagttatctgcctcttcacccggaggatctacaaacagcacacagtgactaagtccctgggctttcaagtgcagagggatactacagactgcatggatgggcaaaatggcgcctttggttatcctcggtggagggctggtgttttcaaagctgtccttcctactgctgcagcttctttgactgttttatctggaagatctcatgttctgaaccccaaggtattctatgacagaatgcaaaggacactgagatgcttaccaatatggctgaattaagctgaagtcaccctccgctttccctccatttccatgcagccatctatacaacctggtatagatgattcattgcatagcctacagaagcaagactatgtgcgggacaagtggcgaaggctcaagaaataacatttttctaattgcttcaatcatcgttatcacagtttcaaccacaccacgggcttttgaccacacaaaacagaaccaggactggacycagtggaacccaagccattcaaatccggaagtgctacttcagacaaccacaaggatgactggtaatgggttctgcatatttaatgaaagatttttttcccctcaaagcccatgatgctgcaaaggtcaatcatcgaggcacagtgggaaatttagttaatatctgatcaagaaattcttagtggacttttatgaggatacttaattccatttaggagtcatttatcaattataccatgtgggcacaggattttttatgttgcttcatgataaaaatgaatatgtttgaatggtttgtggttctgcctttgacaaactgatcatagtggaataataagggaacatgaagaaattccaagcccattgattttctcttgagaccaattaggtaaagtcactcaaaatttttgagagtggatgctcagaggtaacactttggcatagaattgttaaatagcatgcactttaatggaagaayagaatcattaaagattggttgataacaagtcacagtgtatttaaccatcatcacagcagatgtagacagaaatggcaccactgcttatgaaggaaactggaacccagaagcacaccctcccctcattcaccatgagcatcatgargaagaagagaccccacattctacaagcacaagtaagcaagatggcggtcggcagttctgggttagatgaattagtaaagacattccagcaatagggaagattttgtttagaaattggccgcatcttctatttccactcggtaatttcttttattcttagagcctgaaaagctgctaaacccgcacacaaattttaaaaattggaaggaaaatgataactcatcaggttgcccaaaggccaaaatgttttaagaagtagatctagatacaatttttgtgttaaaggttcctagaggttccatttgggtaacttgtgtgtgttcattgaaatgtgtggcaaagagtgtgttcttttggtgcttagtagtggaatctggaaagaaagtttgtcaagtgaattgatctttggaatccttattttctatgaagatctttgatgaatacagtgtcttttttgyattctgtccctgactgttctatagaaagacrtcccttgtactctttagagcaaagttggtagctcttatggtcttcatttgaattctaccactgcttctttttctgtttttaagcccatggtaacttggggaaggctttgatgctcttactgttatttctactattatgaaaactcaggttttcyaaaacaatctcaagttgcggcagtggactgtgagaatagggggccccctcactccccaaacataagaagtatgtgcttttcttcttttatctatcccgctgagatatgtctatcttatttggaataaaagtatttattttggaaaacagctttttagcatttttaaaatgatgacccaactgtcattctcacagccctagatacacctaatggggaaatgtgagccacttaaaagccacttaaaaaccaaagggctttgggaatctatggcttgaggggtgccttcagataacaaaagaaaagtttcaggtatcagttaggatagaggttagacattgtactgaatatatccagcagatcttacatcccattacaaaccccagtaggtgtgttgtatacatacggcttaggggttaagttaacaaagaagtctgataagaaaaggaaatacagaggaagcataaatctctttggaataggattttgttccactcccttagagccctaacagtataccttagaaattattttagacagtttgtacttaaagaccagaaagctactttagagacttggaaataatgagcctattgtcaaaaggtggtgcttgcggggcattaggactagagggttggtgaaaattcagacagaatgtaacttgacaaagagaagacagcaacaactgtaacaattatcttatgaatatttgcgaaactcaaagggatctgattggtgacctctgggctttatcaaattaacatcacaacttctagaagaaagtcaaccttcatcttttacaatagaaatcatatgttttgctaacccattcctatttaggctgaaaacaattaagagttatgggtacttaaaaaaatcattatgtttataaaattagtgatagaaggagcatagtgttctatacagtcacacacatacacttccttatttcttttatttaaactttgagtaacatagcagtctatgtttgggtcagttttcccttttttgtaattacattcagtggtttttgtaacttcattatttattgggaattagtgatttagtcagtgggagttttgtaaaacttaagattttggcttttttccccmtcctcctggataaccagttaacccaataatggcttggccgatggaagggtaaaatgaggacagttatattttttaaatgtcattactgtcaccaaatcacacatatcattttctaagataaggaaatacaaccatttttacaagttgcaaaaaagtactctggcttggcaagtttatagactctcattttcttgataaactaaaaaaaaaaaagaaattgctacaagctgctatagacaaaaatgttggtgtctttctgacttttcctgaagacaccttgatggaattatattctcttgattttgtcctttttaaaatgatggttgaaattttaagcctgtcacacactattatttatataatgcctcaaactggcttggatagttttcgtcaactgaattaattttgttaaaaagtgattttagcaattttaggtgccatgtggacatcaccaaatactgtgttagtggaatagcatccaagccatcccaccatctttcctgctgggcaaatccactgctggtgcatttccagtgtgtgcgattatgggttacatgaccaccatttgagaaggtctcctaatgtgctgatcttgttattagctgttatacagtgttttcctttcgtcaaaatgactggagcaaagaggttattctttgaatggttttctcagacagggtatgtgaagccattcactacagtaaaataaaaataataataactcatagaactatgagaattcatcagctatggtctgcttagtcctatgattttgaacaaatcaaaacttctttggaccacaattttcctagctgaaaaattaaacatttggatcatttgatttctcatatcccttttagaatatcagtggcctgtttccttggtgcctttcttttctaccttccctccccatgtgtatmtgcccttaaagtagaaagatatgttgacagctattggtgaggaaaatagacaattatgtctcccaactgatattcttctcacagtccaggcaactcctagtagtacaayggaagaaacagctacccagaaggaacagtggtttggcaacagatggcatgagggatatcgccaaacmcccaragaagactcccattcgacaacagggacagctggtaatggatrgtttaacaagtaaatttggatggaaacttccttttgggttaaacggtagacattgaggacattgaacaaaaggacactggaggaattgtcacgagatgttaggttacttaataaattatgctgcagttcacacagagccaaaccttaaaggctcataacaagtcacctgaacaggaatggatacaagccagttatgaataagaacaggaaacacagagaaaatgcccttgaacatgtctctttcacatcgagttttgggcatcatctagtgagattgtagcagaggccctgataaaatatcgctgtctgttgtataaaggaatctactctataatgtgggtccagactttacaatatgattctgcaaagtctggctgtgagaaagcattttgtcagaactccagtgtttgaagaaatagagccagacattatgtgaaaagtgacacctgtctgatgtcatttggccttttggccatgcctgttcagtaatttgtttttgagtataaaaaaggtatcttctctattcttgaattgtgagattgtggaaattggaatccagtcttatcatcatctctaagtgataccagataacttggctttgcaagctcccatgcaggattcttttgtctgtgtgacataagtattaaaatgtgtcctgccttataaagaatgtgaattccatattctcacttggtatcagtgagaaatattcccatatttctatttgcaacatagaagataatgcatcatgtccttctggggcatggcaagttctaaatgaattcctggcagagcaatggattctgtgattgtctatgtggtgtagttgttgctaagaggatgctattgtaatcttttctacctatacttcttcattggctcagaatgaagcaaggcatgtgctgctttcttatatgtcatttatgccataaatcccattgttagaaggtaatgcttctaacggattccattcatgcttttgagataaatggcattgactttcwtattgatcacatggaaagctgttacctgattcctttcctgagatcacttccagcctaatgtgcatttggctggaatatggttgtctcagaataacatcatgcactcgggcttttatacttctgcctttaggggactgtggcagcatggcatgggtcaagaagtacttctccttcatcttcctttgatgtcggtaactcatcctttctgcactgcgggagttgttaatgcttttgkgtcctccagttcacatgctgattgctaagaagaaaatgagcatgagtgaacccaaagctgctgaaacattctgcgtttatgcaacttccttgscctctatacaaggaagatggtttcattgtcttgtctagagaataaagtcttttttaaaaataaaatcggtgtatccctgaccaagcgtccattaacactttgacaattgctcaaactgcatggtcacagcagcctcagctcatamcagccatccaatgcaaggaaggacaacaccaagcccagaggacagttcctggactgatttcttcaacccaatctcacaccccatgggacgaggtcatcaagcaggaagaaggatgggtaatagcctctgagatttttatatattatgttttttgaaatccactgagtgactgctgactatttttctagaaatatgcccttggttttagaccaaactactttcctgaaggacctgaggttcttcaaaaattagttttcttggtaggagtgatactcatattcacctgaatatgaagttctgagctgaaagtaaggaatttagcaggagggttggcaaaagaaaaaacttattgtcaaaatatatctgtgtgaggcagtaagtaatagatatgaaatgaatgttgccaacaataaacgctaaagaaattctgagaacccctccctgcccaccacagcatcacagaaaggtgaattggacttggtttatgaaaaataaaaaaaccctggatagtcagagaaaggaagtgggtggtgggggttggwggggggggcagttttcctaagaaggagactcctgtaaggagaaacgtgaaggaagaaaagccaaggaatgaatatgtcagtgagtggatccatttttcacaagggaagatgtgtttgaatggctaggcaggggccattatgttgagtgactgaagtaccacaggcagacccagcacacatgagtttgcacatggcagctggagctctgaggacacccatgggggaaaaccaagccaggcaaagatcttcagaatcaatattaattctatgtactgatgaagagaaagagattccattaaattaatgaacatgtcaaggacaatacaattggcttcaactacacaatggtatgatgactcttgaaggactctacttataagagggaagatgaacaagagtctagagcccatcatcaagtgggactttttctgggagaatgtccatttgtggttttgattcaggttagcacttgctcttgtttgaaatctgggataacagggtcaccacatttttgtcctacaaagatctttaatattttagtgttgaatatttagtgttgaatcttgaatatttagtgttgaaaggctgcagtgcagacctgggtacccagtattctggtgcttcactgggactgattaaatctcccccagaggcagtgatgtggatagactttgactgaattgacagccagaaatatcgatggggtttatgaattgtttggcctctgtttcactcaagacttcttatttcagcagagtagatctgtgataactgttaaaaacaacatttacaagtatttcagtgaaatttctgcactactcaacattgtacatgttaaattttaaagaccgcttatacttgggtttttgggaagaataattcaatgacgtccactgcttcttatttcttgcccctgtatactttctgtaactccacctaggtggtcttggatgacgattctgtttatttgcatattcactttgtgaagaaaaaaagactaaaggggggaagagggctatttttaaaagtccctttggttggtaagggggaggggataaaatggtgcctgagccagcacactttgtcttttctccatgtgtcagattgcatgtttctataaaaaaggcaatgtttctgtctctctgcaagatttgggtgttccatcatgcactcatgtggagtccttccagactcagcaaaaacaaacacacagcatagctttcatataactcggcccttcaaggaaagccagttacttgttgtggtgctctttgatgaaacaataatctatctcagttcgggagatatagtcagtatgtgctttctttcctcttggccagatgtgaatatttaaaaaaatcagctgtagaccataagccaccttcaggtagtggtttgggaaatcaagcaataacactaatattgattccttcagatatggactccagtcatagtayaacgcttcagcctactgcaaatccaaacacaggtttggtggaagatttggacaggacaggacctctttcaatgacaacgcgtaagaataacgatgctcagccactttattgacttgtattcctgcttcatctcttactcgctattggccaagatgcagagctttggtggtggaatggtgctatgtggcttacttcagcccagagtgtgaaactgtcttcattgtctgtatttcttgtggaggtctctcaacctgattttcccttcatttctttgtgccttccagatttaatgactttgtgttttaagaaaaagtaggactctattcaactccattttcattctctaagtagttatgtcagtgaaacacatgcccacttccaggatagtgatttctctatgttttaactgaccatttcctttcaatgtccatctttcctccagccagtgcagaagaggggtaggattgcttgcatggttgtaaaaagacatttttggggccagataatcctagagatcacatcagttctcagaggagaggcaaggcatgttattgacaatcaacaaaggtggcgggatccctggaacaacaacaacaacaaaacattgctagtatctctttctatcactaagaaatgttcaaattctagtagccttaatttctactctatgtgcagggatgtcctagagatcagcctaaagtcgttcataatttctttgaggaatacaaaagaaatctagaattaagaaggtcccattttactgcttgccacacataatgggcagagtccttcatatgagccctttaggcaaaggaaaaaaatcagcaagcatgtattgatggtcagcaatgtaaatagcacagcgttaagcatcaaaggagatgcaaataagcctatgaatggtccttgccaaagaaggacttatatttccrttttatgtcactgttggcttttgttctgacattgggtttgggatttagtgactgtctttctcctggttgtaatatttattcggtggtgggcatggcttatgggtgtgctttatgaagtttttgcacctgcaactcaggtcagtacctttcttaaaagaacacaaaagaaataaacttgaaacagtccaagtgattttagatatgggcaatgggtcaacctccagttgatatatgtcactgagggccctgtgtttgcccaggcaagcgtttccttggtgcagtgatgaaaatcccaatgcacaggtgaaattaaraaataacttaataatggagtaaaatggtaactttaatttaatgaccttyacaaggtagctaagtatttccttgtataaatttgatctgtgttacttgagtaggctattctagataggcttctttttcttttgtggttacaactagactacaggctatcatagtgttcattttccctgccgtcacatttcttgacacacagttaggtgcttttggttactgataggagcattgggattcaaatattcttttttccatgtctctgtgttctctggttttctggagtgactgggagcaatgctgcaattgagcctggacaatccaggataggcaaagttttggctcagtcttcaccttgccactttacctttgatgattatactgagaaataaagggtcttcagaaccaaataggggcaaaatagaattcttctgtatatttctatcaatcagaggagaattgtgtgcacaaaccttggtcttcctatgcacctatccatctgactctactctagctagattttccttgctagcagataacaggatttgtaccgtagcttcaaattaacactggattcattcctcattgaaacagagcagagtaattctcagagcttctctacatcacatgaaggcttggaagaagataaagaccatccaacaacttctactctgacatcaagcagtaaggattataaaacctagttggcytcagctattgataagaatcaatcaattatgggtacttttgcagtgtctttggtggaggtgcatccattagctgccgttacactgttacttttaatcaaaaggtgcgtctggtggtggttctctgatttttctgttttatatacctcttcgtacattaagtgcaaactacatttcttcatcttaaaagttgggtttctttcactctagagttagtgatttgttttaacaataatggattgcttatatatgatttattttatttatttatttttgttaacttgagatctttctaacttttttatgtgggcgtttaaatttagtgctataaatttccctcttactactgccttagctgtgtcccagagattctgatatgttgtatctttgttcttattagtttcaaagaacttcttgatttctgcattaatttcattatttacccagaagtcattcaggagcaggttatttaatttccatgtaattgtatggttttgagtgagtttcttagtcttgatttcaaatttgattgcgctgtggtccaatagactgtttgctatgatttcagttcttttgcagtgtgatttataattggcgtaaatgtctgattatatcactttacattcctcacaataatattgttttgccttttgtcctctggacctccatggtgctgatgactaaaaagcagtcccttctggaaaagaaaagaataattaaattagtagcctcaggcctttgaaaccatgcatttgctattttaattgcaggcagcaaaattttatctttcaatccaatgatatgtttcctccactacatcaaagatgaatccaattgagaaagaactcaagattatctagtacctcagctgacttcaagatcacagttgtagtgacatagccttacctaataacccaagcagatgttgcaacaaatgccaattctgggtattaagatcaccaaaatctcttctgttgagtgatgtccaagtagtgtctattgcaaaatatttattctgttcaatagtatgacaaacttcactctatttctccctatttatggataacaagtggaaagcttttgcagcaattgtgtgttctggagacaagcacatggtgggtggtgatcttacaaatacgrgttcatcactgattccacctccacacagataggaatgatgtcacaggtggaagaagagacccaaatcattctgaaggctcaactactttactggaaggttatacctctcattacccacacacgaaggaaagcaggaccttcatcccagtgacctcagctaagactgggtcctttggagttactgcagttactgttggagattccaactctaatgtcaatcgttccttatcaggtaatttggcatttattatctagtttgctttctctatatagagaaacaatatatagtttcatattacagaggacattttctgtgtagtctgggattggactagtttgtgatatggaaatatctttcattattggttatcaattctagtgcaaataaacttgggtatattttagataaaagaatgcttccttttgccagtgttttttccatttgtctgtgtttgcatgtgtgtgtgtgtgtgtgtgtgtgtgtgtgttgtgtgtacaagttggctgttatgatggaattgctttctttgtcttatcttgtgatatatgaagttgaaccacatgaaactgatatttttgcaggtgaaagtagtcgaattttagcaattccgtttaattcgactaatatactctacttattttgtaaggttttatcctacaggtgaataatttctatatactagtatctttgctctgaaattattatcttgttttggtaatagattgatcagttttacttttggtgatggataaacctcttctagttctgatgcacacttaaaatgttcatgatttaatctagtattaatgaatagggaccacttctcttattgtaatagtgaagagaggaacgaagataatttattcaatgaagtttgacacggacctagaataagtctttttttttctcaaataagtagtcatctctgcttctgcttttctttgcttctccatttgtattaagaaattaacagtgaagaaaggggaaatggaaaacgcccactgtagtgaagaaataaaaaacagattctgtcttcctagtactagtttttcaattgctttgtaacacaatcactaggcatattcaagattagagactttagatacataattttggagcagagatcttctctcctccccccaaaaaagaaaaagaagaattcatatgtgtgcatatatatataatttttttttttgagacggagtttcactcttgttgcccaggctggagtccaatggtgcgatcttggctcacctcaacctccgcctcctgagttcaagcaattctcctgcctcagcctccatgagaatccaatatgtaaaacagatgacggttgtgatgcagggacagaaaattcagaatgccacatgcttggcctcatttctctgggtggcctacccaagagcttcaagaaaaacagtttaagaaaatgctaacttcagcaatattggcaagacaaagccccttacactccttagttctttattcagcattgttctgctctcatttattaaaaattccaagtaccattgtcagtattcttcagaaaatcttatagtgctgtctcatttctcttggcaaaagaaagcctgttgtgcaacccaatgaatttaattttttttttttaaagagtcttgccctgtcacccacactgtagtacagtggcgcgatctcggctcactgcaacctctgcctcccgggttcaagcgattctcttgcctcagcctcctgagtagctgggattacagatgtgtgccaccacgcccggctaatttttttatttttagtagaaatggggtttcaccatgttggccaggctggtctcgaactcctgacctcaagtgatccaccagcctcagcctcccaaagtgctaggattacagacgtgagccaccacgcccagccatgaatttaaagtttaaatggcaattttaatagtcacagtaccctagaatgcttatagcctaatgttagtaaatcaaatgctttttacaagactgatattcacagacactgattctttctgatttccacagtggtacggacagattttccataattctccatggattagacaattaagtcacccaattctcatccttggttttcttcaaaaacactcacccacataaatctcatttatgtctatacatttttctcagtctttacgcttaatgttaagaactaaagcatttgttgaagcaagcggatcacttgaggtcaggagtctgagaccagcctggccaacatggcgaaacctcgtctctactaaaaatacaaaatattagccaggcatggtggcaggtgcctgtagtctcacctactcaggagactaaggcatgaaaatcacttgaacccaggaattggaggttgcagtgagccgagatcgtgccactgcactccagcctgggcgacagaacgaggctccgtcccccaaaaaagaactgaagcatttagaatcatagtggcagtggtggtggtggtgatggtgatggtgatggtgataatgatggtgatgggatggtgacggtcatggtgattttggtagtgggagtattggtgtggcatttcagcaaatgttgttttcatttgttttaaccatcagccaaggaacaaagcaatctgtctcttcaatatagttacacaggtgactaagtgtcacccgcttccaccttctctaatcaaggaaatggtgacgatcaggttactatagattccttataaggtgccttcataatggataactgtagccattttatgtaagcattgtcctgtgattaaaaaaaaaaaaagattccagtatgcttttgaaaaatgtgggtgggggagagagttttaatatgctgcattcaagatttgacctatggatttagattctagcaattcatgaggttgtcttaatctaaagctttctggtgatagatgtttgagaagctaggattatattaactagtcatgttgaaactacagatttaactttaaaaaattattttaaacttactataatacccatattccaatacacattattaatgttagctatcatctcaccatttccttttttacttattttcaattttttttgaaaataagtagttgacctttctctttgaatctttacatcattcaatcccaagattccttattgcatactaatttcctgccgccaagaaatctctgtttcatgccctaagccagagtatgcccatttgcagtgattatgtttctcataatccaattcatattgtccttatttaaaatgtacaatgtctagtctcaacctcatacctgcaaagatatcacaatatttttgttagcatgttccttaccacagttcttggatttctaccaaaacaaagyttctacaaaacttcctgtggtcatccttcttagcctttgctgccccagtttccttaattcttattaaagttctagctcatttatcagtggattaagcratgaacggtaattaacattgtggacccattcaaggctgttttgccatcattttttggaataccttaaaaagactaaactttgtgataggctgtataagaatgcaaaggtaaagaaatgcagatgggagtgtaagtgaaaacatgcagtactgaccttcctgattgctcattacaggagaccaagacacattccaccccagtggggggtcccataccactcatggatctgaatcagatggtgagttcaaaactgctttagtcatttactgttataatcattgagcctaatgatgactaccaacgaagtatgagtcagtgtctccagagaagtggttctcaaaccttcttagcatacatcacaattgcagggagggcttattaaaccacaatgctggaccccacccttaaggttcctgattcagtaggtctggggtggagcccaagcatttgcatttctaatcagttccctggtaatactgacactgctgggacagggattgcactttgagagctactgctctggaggaaagccttgcatctgaaagcctcaggaagaattcaagcagtgtcccaatttaacmttgcactacaccagagtgattaagagcttgagctttgtagcaaaaatggcctgagttcgattccagccctccgcatattaactgagcaagatgctttaaagggtctgagacaacatttctcaactaataaacttggaataataacaattgtcacaggacattgtttcaaagactaaatgatagaatacatgtaaagcatttagcataatcctggcacatgatatcatcactggtatttgttgggaatttactgtgtgccagcagcatctttctaaacactttacatgtattaggttgggccaaatggaactgccattattgtaggtcaagaacaggtcaatatcggccaggcacggtggctcacacctgtaatcccagcactttaggaggccgaggcaggtggatcacgaggtcaggagttcgagaccagcctggccaaccctgtctctactaaaaatacaaaaattagccgggcgtggtcctgcgcacctgtaatcccagctactcaggaggctgaggcaggagaattgctcggacctggcaggcagagtttgcagtgagccaagattgcaccactgcactccagcctgggtgacagagcaagactctgtctcaaaaaaaaccaaaaaacaaaaaacaaaaaaacaggttaatatcagcaaattcatagagtttatctagtatgaactcattcagtcatcctataaactctgtgacataggtaagtactattattatccccatgttacagatgaggaaactaaggctcagagaaggtaagtaacttggcagagttgacaggaccagagagtgatggagccacctttcaagcctggagggccttgtattacttctcatagcacagtctggagaaggcattccataatgaccataattactcccaggcatgaattcttaaatagactcctgtttgttgtgattcagatcacacccctacaaaccttaccccagactgcaaaagtctgacatgaggtaggtttactaattacttctactgctgggctactgggaggttctgccagtgctgccttactgtggtctccctgaacatcataaatccaggtgaccccatgtaaatgatttaagccatatcaattattgtctcccctttttatgcccaagtttgagtgaggctcaccatcagatttaaatgtttacacattgaaaacaaatatgaagatggatatttacatggtggyttccacaataactctctatggaggagcactaggaggtagggattcattagaaatgcttctgaaatagagacagaagtcacaggttcactggggactttaggcagggcacttaacctttcccagactcagtttccttgttagtaaaaaggagatcaaatcatctgcctcagttgcttcctagagttattgtgaggaagacagggtaccagaagtgtgaaagtactctgaaaaagtagggagttattattaaggggcatgatctctaaaaccaagagaccccagccactctctaagtatgattctttaaccatcagagtggacatcacctaggaacttgttggaaatgcagaatccttggccaacccagacctactgaatcaggatctgcattttaactacactctcccacccaggtggtttatatgcacattaaartttggaagcttagactgtgctagactgcttttctcaccattgaagccaattgaacaatctctgtgcatatgtctcagattacatgtcatctcccaacaggaatatcaagtgctcctctytgtggaacttgctactgtggccagtcctaccctggctggatttgtagacatctagggcacaaggcaagacctgctatctcacatccatcttctgtggcttttgcttgaagtgagaatcaagcagacaggagccagtctcttttgtttggcttctgagcaggtgtctattgttcaaacaggaggtttcatcttgctgcacgcacacccagatcttttcttgctgggagcacttcttctttttttttttttttaaatcaaaataaagtgattatgatccgttaatggcctctttttaaatatcaaaggcttctatgagtcagaaaagaaaaaaaaaaaaaagaacagtgagagtgactgtacctcctggggagttttcacggccaaagatcttcagtttaggtggccagtgtcccatgagttgggcaggtgaaaacctgccaaccaccaaggacactggaaggcatgtagggaaagggccttggactgttttggagatttgtaaagtcaaaggccactgtcaacataggataggggatgttgaaacacccagatgtctggtaggaactkgttttgctcccttttaagttttaacaaaagcatcaaattgcataaacaagagccatcctgtccccatataaccattgtaatcaagatttcagtgtgcacagcctaaagtttggctccatgaggaaagctctcatttaagaccccaccattttcatccattgatcagccttcaggattctacagtgggcttccatttggtaggaaaaaaaaagttcattttggtggaacactttcaaattttgttttgaagcaatggaggaagaatttttaaaaattcatgaagctttcattttgatgaggctcttcacaagatgtcttagaagtttcttttttaaaaaaattgtttatttatttattatttttatttttaacagggacaggatctccctatgtttcccaggctggtctcaaagtcctggactcaagagatcctcctgtctcagcctcccaaagtgctgggattacaggtgtgagccaccatgcccggcttcttagaagtttcttttagaaccattgtgtctccctcatttcgataggcctccagttctgacttgaggattgtctgtcttgcgatacttcctcccagtttaaggcattttgttcatctccttattttgctttttagcagtagaaaatgttgattcttctaacaaggtgtgtttcagtaatatattagcagggactctaatagggtgatttttcatagtcagaaagggccactgccgctaaactccttatttatttattgtgaggtggagtctcgctctgttgccaagctgtaatgcagaggcacaatctcagctcactgcaacctctgcttcctgggttcaagcaattctcctgcctcagcctcccgagtagctgggactacaggcacatgccactatgcctggctaatttttgtatttttagtagagacggggtttcaccatgttgactaggttgatctcaatctcttgaccttgtgatccgcctgcttcagcctcccaaagtactgggattacaggcgtgagcaaactccttattttatagtgtttatgttggctcctatgatgctattggatgagattttcaggttccctttgggctttctggagcgtgtgagtcccctgggggtcttgttaaaatgaagattctgatttggtagctttgagatgaggcataagattctgcatttctagcgatctccccaggtatgcctgtcctgatggtctgagagccacactttgagtagcaaggtcctaaattaaaaatagaaaataacaaccacacacaactaccaataccgtgtatttcttcaaatctctgcaaaattatgatgaacagcattctgttatccccatcttacgagtgtgaaaagggagacttggagaaggtagattgacccagcacacatggctagttagcaagggacagcggtgagacttaaatccagggttgtccagctctagacaccaaagtcctgaacactgtgcaacactgctgctgagaattctcatgttccttgacacaaaataacattactaagccttagccttaatcaaatgaggtgggggggaaatcttttgtgtaatgctttataaacatctgcagcttgaatccataaatggcttctcagtgattcagaatgtggagagctgcccwttatgcagctccacaaggaactcatggttacacatttcaaactttggttgagagatgttgtttttccccttaggacactcacatgggagtcaagaaggtggagcaaacacaacctctggtcctataaggacaccccaaattccaggtgagtttcaaactttgaggcagaaaaacacactgaaagcagctttctcagaatgtcccagcaaggacgaagagactcatttgaaagcacattctccacaatgcccaacatatgaatccaattgctcctctttacaagttaaaggatgaatgagaatactacaccctcttggtaggaaaagatggaatagtcttttcttcctgggttctgcamactagctgagctcatactcagatctgtccctggcctgtcccagagaagtgccatgttagttactaaagcttccttcctaaaygaatgatcaccaagaggaccccatgtcatacctaggtcctttctatcccaatccaatttccacttatttctggggtccaaggtgaagcatgtaattttccttttacgattacagacagggaggagctacaagaggcatttatgttagatggagtgaaaactttcttttggttccccaactaatttttttttggtcgagggaccgcctgctgatgtggacagaataaacttttcagaaagtatgcatgtgcagtgargaggctgggacacctggttctcctgagcatcaagacaaggcatttgttgcaaattctttatttgacttggaattaaaattgatttgtcatagagaattactaaagggaagggttctcctaaggttgtaaattacccttttaattctctcctcttcagaggtctccagactgagcctctcttggggaaagagaagaatgtggcatgcaccgttctcctttgccccagcttgcctaagcacacctgaagacagaccagacagagacaggggtgggctgtcccaagggagagcacaggggaagccttagctgtcatcaggcagcaagattcttcccagctccagtgacagtgcaggtgggatatctcagggctggaaaccagggccacagtgggcaggagtagaaaggaagaacagaaatcgggccctcctgtcagtcycccccacttctgactctacctccctctccaaactcatctaaaccaggaaaaggtgaggcaaaggtagtgctgagcaggaaatcagagataaaccaaaatttccaagaagaaaacagataatgagactttccatgcctcttctttctcaagccctggttcattgcacacatatacaacccactttgcaactgaatttagtggagttgtcaagtcatattttagtcctaaaagagcctgatttcaaaatgtgtagaatattaatccacaagtgatatataattattgaaaacatttgaaaaaatacaactaaataaaataatggaaatataaatcaattattatcaatctcaccatccagaaatamcatggttaccattttaatatacgtcttttttttttttttttttttgagatggagttttgctttgttgcccaggctggagtgcagtggcrcgacctcggcccactgcaacctctgcttcctgagttcaagcgattctyctgcctcagcctcctgagtagctgagattacagcatgccaccatgcccagctaatttttgtagttttagagatgggrtttcaccatgttggtcaggctggtctcaaactcctgacctcrtgattcacccacttcagcctcctaaagtgctgggattacaggcgtgagccaccgcacccggcctttcctgtcattttaaaatgtaaaatatataccaaaatgtgattacaccttacayggtgtttagcaaacattgcctactggttaaccatggcttccatgtcattgaatatttcctcctcatattgtagtgcgtaatgcaatagatgtaccctaatttatttaaccaatcctttattgcctccatttttgttttttaatacaatgtaaggtggataggtggatgctcttatacaggaaaaaaatgttcctttcaaaagaagcctacatttccttttatatgtttaataatattataccaaagrcatctacaagattcaacaagtcatcctgtccttttttagaaacatagttctcctgaagggacttgaaaatcctgactgatgataaaagattaaagcaagaaggctgttggacaaataccttcagcaaattgctcttccagaattacctgcctattggctggacctattggccagacccccctgcagcgctgactgtggtgcttgtttcaactaggtcaattataaagtgcatttttgtttttacaaagtgtgtctctgaagctcacgcatgtcatttaatttactcataccagaatggctgatcatcttggcatccctcttggccttggctttgattcttgcagtttgcattgcagtcaacagtcgaagaaggtaaggggctgtcctgggggctttcaacttggaaagggcatcatttaaacctgggctttatatccttgctgctcagagcgtagtccctggaaccagcagcctgggtaccctgggagtttgttggaaatgcacaatctcagacccaaccccagaystcctatggcagagtctgcatcttaacaagtttccagggattcatgtgcatggtgcagcttaagacatctttctctgccccggtttttagagacaggagacacctgtgattgtttggctcatcacttttaggtagtggttgaatcctttgtgattttacatgttttttagggttaaacctcatgcagactctgtctgatgaaagttatgaagtatctcaccaggaaggcacacaaaagtatatactcattcattgatttgttaaatatttattaaatacattcacaatgcacaaatatcgtataaagattcagtgattcatcatcccctgtagcctctctgaggcccagggaacctttaagaacttttaccagaaggaagtattggccttgtgcttttgtttgtcgtttgtttttttattggccttgtgcttttgtttgttgtttggtttttgtaatgatatcattttctattttctgggaactgtagttgaagagattcaggttatagcataagaagagcactgtttcatcgtcttcttgctgttaggaggtctatgaagcagagaagaactttcctttggaaaacaactaaatgaagacagtcacctcsctagaactgacacrtgggctgtttttatattcttgaaggccactctctccctacctgaaccaagacctataggtttacatgttatttacattttatatataatatatatatatatatatacacatacattatatatacacaatagtaattctagcaacagaggaaatgacctttaacaggggtataaatctaaatttataaaagtataaatctaaatttcttacccaagacactttaaagatacattatttttctccaggacgtaattcataggaatattaagccttttgtaaatgtccctttagatggtttctcataaggtaaaagaaacttatttccaagcaggaccacctttattgtgtccccagatcacctcacagggcagaaaaatgcccctcagtctgggagaagayctagagagaattatggactccttactggtttttggaaagcaaccaacagctaattccaacaccatgggcagcccatacagtctctaattatctgagaaaatcaaatgatgctgttayaataattacgctggtacaagttaataaaagtgccatgttacagtcaaacagctatgttgctatctataccattgagggcatagttttaaaaagtagttatgctacctgattgtataaggaacaaaactgagagaaaaaatctaaaaggccgcctatgattgaatggaaagattttttttagttgaatttaaataatgtgacttgggggagcctttacaaagagtctttatacctcccttcagcttcctcattttcccttggattacttttgctcaattaaatatgaatttcctattgtgtgcaatcagccctttattgccaagccctagaatgcaccacttttgctcacatacacagtccataagctttgcacatgtcaccatagaaacgctggcatggatgctgtcgacatttagggagacctcggagaagcatctcagctgtccctaagagcagctggagtccatacattggggctgggtatctcccccatcgtctgtgtcttgtcagcagcagacagcagagaaggggcctcattgctgccctctccctcctcccaagaccagcagtcaccctggcaaccggcaaacagggacacacagggtccggcacagcgagtatctcaccaggaaagtagctgcttggatgccataaattactatgtcctgatttgataattgaaaacagatttgccacgcagctaaaaggtggtgaacagctgtacgggccccttaatgggctctgtgattctaaagctgtcaacccatttctaatccccttcaaaggctgaggcttttctgctttgagtgtcacatttaagagaaagagatacagaatcctattttcatcagagaaagtttggttgaaaatggggcctccaataggtgttcatttattcagcaaacatcttttgagtggctcctgtgactaccagccctggcaaggagaaagagaaggtaaaaaacaaaaagagtaccaccccttttctaaaagaatcttgaggtttagtggcagtattggcctcttgaatttgaattggctaatatttattgagaacattccctgtgccagacactgttatataaattatggttaaaagacaaaagtggaaaatcattagtctctgaagttgacatacaaggatgggtcatgggcttgcatgatgaagtgatctgtgagtcacgttgtcttaaagatgctgggttgggggttctattacttctttaggtttttccacccctgccatcatccaaaacagctttctttgctgttcctcatgtcacctgactccttgagttacagctctccaagagaaatcatattttattcccttttcatgagagcacataattattttaggagtcagttgggttgatagatactgcgtgaggctccagagaagattttcctttaaagaatctatctgggccaggtgcagtggctcactccatgtgcagtggctcactttgggaggccgaggcagtggattagttgakcctaggagttcaagaccagcctgggcaacatggcgaaaccccatctctacaaaaaacacaaaaattagccgggcatagtggcgcatgcctgtggtctcagctgctcgggaggttgaggtagaagaatcgcttgagccccgggaggtggaggcagcagtgagccatgatagtgccactacagcctgggcaacagagtgagaccctgtctcaaacaaacaagcaaacaaacaaacaaacaaaaacctatcttatttgtctaaagaggagaaaaaaacatgagaactttactatgttgcttgtacataaaagctgttcatcagccttcactttaatgggaataatcgtcttttctataaaccccagcaggcagtcacccacactccaatcagtaggtcttctctacgcatcgccataatttagaaatattttccttctcttatgctacagtctagctcctgcaatctgagctcacccaacctcgtcctgctgtctagaacagtgctatgcaatagaactttctgtgatgatggaaatattctatacctccactgtccaatatataactactagccacaactgagcacttgaactatggctagttcaactgaggaagtgaatttttaatttcatttcattgtaattagtttaaattcaaatagccaaatgtggctggtggctaccatattggatggcacagctctaaaacagtgcaaaataaatccctaaatatcgttaaggattgtcaggtagaagagtcatgagatcagttgccaagttacccacctaaatcttttragataaattctgccatgccataaaagtatgttacctggcttctaaaccccagccagcctgccctctctttcctggtgaggtctcagtctgcctccttccacactgtgtgattgctgtgtgctcagctaatgcctgagatttaagggaagaggagataaaggtaagacacagatccatgaggatctctgatcttcagagtcagaagatccaagctgtggctgggcgcgggggytcacacctgtaatcccagcactttgggaggctgaggcaggcagatcatttgaggtcaggagtttgagaccagcgtggccaacatggagaaaccctacctctactaaaaacacaaaaattagccaggtgtggtggcgggtgcctgtaatcccagctacttgggtggctgaggcaggagaatttcttgaacccaggaggcagaggttgcagtgagccgagatagtgccattgcaccccagcctggttgatgaagtgagactttgtaaaaaacaaaacaaaacaaacaaacaaacaaacaaacaaaaacagaaaatccaagctgtgattcttgcagtgcagtgccataacaagctgtgaaactttggacaatacttcttggacttggtgtccagtttacataatgaagaagctgggctagatgatctctgaagccccttaaggtctagtgctccttcttaaattcttataactaggaataacttaaaaattagaatttgtctcttaaaagcacttattagaygcctagagcactgaatattggaatgagttatttatgagaatcatcctaccctcctgaaactactcagacagatagaaacacataaatccaaagggaaatgcaggccaaccaaaaaccaagcacaatattcctgtgtcctataggtcaaatgttatccactgtcaagatcagcttcgtttagattaacaacattaatccccacccactcccatgcacagacatattttttatgctcataaatcactttcccacaatatttcattccatccctcaaccacccattggttagggaaatgggaattactttaactagacaactttcctccaaagaacacaggggccagggaattggaagtaacacaagcagtattctaccttgagccttttaaatcctcttcatagtaaataataacgaggtaggtggaggcagccaggagaaacaagcaaaattcatttcatatggcttttgttatattaacaattatagatagcacttgaaagcttactgtgctccagatactgttctaagtgttaacccaaaccttagtttccttaccccgcataagagcaagaataacaattatttccttacccctcataagagcaagaataataacaatagactcatttatttagtgacagtctctgtttcaagggcttttcacaatcctatgatattgctactcttagtaacctggtattattgatgcaaaactgaggctcagagaggttaagtgagttgccccaggtcacatagcagtaagttctcaaaaccaggccttccgagccccttttcttctttcttttttccttttttttttttttttttttttgagacggagtcttactgtgtcacccaggctggagtgcggtgatgcaatctcagcttactgcaacctccacctcccaggttcaagcaattctcctgcttcagtctcctgagtagttgggattcagccacgcaccaccatgcccccatgaccggctaatttttgtatttttggtagagatggggtttcaccatgttggccagctggtctcgaactcctgacctcaagtgatccttctgcctcagcctcccaagtgttgggattacaggcatgagccattgtgcctggtctctttttcttttttgaaacagggtctcactctgtcacccaggctggaatgcagtggcacaaacacagctcactgcagcctcgacttcctgggctcaagtaattctcccacctcagcccccaaagtaactaagactacaggcacatgccaccacagccggcttatctttgtattttgaatacagactgggttttaccatgttgcccaggctggtcacaatctcctgggctcaagtgatccacccgccttggcctcccaaagtgctgggattacaggagtgaaccactgcacctggcctccaaggcccttttcttgaccatgcatcctgctggactccatctgtattcctggtccccatgaatctgtttcacagttcaagcatccttcccccaacccctcatcaagccttatgctagaggagacaggatctacctcctgttgaggaggtataatttttatttccccaaacaagagcttaaagtttatggccttggcagtcctacagggaatggtccatgatcatgaataatagaggctttgtcactattactccaaatatccagaggcaaagtgaacaattctgacttcatactgtttccaaatctccagagggctggcagcattgacagagccaggcagagcccaggctttggtcataaaggcctggatttgaatattggctctgtcattcttactttctgtgtgacctcgagcaagttattaaacctcttttggcctcagtttccattgctgtattatgggaacaatagctgctttgaaagagtgttgtaagaattacagaaaattacatgtaaaatgtctggtattcaggaggtaatctgcttccctgaatccccatcttgcttgtagttgtgaagctatgcaactttccttcctctaagcatagtctgactcgtatatgtgtagtagtgatrtgttacaggaaagaggaagcattgcattaggctgggtggggtgaagcaatggacagtaaccagggaaaagatcaaggtcgtactcttccatagcaactttcttttgcgtttgggtcttaagtaatgtttgagaaaccttaaattaacragaataatttgtcttatgttattaaacttcctatatcagggttgtatgagttagccaatgttaggaaaacatcactatggccttatacctctagaaaaatgttgttttattcttctcgatacattcagtaataatgctgacaaggccgacaaagtgttgactgggagaggaagttatgggactttctggaatatacaaatcagaatgatttacaatcatcatgttgatggtttatctaaatctgcagaaactgctaaaatgcttaaaagaggcaaacatttccattgtgaagtaagatagaaagagaatcagaacttgagagtcagacagaccagggtttgaatcctctttcttacttgctgagttacttgggggaagttactgaattttctgatccccaaggtttcttcacttggaatatagagaatataataataacaccggcttcctggagtcttagttgctggtttgcaaacttgactgtgcagagaagcccctgaggggttgcaaatttgactgtgcagagaagccacagatcctgggctccaactctagagttttctgattcagcaggtttggggtggggctgagaatttgtatttctaacaggttccaagatgatgcttttgctgctggtccagggacctcactttgaggagtgctggttgttatgagtctggttgttaagtgctggttgttwgttgttaaagtagagaaaacccctagcacagtgcttggcacacactaaagccatcataaaccatagtgatcatcaatgatggtgctcagtaaggatgatgatctgatgcctgagtcactgcaatctttctgatatggtacattttttaaattattaggtgtgggcagaagaaaaagctagtgatcaacagtggcaatggagctgtggaggacagaaagccaagtggactcaacggagaggccagcaagtctcaggaaatggtgcatttggtgaacaaggagtcgtcagaaactccagaccagtttatgacagctgatgagacaaggaacctgcagaatgtggacatgaagattggggtgtaacacctacaccattatcttggaaagaaacaaccgttggaaacataaccattacagggagctgggacacttaacagatgcaatgtgctactgattgtttcattgcgaatcttttttagcataaaattttctactyttttygttttttgtgttttgttctttaaagtcaggtccaatttgtaaaaacagcattgctttctgaaattagggcccaattaataatcagcaagaatttgatcgttccagttcccacttggaggcctttcatccctcgggtgtgctatggatggcttctaacaaaaactacacatatgtattcctgatcgccaacctttcccccaccagctaaggacatttcccagggttaatagggcctggtccctgggaggaaatttgaatgggtccattttgcccttccatagcctaatccctgggcattgytttccactgaggttgggggttggggtgtactagttacayatcttcaacagaccccctctagaaatttttcagatgcttctgggagacacccaaagggtgaagctatttatctgtagtaaactatttatctgtgtttttgaaatattaaaccctggatcagtcctttgatcagtataattttttaaagttactttgtcagaggcacaaaagggtttaaactgattcataataaatatctgtacttcttcgatcttcaccttttgtgctgtgattcttcagtttctaaaccagcactgtctgggtccctacaatgtatcaggaagagctgagaatggtaaggagactcttctaagtcttcatctcagagaccctgagttcccactcagacccactcagccaaatctcatggaagaccaaggagggcagcactgtttttgttttttgttttttgttttttttttttgacactgtccaaaggttttccatcctgtcctggaatcagagttggaagctgaggagcttcagcctcttttatggtttaatggccacctgttctctcctgtgaaaggctttgcaaagtcacattaagtttgcatgacctgttatccctggggccctatttcatagaggctggccctattagtgatttccaaaaacaatatggaagtgccttttgatgtcttacaataagagaagaagccaatggaaatgaaagagattggcaaaggggaaggatgatgccatgtagatcctgtttgacatttttatggctgtatttgtaaacttaaacacaccagtgtctgttcttgatgcagttgctatttaggatgagttaagtgcctggggagtccctcaaaaggttaaagggattcccatcattggaatcttatcaccagataggcaagtttatgaccaaacaagagagtactggctttatcctctaacctcatattttctcccacttggcaagtcctttgtggcatttattcatcagtcagggtgtccgattggtcctagaacttccaaaggctgcttgtcatagaagccattgcatctataaagcaacggctcctgttaaatggtatctcctttctgaggctcctactaaaagtcatttgttacctaaacttatgtgcttaacaggcaatgcttctcagaccacaaagcagaaagaagaagaaaagctcctgactaaatcagggctgggcttagacagagttgatctrtagaatatctttaaaggagagatgtcaactttctgcactattcccagcctctgctcctccctgtctaccctctcccctccctctctccctccacttcaccccacaatcttgaaaaacttcctttctcttctgtgaacatcattggccagatccattttcagtggtctggatttctttttattttcttttcaacttgaaagaaactggacattaggccactatgtgttgttactgccactagtgttcaagtgcctcttgttttcccagagatttcctgggtctgccagaggcccagacaggctcactcaagctctttaactgaaaagcaacaagccactccaggacaaggttcaaaatggttacaacagcctctacctgtcgccccagggagaaaggggtagtgatacaagtctcatagccagagatggttttccactccttctagatattcccaaaaagaggctgagacaggaggttattttcaattttattttggaattaaatacttttttccctttattactgttgtagtccctcacttggatatacctctgttttcacgatagaaataagggaggtctagagcttctattccttggccattgtcaacggagagctggccaagtcttcacaaacccttgcaacattgcctgaagtttatggaataagatgtattctcactcccttgatctcaagggcgtaactctggaagcacagcttgactacaygtcatttttaccaatgattttcaggtgacctgggctaagtcatttaaactgggtctttataaaagtaaaaggccaacatttaattattttgcaaagcaacctaagagctaaagatgtaatttttcttgcaattgtaaatcttttgtgtctcctgaagacttcccttaaaattagctctgagtgaaaaatcaaaagagacaaaagacatcttcgaatccatatttcaagcctggtagaattggcttttctagcagaacctttccaaaagttttatattgagattcataacaacaccaagaattgattttgtagccaacattcattcaatactgttatatcagaggagtaggagagaggaaacatttgacttatctggaaaagcaaaatgtacttaagaataagaataacatggtccattcacctttatgttatagatatgtctttgtgtaaatcatttgttttgagttttcaaagaatagcccattgttcattcttgtgctgtacaatgaccactgttattgttactttgacttttcagagcacacccttcctctggtttttgtatatttattgatggatcaataataatgaggaaagcatgatatgtatattgctgagttgaaagcacttattggaaaatattaaaaggctaacattaaaagactaaaggaaacagactcagaagtctctaatttaaaagaatgggaggctgagagggacagaactatgcttatctggcaccgtctgggtaatttagaggaacaaagtcaaaggtatctgaggtggctgaagcctcacactcattttatttttaaaaaaagcaaaaacaaaatgggtttccatcaacttgaaagtcttcttttggagaaaatctggttttctatgagtgatgtgtggttcacatgtttcaaactaagtgagatacagtgaagtgttagttcttttaaagccaagaactactcctggacttccagttaaagagaggagagtgtacataccttcattccctcatgtaagcctctaaaaagaaaataaagagatatttccagacggaatcaaccagtggagttaaagagattggaagaagagacaagagcaacaaaaacttgaagctgaaaagtgatagctgattggtaactgaatgaacaagtctggaaaagctgactcctaagcctgcagtgtggaaaattgagaaacaaccagacttatgtgacagaaccatcaaaaggctcaatagctattctggaaatgaatgggaagatgaggctaagattagggggacaagcttaaagtctatgtaagaagcagttagaactccaggtccccttccttactctgtgtaactgaacaccgtcctttcccaatctcagcaaaagaccagaagtttattttctggagacagggaaatagagagtctctggttgaagtccaacagcacgtacacagttgacattagaaataccacactgagagccgggcatggtgatgcatgcctgtaatcctagcactttgggaggttgaggagggcggattgcttgagctcaggagcttagagaatagcctgggcaacatggcaaacccttgtctctataaaaaatataaaaattagccaggtatggtggtgtgtacctgtggtcccagctactcgggaggctgagttgggaggatcatgtttgagcctgggaggtcaaagctgcagtgagttgagattgctccactgcgcagcagcctgggtgaagagtgagaccctgaaaaagaaaagaaagataagaaaagaaaagaaacaagaaaagaaaagaaacaaaaaaagaaaagaaaggccatactgaaaaagtgaaaccatgcttaaagagtgttgagattccctatcctcctctcccagcttggctctcagaatgctgggagctaggcatatgttctccaggcagaagctcagtgttgctggggaatcttatgagcctgagagaaaattctaaaaatattaacatggtagttccccaaggaaatggcccaaaaaaagcgatctgcaatgaagatggcatctcaagccccaccaggcacccagaaagctcagtcagctttctgtagcttactctcacacatgagctgttaccaaggagcaccagacatttggagaaagcatctaatattaaagtcagggactacaaaaaacaggaaaaagtaccttgacagaaaagaaactgcttagagaaggaaactttttctaataaaggtcaccaatactctcagtaagataagaggagatggtatatctataaaacaaaaacacaatgccaggataaaaaggaacatatagagaacacctaaaaaagaagctttaaaaatgtaaacttgagagcacaaatttaaaaataaacctcacagaaggtttgcaagataaagttaaagaaataccctcagaaatacagcaaaagcaaataaatggaaacaggggggaatacattgggaagactggcacccagtccaggaaatttaacatgcaaatgctgtaatcaaagtcacaggaagagaaaacaaataggaagaactcatccaagaaaaaaatcaagaaaacttcccagaactttaaaacatgaatatcttgactaaggacaaggtgagtacttagtaaaatgaataaaaacagacccacactaatgcatattatcttaaaaattcatgacacctggggcaaagaaatgatcctatgaacatctagaaaggaaaaatacatacatggaggatcaacaatcagaatagaatcagatttctcaatggccacattggaagatagaagaccatgaaacagggcctcaaaatactgaaagaattatttccaagctagaattctaacttagttaagctgcaaattaagtataaggatggaataaagagattttaggtaatcatagtctccaaacctgctcacccattcacaggcaactcccaaaggatgtactccatcaaaacaagggagttaccaagagaggagaggacatgagtttcagaaaacaaagtagagggagttcttaaaatgatgataaagggagatcccaagatgacagctgtacagcaggtctagagaacacttaaagttggagtactgactaataattaaaacaatcaatgttttgcttttattgacctctaattaaaaagaaaattattttttgttgtattcattaactactgatgcattaaaaactgttccaaaattagtcgcttaaaataacaagcatgtatttatttcttatgcatccaccagttaactgagtacttctgctgatcttggcagggctcacttgagcatgacgggactcatgcatttgtgtgtgtgattaacaaacaggtcagctagaagctgtctgatttcggacagcttcatctgggatgattggggtctttttccatctgactcttccatgcctccagctggctggtccaggcctgacagggttccaagtaagagcacatgctcacaggtcctcttgaggcctaggctcagaactggtgctctgtcattccaccatattctattgaccaatcaagttacgagagcagcccagattttaaaagaagggaaatagattctatctcctaatgggagaagctgcaaagtcacactgcaaaaaatatggttacaaaaaagccaattatcagggccattagtgtgatcaagatctacgatagacatgttgaaagattcttgtgctcaagggcacctctcatgtttatgcttaaaatacactcaccatttgagccatattggcaatggcattaacttagaaaaccatgaacaactttataaaccccatgcttattggaaaaggaaggagcaaagtcatgtgtaaatgtgtttgggagattgcttggtatggtagaaacagcatgagctttgggatcagacaaattttgggttttaatactgattctaccacttacttaactgtgaaactctgttcacacatcttaaatattttgagtcagtaaagagacagtaaaaccttcatagggtggctatgaggattaaatttaacaagtacrtgtcagtgctggggtatattaggtcctcaaaaatattaattcctacctgccatcacccacatatgcacagtaggtacttaacttcttccttcaccatttcctccaatgttctgaactctaaccaacttttaagtgtgaattgctattaacttacagtggctggagacagattatttcagaatctgaagctccccatgaagaaagcccttcaattttagttgaaaggtttttgctttcaaagcaaggctaacaagcagggagtccaggaagcwaataactggcattcgttgattaaatcttggccatctaggttgtggctgtaggttaaccaaagttgggcatccacccaaggctttgatcgtcacctccaggaagttgtcttgccccacccctatccaggatgagctcattttcccctctgtgggtataactcttaccttgtccatatgtcattgtagttcttactttgcaatttcattaatccgcccatgaacctgtctgttctactatatgatgaggtgtgagggtacggagaaattcattatggtcccccaaaccaggtaagtagaaagtggtagaaccagggatagagctcagctctctccaaagtctctggcttaacatgcctgaattgtctattgtcagaagtttggtaaactgaatttgctgaagttaagacatcatctccaaatgttgcaaaccaggtcagtattccagagctccctgtgcctggtggagccaaaggaggctttcagaaaccactgaaaagatttggggatgagtacactcaccatttagaccacattggcaatggaattaatttaggaaaccataaacaacttcatagatgctgtgcttattggaaagggaagaatcagtcatgtgtaaatgtgatttttgctgtgatgcccggggcaaaggctcagtggagaagaaagtctggctgggcatcctggcctcaagccccatttcttgcctgtgttgacacctggtcttgaacaccagtagtttgcctgtcagggccgcccataacccggctcctcaatcctgccccattaggcttccagactgctgatctcattacgtggtgactactgttttccagaagtcttgtctaaaccacttcctccttcctctctcccgaaagaggaataataaacctcagaagaggaggctaaggtttagcttttaaaaggtgatatttaaaacaagactctcagttcaaattcaacctctgccatttacttatgtataaccttacacgaattattgaacagttctgtgcctcggtttcctcatcggtaaagcaggaataataatctctaccggaaagaatgctggggggttaaatgagataatatctgtaaaatgatggaatatagtagacgcatataggtttccttccctcatttctgctatcttaatcacttttgtgtgaatacacagtaggggtctagaaagaatatgaaccatgatttgggagaagtcagaggtgttccaaaaatttctgaacctctcccaaacccttttaagcactggggtctgaaaagcctaccctctcccaccctaagatttccaaatagtatcaaaaagaagaagagattcccactcctgttttctggggaagggtggaatatgcaggtttattattgccaacatctataacacaaaggctctgccagagccaaccttcaaggtgacccctagatagggagagagaagaaatgagattgaaatttcaagggcctagctctggagattctgaagatccttgaccttgggaactcacccatgcagaagtggagagacaggttttcaataataaaggctaagggcttcaaatttcagcttgggttactagagttcagtgagagatttactttttattttcgcctcttctaggattctttaaatctcattaagaaatgaagagagaaatgtgaagaaaagctgtcagaggggtaaactgtcagagggatgcaaagaagagtaagatttcaaacaattgttctgaaagaaaattagtagctatttaataaggactgtctatgcatatagcagatatttaaatcataataagtataaagtaacctcaaaagcgtctcaataaggacagcatctctcttccaaacctcaatgggttttgctggctgcacttccagggcaagttgtcttggccacactttacttctcttccactctctcaatccctttcactgggcttggaggcacagcaactcagaactacaaagtctggtctgggcagcagagtcattggctgcgctgtactctccctcagggcagtggcaagctgggacctctctcaataggcaagggacctccgactccctgttttagatcacttcccccttggacaaaatttagacctttgtgtaaaagctgactgagaaaagtgcaatgtgttcatctgtcaagccaaggatgagagtaatgaaaattttcccatcaagtttcacgtcctttgcagaaacttcgttttcaaccatcttgttggccttctctggcctgttgataatgcgccccctagtggatgctttacaacatcccctttgtcttcgtagaaactgagtccttccgcctgacttcagttctcgaatcctcaacgtaaaaccagaaag

SEQ ID NO: 5631 - DNA, 61916 bp, Homo sapiens
gaagatagagtaaaaaaatggcttaaaacataaaaaatggtacacctgtagagagcacttaccatgaatgaaacttgcaggactggaggttgctctgggagagtcagcgagtgagtggtgagtgaatgtgaaggcctaggacattactgtacactactgtagactttataaacactgtgtacataggctacgctaaattaattaatttttgttttttgaaacagtgtcttgctctgtcgcccacgctggagtgcagtggcacaatctccactcactgcagtctccacctcctgggttcaagcaattcttctgcctcagcctcctgagtagctgggattacaggcatgcgccaccaaacttggctaatttttgtatttttagtagagacagggctttgccacgttgggcaggctggtctcgaactcctgacctcaggtgatccacccgccttggcctcccaaagtgctgggattacaggcatgagccactgcacccagcctattaaaaattttttaaatctgcaataattaaccttactttactgtaactgtactttataaatgttcaaatttttttaccttttgacttttctaataacacttagtttaaaacacacgttaagtagttgtataaaaatattttcttttttatatctttattctataagcttttttattttttaaattttttacatttaaacttttttttttttgttaaaaatgaagacacaaacacacacattagcctaggtctacacagggtcaagatcatcaatattgctgtcttcctcctccacatcttgacacactggaaggtctccagggacaatgacacgcatggagctgtcatttcctacaataacaatgccttcttctgaatacctcctgaagggcctgcctgaggctagttacagttaacttctttttttataatttgaagaagtacactctaaaataagaaaaagtatagcacagtgtattagttcattctgaaattgctataaagaaatacctaagactggataatttgtaaagaaaagaggtttaattggctcacagttttgcaggctatacaggaagcatggcggcatccacttctggggagaccttagggaactagcaatcatggtggaaggtgaaaggggagaagccacgtcacgtggttagagtagcaagaatgggctggggaggtgctacacactttttttttttttttttttgagacggagtctcaccctgttgcccaggctggagtgcaatggtgcgatctcagctcactacaacctctgtctcctgggttcaaacgattctcctacctcagcctcctgagtagctgggattacaggcactcacgaccacgcccagctaatttttgtatttttagtagagatgggttttcaccatgttggccaggctggggtgctacactcttttaaatgaccagatctcatgaggattctatcatgagaccagcaccaaagagatggtgctaagccattcatgaaggaaccacccccatgatccaatcacctccccccaggccccttttccagcagtggggattacaatttgacatgagatttagtggggacacagatccaaaccatatcacacagaaaatacataaggcagtaacatagtcatttattatcaagtattatgcactgtgcataattgtatgtgacttttatatgactggccatgcaataggtttgtttacaccagcatcaccacagacacatgagtaatgcattgtgctacaatgttatgacacctacaacatcactagatgataggagattttcagctcctttataatcttgtgggaccaccattgtatatgcagtccattgttgacaaaaatgtcattatatagtgcatgagtctacgtctatcagagatttattatggaggttggctccctcaattatggtggctgagaagacctaaaatatactgtccacaagagaaccagggaagctggttgtgtggctcagtctgagtatgaaggcctgagaacctggagttctgatgtccaagggcagaagaggaagggtgttgtccccgctgcaatagagagagcaaattctctcttcctctgcctttgtgttctatccaggccctcagccctttggatggtgccygcccacattggtgaggtcagatcttccttattcagttcactgattcaaatgccaatctcttccggaaataccttcacagacatacccagaaataatgtgccaccagttatctgggtatcccttaacccagtcaggtttacatctacaatgacccaccacaccagtcaaatacaaatcagcaagactcagctggagtgaagtagtgcagatgggctgggcactgcttggtgggtccactgcttacctttcccacctcacattttacatttctacagggggcagatgcctgagcatagctctgtgatcaacaggctttgtgggtttttattatttccacactaagattcttgagattggaatgttatcccctttccttttgaaatcagctcacttgtcctagagaactgatgtttatggtttcttctgaataaacatagaaattgatcctcccactcttaaaactttagaaagttacatttgtcttatctgagttcctttctcgggtttccaactgtcagccctcccagatagtaatgaggcaggagaacagggtctggaaacaggggatgtaaggccgattcaggctgacttcctagaactgaatcaaaaggaaaaccccacctctccatgtccaagtaacaaaaagatcagaggctactccctttacactccgcccctccccactcccattccactgcattgcagatgaaaaattgaaagtacctctgattggttgcctccctctaccaattagactggttgtgggccaagtcttcatttacatagggtgtaaccaagtaaccagtgggaaacctctagagggtatttaaccccagaaaattctgtaactggtcctcttgagacacttgctcaaatctgctcccactctgtggagtgtactttcatttcaataaatctgtgtttttgttgcttcattcttttgtcgctttgtatgtgtgatccgttcaattcttcgttcaaaatgccaagaacctggatgactcacagtcaagaccctccagtgcggtaacagtatcaaggaactgacacttaccagatcatcacatctggacaataagaagccagacccctcacctgtcatgattgcctaactgatcacctgcttcttcttgaccaactcctcttccttacccctccctaattcctattttcctatatgtagttacatttcttccctgttatataaacccctgatttcagttggccagatcacagctgcagcatgtgattaagccttcttccctggcaataatcattgtctcagtgattggcttcctgtgcggtgagcaattgtacctagatcaaactcctggcattttggtagcacttttttttttaggtaaggaagttgagaaatgttacaggacttcctcaagttcctacaaccagaaaagggcagtgctgggttggaactccacttagcagctaaagttcatgtaagtaagcaacatgctagcttgtcttccaacaaaactatgtgaaaatgaaccctagctcttcacttaaagcccagcagccctgtgtgagctatgtaatctaaaagaacctcagttagctcatgtgggaagggggtgtaatatttttcttgcactgttattgggatgtgtaaataacataatttgtcaatgctctccagccagaaaccactaggaacacacctatagttaagaaagttgggtttaattctcattgcaaagagggaaaatgcaaacaatgggaaaccctgggggtgtctcagtgagatgatgttagaaaatgttattaaaggatttgggctttggtttgctgctttgggagaagttgaagaaagcatagtttttctctgggttggatagggtcaggaaactggggtaattctatgaatgtgtatcctcataaatcttacccatagggaaagcagactacaccaagtctgaagctgtaattgggctgagtgtagtggcccatacctgtaatctcagtgctttggcaggctgaggcgggagaattgcttgagcccaggagtttgagaccagcctgggcaatgtagcgagactctgtctccacaaaaaattttttaaaaattagctaggtgttgtagcatgtgctgtgatcccagctactcagaaggctggggtaggaggattgcttgagcccaggaagctgaggttgcagtaagtcattgtgccactgcactccagcctgggtgaccgaacgagactctgtcagaaaataaaagctgtaactggcaatgaagcagcagccagttctattagccaagacaactgctatatttgtgtgttttcttttgtggcttgaacaatgtttatgctttgtctgttttcagatatgatgttgaagtggtcttattctggtctagatccatcctggtcacagaggagtcttgtctaatggtgttgtgggaaatcgtttatgttcatgttcaacaggaggacatggcccagggtagtgccaggccagatctatttcagaatataaggtatccatcccagtgctggactcaccggtgttggaaccacaggggttatgactctaatggtgcttacccaaatgccatcccagacctctgagccacagtgacacaggcaggtgcattctggagaggctaaaagacagatgtcccatcagggagtaatgactcattttcctcctgagcttcaaacattacacgaagccatttccatgaagtcagtggtatttcagcccagggagaattttggacacagcaacgaggggcctgcaagttagatgacctatcctgtgatctgcctttgcctccttcatgcagcaaatatgcagtgtgtctcagagctgggctagatactgtgacacccaccacctcatgaaaaaggcagagaagcaaacaatctagctgaaaaaatgtaaaagcatgtagtgttcagtgagggcagtggtgcccacactttcctatgcaatggaatcacctgtgaatctttcaaaacactaatggttggggtcccatcccactgagttaagtgatctgggcttccactcgggcttccagcttttaaaaactccctaggtgatcaatgtgcagccaagtttgggtactattggtttaatccatcatttttacaagcttggcgggggttgggggggtgggggtggaggtggggagtgggcagtggagggtgtcacagatgttgaattggataaaagcttttgtctctcattccaggcacttgcatttagatgtaaaacctggcatagtatttcaggggatttacagatcccaagaagtgaatcagggaacgcctgtgggccttgtggtccccaagtgagaaaagtccagctgcaggagtgtccacctccaattggggtgacaggagctctctgtcctgtccagaatggtgctggccctttgtctcagtctttttgtctgtaataacaaaatacccaagactgggtaatttgtaaaaaacaaaacaacaagaacaacaaaaccaggaatttatttctcacagcctctgaagtctgggaagtccaagctcaaggtgaagcctcctcaggtggcaaagagcagaagcacaaaagagaccaaactccctccctcaagctcttttacaagaacactgagacattcacaagtgctgagtcctcaaacctactaacctcctgaaggctacacctcaaatacggattgaattttcgcatgagttttgagggacacccattcaaagcatagcacccttcggcttcagagaagctccagccctgttgtcaccaagcaggttccccctaggcagagcgccaagaagcagcccaggcgatcccaaggcgcacaagtgctctcaccaggctgcgcgctggcgggtcggtgcacagggacggggtcgccgcccacgcgcgcttggttcagggagcccaggctgtccctacccgcggctacaaaagctcgccgagtcttcctgtccacccaatcgccccacatgtcagcggttggtcgcctcgcggtgcagtgctgggcacgcgagcccctcccgcagtcattctcagcacaagcaccagcctggagccccgcagcgacagagctgagagcccccaagccgcagaggtcgtgcggagcaggtaagcgcagcctcctggctggggagccacggaggagaaagggcggccgggtcccacggccccgccaacaggacaggctatgccctttcagtaccccctcttccctggctctgtttctaatctaggaataaacaagaaagtccttagtctttgaaaagaaaatgattccaaaatmcaaaaaaaaaaaaaaaaaaaaaaaagttaaaaagttaaacatcacgtttgtttggcttaaaataattatayatggcttgtaatgagggaaatccaaaattcacaagcctcttgatgtaaaataatttaaatatctttggtttgggattatgtggttactacaaaacataccacagctgatgggaaagtggtttacttcccattaggttgcaaatgtcttagaaacacactcctggaccacagcttcaagagacgcaagcagtcacctcatctgctggtttccaagctgccctgccagaagcaggtcaggggtcccacaggggtcctcagtaactcctcaaaatcctctcccatcaatggccccaccagatcatccctacttttgaatgcttgtccaatgcaggttccaggtaagatttcctttcacaagtgacttccatggctaaggaaaaattcagcactctagaactagtccaagcccctctctgcggcagtatttataagcagcggaaccatcttgtagatttctaagcttgctggaaaataaaacactgctataaatgcatagagccttctcccttgtgaaaaggaaactcctgccagagatgaaagcaacagcaaggatagcactgtgcagagtaagggtggctaacgccaggcttcctcctggggatttacatcaggattgtaacatattagatgtaaatccacctgtgggctccagggtggatctggaggtccaggcaccagggagctggggtcaaaaccaactgttgttaaaagtcaagggaattataactaaggaataggacgctttaaaatacgacttgtggctgggcgcggtggttcacacctgtaatcccaacattttgggaggccaaggcaggcagatcacctgaggtcaggagctcgagaccagcctggccaacatggcgaaacsccatctctactaaaaatacaaaaattagccaggcgtggtggcaggcgcctgtaatcctagctactaggaaggttgaggcaggagaatctcttgaacccggcaggcrgaggttgcagtgagccgagatcacaccactgtacttcagacagagcaagactgtctcaaaaaaaaaaaaaaaaaggcttgtaagtaaataatgatacaaagaagatacatgagcagtgtcaaaaggcaggtttatttttcttccctttatccataacttagggattcttcaaatagcttaagcaaaatatatccaagttgttaatcaccacatgcatgatgctaggtggttaatttaattggtgaaatggttttgttgctccgtagagtagcagtatctatatggaccaacaaaatcatttcaccaagtaacaaaagccagtgtggcccattattctctgtggcaagtctcctttaagaagtgacatgcacttgtgctcctagctgcttgggaggcttgaggactccttgagcccaggagttccagggtacagtgagcataacttgccactgtgctgcaayctggaggacaaaaccctgtctctactaaaagaaaaaagaagaataaggagaagaagaagaagataaggaagtttttccttcgttctttgaaatctctttctgagtagcattcctcccccaccacaaaagtaaatgattccatggtgaaagacaagaaaataacttctccagtaggatgaggtggtctcataccaaccaaagcaaccaaagcttgcataccaacattgtyaggtgggtgagaattgcattcattcctaacctcttgaggcttcagcatcccaagactagatagtggaaaatctyagtagctctccaggcaaagctggccgggtggcggctggggggcattgggggcggggttgggattcagaacgctcmcccaccatgtctgaaaagcatccararagatcataatgctttgacttctgatataaccttttggggtgtttatgtacttttgatgcttcaaggaataaaaagtctaaatagaattctaaatgcaaaacctctctctgtactactgaggattctcagatggaagaatacattkgttaaccatggtaacaacatatataatcaaagttttgcattattttgagcttggttataacaatgtgctacatccatccacacacacacagaaagagaagttgttgaaaaccaagacaaggaaccctgtggttttctggatcaacaccaggaacgatcccctccagccctccctgggctctgctttctcccttcccctctttgctggttgagcatctgtggcgccaaccagtggtccccgtgatccatgcttcagggccccggaaggcccagaaggcttatgttaccagtccggtctcggtctcaagtaccagagtgacatgacctctcccttactgagcctgaccacctgcctggatcttgacgtgcatggcctcctttctttcactacagctcagatcatggggggtttgtacccatttcacagatgggaacagagagccttcaaattaggttgagactttgcttacactcccaaagctagccagcactggggctaggcttccaacccttcctctgactcagctgcacacaccatccttactaagaggacagcagccccttgcttgcttttgcatttgcattaactctctgaacccaagcttataaataaccaagcaacacattctgtactatgcatttgttattcccaaagatacagcttgattcaaaataaaatgactaagtttatttcctgctcaccttccagcacatcttggacttcaagaaagatgacatcattcaagcacttacataaattctatgttgtggcaaggctctgatccttttcttgtcacttcttcagcatcctaaatttgcacatgataacatctgttgtcctccatcagatataatcagtattgctaatctacagtgccacattggcagtagtgatttttttttttttttgagacggagtcttgctctgtcgcccagcctggagtgcagtggcaagatcttggctcactgcaagctctgcctcctgggttcacgccattctcctgcctcagcctcccaagtagctgggactacaggcacccgccaccacgcccagctaattttttgtatttttagtagagacagggtttcaccgtgttagcaaggatggtcttgatctcctgacctcatgatctgcccgcctcggcctcccaaagtgctgggattacaggcgtgagccactacgcccagcctggaagtagtgatttttatccactttttctccaggttcccagaaagaatattcaacttagtatctatttggctgggagggcaggatgttagtctttgcttcatctaaaagtaaatgaggaattcagtagctcctctgaccacttcaatcacttatagacaagtataatgaaaatatattcttcatacttaaaaaagatcacctgaggtcaggagtttgagaccaacctgatcaacatggcgaaactccatctctactgaaaataggaaaattagctaggcctgatggtgcatgcctgtaatccctgctacttgggaggctgaggcaggagaatcacttgaacctgggaggcggagtttgcagtgagccaagatcgcgccactgcactccagcctggctaacagagcgagactctatctcaaaaaataaataagtaggctgggggtgatggctcatgcctgtaatcccagcactttgggaggctgagatgggcagatcacctgaggtcaggagatcaagatcagcctggccacatgatgaaaccccatctctactaaaatatataaaaactagctgggtgtggtggcaggtgcctgtaatcctagctactcaggaggctgaggcacaagaatcgcttaaacctgggaggtgaaggttgcagtgagccgattatgtcagtgcactctagcctagatgamaagagtgagactctgtctcaaaaaaaaaaataataataataaattaaaaaagtacaccatgattggttacattaaccacatttatttatttaatatttttttagacagagtctcgctctgtcacccaggctggagtgcagtggcatgatcatggctcactgtaacttccacctcccaggttcaagtgattctcttgcctcagcctctcaagtagctgggattacaggcgtgcaccaccacacccagctaatttttgcatttttagtagagatggcgtttgaccatgttgggcaggctggtcttgaactcctgacgtcaggtgatccacttgccttggcctcccaaagtgctgggattacwggcatgagccacagcgcccggcctaaccactttaaaaatatatttaagtgcccccagtatcactgctttctaaactatttcaaaaactgaagggtactatttctataataataaattgttagagtataatattcacagtggtaattcaggtaatgagagtattttacaaggcagaactaattaggttggaataaaacaaaatcagacaccaacaataattcatatgtctcaaatagtgcccttgcctacctgtctttatctaaatattagctctacacattgacaccacgttagtagccactaaaaagaagagcaagcactctgaattttagtctctgttatgccatttcctggcatttggaggaaaagcacattctacagaaaaatcacgggatggyactatctgttttgtatctgattttaacatgtgttatctcttaggtacagggtcatacacttggaaggtgtgatattgtgaaatatgtatttggtcttcctcatcttttcctgacatacggttccttcaatccttggaatcttctgtgctaatgaggtgactggaggctgagggcctctagatagcctcagggtgggaactttttgtgggaaaaatcaagttctgattacagggttaagatattcagccccaggccccaacctccaaggagggaaggggggctgaaaattgagttgatcgttaatggctaatgatataatcaatcatgcctacaaatggaagcttccataaaaattcaaaaggaggccaggcgtggtggctcacgcctgtaatcccagcactttgggaggcctgagtgggcggatcacgagatcaagagatggagaccatcctggccaacatggtaaaaccctgtctctactaaaaatataaaaattagctgagcrtggtggtgtggtaaaaccccgtctctactaaaaatataaaaattagctaggcctgtagtcccrgctacttgggaggctgaggcaggagaatcacttgaacccgggaggtggaggttgcagtgagtcgagatcgcgccactgcactccagcctggtgacagagcaagactctgtaaaaaaaaaaaaaaaaaagttcaaaaggactgggtttggagacctcctgggttggtgaacacatccacatgctgggagggtggtgtaccccaacttcatgaggacagaagctcctaggatcagaacccttgctgacttcaccccatggatctcttcatctgtatcctttatcatattcttttttttaggctagttaggtgagcccttattatattctttgttaataaattggtaaatgtgtttccctgagttcttgtgaactgctctaacaaattaattgaacctggggaggggcatgtggcaaccttaatttgtagctggtgggtcagaagttctagaggctcagatctgcaactggtatctgaagttggggacagttttgtgagactaacccctgaacctatgagatctaacactgtctttaggtagggagtgtcaaaattgagttgaattagaggacacccagctagtgtccactggagaacctgctggaaaacggattgtttggtgtctggggaaaaccttgcccacatttggtcacagaagtattctgtgttgattgagagcagaaaaaaaataaaaaaaaaagctttggtttgggtttttcctatctcctatattgcacaaaaggccatatatgtctgccagtaaaagccattgaccccatataaatactagccctatcattgagctagttttttccttagctggtcgtgctacagggtagcacagctccctggttgcagttttatttaaggatccttgaagcatttcaaatacttgaggggacactagaggggggcaagagatgagataaactcttcctgccctttcatctgcaccagctatttattaaagtgcatttaacatgtgtgcttggattcttccccacttgacaggtttcctctctgaccactttttggactgaagaatgggctccaagggatggctcctgccatctagtggcttcctgatgtatggcagattgttcctggctttcaaatttccacaccttgaaagatgcccagggagcctatgaaaagcccaagacctggctgggcgcggyggctcaggcctgtaatcccagcactttggaagaccgagacgggtggatcacctgaagtcaggagttcaagacgagcctggccaacatggcaaaaccccgtctctactaaaaaatacaaaaaaaaaaaaaaaaaaattgggcgtggtggcaggtgcctgtaatcccagctactcgggagtctgaggcaggagaatcgcttgaagctgggaggcagaggttgcagtgagctgagattgcaccatcgcattccagcctggcgacagagcaagactccatctcaaaaaaaaaaaaaaaaaaaaagagagagagaaaagaaaagcccaagacctcggggccatccccaaacctactgttatcagattttgaatctatctttttttctcttaagagacaggctctcactctgttgcccaggctggagtgcagtggcatggtcatggctcactgcagccttgagctcctgggctgaagttcccgagtggctgggaccacaagtgtgtgccactatgcccggctaatcaatacttatttatttttgtatagacagaggtctccctgtgttgcccaggctggtcttgaacccctgggctcaagcgatcctcctgcctcagctttccaaaatgctgggattgcaagcatgagccactgcacatggctgagtttgggattttaacttgctttccaacacatcctctcagccaaatgtttcccaaacttaagtcatttgccttccattgtcatgatttttcccatactcatatgccaggtgaaatgtgatttcctcaatatttctttaaattcataactaatataaatggaacattggtatcatttgccatatgaaaaggaagtcaaaaagaaacatttaaaaatttatttccaggaattccacctaaaacaatcttctatatcattctatattttggaaaacagtactttgggagttccttctggacactttgctgtgattcaacaccacattcccggtttgaaatttagttccttttctaacaggtgtctatgtttcatgcagaacttccatagttccttttgctgaagatgccttaatagtgatgcatggtctcaattagccattggtgtaggcctgaaaaaagagtggagaccagaaacatcttacagtgctgataattattaaagaagattctaaggccgggcgcagtgtcttacgcctgtaatcccagcactttgggaggctgaggtgggtggatcatgaggtcaagagatcgagaccatcctggccaacatggtgaagccccgtctctactaaaaatacaacaattagctgggtatggtggcgggtgcctgtagtcccagctactcaggagaatgaggcaggagaatcacttgaaccccaaagggggaggttgcagcgagctaaaatcacgccactgcactccagcctggcgacagagcgagactccatctcaaaaataagtaaataaataaaaataacacaatgtcccaactaggactctttatggatcagaaattttagcttgactaaacaggcctgttgtggttttttggtttttgtttgtttgttttgtttttgagacggagtttcactcttgttgcccaggctggagtgcagtggcaccatcttggctcactgcaacctccacccgccaggttcaagctatttccctgccttagcctcccaaatagctgggattacaggcatgtgccaccatgcccggctaattttgtatttttattagagacggggtttctccatgttggtcagactggtctcgaactcccgacctcaggtgatctgcctgcctcagcctcccaaagtgctgggattacaggcgtgagccaccacatgcggcccaacaggcctgttttaaagttgctaattgaagggtaaaatatagagagcaaaaatcagtcacatccataggaaaggctgaattccaaaacaactgaaaatcaaaaaccatttccttttgaaagataaacacatgatgggaaataatgatccgtaatgatcgtaattctgtgtcttggaaaacagacatcaatggatgactggtgcagagcacttcttctgcatcattaccagtacttaccagatcatctgtccacatataacctgatggataccatagaaacaagttaagaaatgattcaaaagttattcagataagtagatgtatggaatacctaacagatccctaatatcattacatttatgcagcaaaataaaaattctggaggacagaggccgggcayggtggctcatgcctgtaatcccagaactttaggaggctgaggcaggtggatcacttgaggccaggagttcaagcccagcctggccaacatggtgaaaccgcatctctactacaaatacaaaaattagccgggcttggggacgcgggccagtaatcccagctacttgagaagctgaggcataagaatcgcttgaacccgggaggcagaggttgcagtgaactaagattgcgccactgtactccagcctgggtgacagagttagactctgtctcaaaagaaaaaaagaaaagggctgggtgcggtcactgattacaggtgtaatcctagcactttgggaggccgaggtgggcagattgcctgaactcaggatttcaagaccagcctgggcaacatggtgaaactctgtctctactaaaatacaaaaaattagccgggagtggttttgcatgcctgtagtcccagctactcaggaggttgaggcaggagaattgcttgaacccgggagacggaggttacagtgagtcaagatagcaccactgcactgggtgacagagcgagactccatctccaaaaaacaaacaagcaaacaaacaaattctggaggacagaagaaagagaagagtgggttaaaactcctttgatgtccagctacttagccccttgtgatgcttttcagaatgatatgataaccaatactgggttgtgtgtgttacttattgggaaagatgtgaaatataatccaaaatgtaaaggatgaagaaatcaaatcaatcaagcttctgcactgctaaaacagaccaaagcaaaccaattccactcctggctgagcacaccgactatttgaagtgttcccacactagctgtgcaccccactgacctccagggatttgtgctgtgggtgcctgtggaaccagtgccagcacctctgctccagaagctggggcttttgttttgcttagtcaaatctttaaatgctatagtgatgggacaattatgttttttactcctccgtccccagctccacccaccccaccccaaaaccagtttatttatttaaaaatttttttagacatgagggtctccctatgttgcccaggctggtcttgaacccctgggctcaagtgatcctcctgcctcagcctcccaaagctctgagattacaggtgtaagtgaccatgcccagccaaaatcagagtttttattcaagatacaacttacattatctcagttttctgtccgtataatttcctcagaatccatttcaaccaaaagtaatttaaattcccactggtttctctggatacacttcaatataactattttatgtattattttttgagacagggtcttactctgttgctcaggctggagtgcagtggtgcaatcatagctcactgcagccttaaactcctgggcccaagagatcctgcctcagccttccaagtagctggctacaggtacacaccaccacaccaggctaatgtttattttttgtagagatggaggtcttgctagggggcccaggctgttcttgaatcttggtctgaagccatcctgctgcctctgtctcccaaagtgctaaagtgctaggattacaggtgtgagccactgtacctggcaaactttataattttaaaagtgaatccttaatatcagtttcctttaagaaaactttttaaattaaaaagttgtattagttgataatatacaatatcaagatacaaaatgatgacagttagaagggttagattgcttgagtggcaactgaaactttgaccttgggaatccgcatctggaatcacacaccttcttttcttttgctaccagccccgccttccagaccctgttttactacttcattgaggcttctagaccctcacctccatttttccgaagtcttatttttctgccctctcatagtttcacagtgtttcatgtttcaaactgggacrtgagtttaccgttgacaaccgtttcctaagagctttctaacctcctcaccatctttgcttaaatcattctccaatctggaaatgactcagcatttacagaactaagctagtggtttaactgcctctcctcactgaataacatatttccctaacaaaccctcttatcactatgagtttgttgttgttgttgttagagatggggttttgccatgttgcgcaggctggtctcaaacttctgggctcaaatgatctgctcaccttggcctcccaaagcactgagattacaggtatgggccactgcacctggccttatcactatgtgatggacaaagaacctctgagaagctactccacttgctccagtcttcatctaggaaagggtgaaactgaaatctgagcccaaccttctggctctaaagtgtgtgctctgactcacactacacagatcgggctttccctgctggctttattctcatggctttaccaacttgcattatcctcctagtttacttacctggtcttcatcgtactttacacacctgacctttacatctggccttcagatttagctttccacttctggttgtacccactgttccttacccaactagtggccttaaccttctggttttaccaatctggccatagcttcctgaccttgtcccccggtcttaccccctagtcttacctacctgttcttacttacctggccttaacctccttgccttaccagcctgtttctattaaccttctggtgttactcacctggtcttaacctcatggtcttacccattgtgcttacccayctggtattatccacctggttttgatctcctggccttagcaattaggccttactcacctggcactagcttttggccataccactttgccttacttacctagagtttctacttggccttatcagccccctagtcctactcacccagtcttattctcctggccttgcccactttgctttaaccaccctgccttaactgggtgctctgtccttctagcctcacacaccaggcctcagtcacctggtcttactacctgctcttaaccttgtggcctttccctccagcctttccccctgcccttatccagcaggccacatccacctttggtcagtgactggcttacaggtccccagcactgttatctttgcaccagagcccactctcacctaatctccgtgtgctggtgctacgtcaagtgtggtggtggttaggagtcaccttccgtgtgagrycaagcgttctggctcccgttgtccttgaagttgcatctcaggcttctgggcatggcagagcctgcgttcctgtgactcggctgaggccggtgtgatggagacttcccggcagcctcccggacctggtctctccaaggtcagatcttgaaacttctgggcacccatgcrartgcctgtcctggtgtgccgacttgctcttggtctgcgaagcctgtggacacatggtcaacatgaaaccaccttaacccgcttcccrtcaggtctcgtgggagggatggggcagtgcctggagcacagagaggctcaggaaagggcagttcaactggtttcrctgtggtggatccctyatgggggtctttctagcccaaactgggtgtgatcctgggatagtcaagagctcatgggaagctcttgtttttctcgtattttataggmaygtggagttttcaggaagtccaaaaaagtgcccagtggtcttggcaggctttgagtcttggccacctgacttgttgccagttcccttcacccctggtgacccctaacgtttatctggggtctcatcatggggtcagaatttgttacttcmgtttcttttatgaaagagtgcatttgggtgtatttgaattgtttattttatactctatgaagtcaataaacccattcctatcacccatcccactgcctgagctaaggggccttccacagttgacctggagagttcaagygcactgcactcgagtgcgcttctgggttgaagctgccacctggtactcccagagcctgtgcctctgaggcttcctcttaggttgtggatccgtggaagagccctgcccctgggaactgacatttcccttagaatagggacagaatggaaggtcttgcatttctggagaagccagataaggctgacaattcctgtaagattccttcttaggatgcttgactatgtgttcatattctgtattataaacatatgctacttttcatttaacattctatttttttgaaaatgttcctctgttatgaaaactttcttgatttttaatggattctccaagtcataaccattttctaggagagtgtggcattttggtaactggaagtaaccacagtttcagcattgctccaaagacttaggcgttcttctggttgttggtggagtttgcatgtcagtcatgtatctgcttctgatattttatagaaacatttgacaaggatgattttgctaacatttgccttgcagttcttctagatattgtacttattattattattattttctgcaggttggtctaattgaaggcaatggagaagtaagtctttatggatcaaaatcttagctctagaaaaggtgagggggcctgttttggaaatacrtctattcataaatatattgtttgatgtaattatgaatttgatgatattgaagcctctcagtactctcaattacccttatgggtaatcttagggcttataacatttaggagacacctgcagatgcacaacaatagctttgtttattgtgatttctaagttatttatatgatttgcaaaagttcagaaaatgtagagtaatgtaagaagaaagaagaaaataaagatcacatgtattccttctgcccaaagataatgaacacctcacaatgctgtagactcttctaggaggctcctgtgtggccagccacagtaatgctktttatttattattttattattattattattattatttgagatggagttttgctcttcttgaccaggctggagtccaatgttgcgatctccgctttctgcaacctctgcctcccagattcaagcaattctcctgcctcagcctcccgagtagctgggattacaggcatgcaccacaacgcccggctaacttttttgttgttgttgttttgttttttttgagacagagtcttgctctgtcccccaggctggagtgcagtggcgggatcttggctcactgcaggctctgcttyccggrttcatgccattctcctgcctcagcctcccgagtagctgggactacaggcgcccaccaccacacccgctaattttttgtattttagtaaatacggggtttcaccatgttagccaggatggtctcaatctcctgacctcgtgatccgctgcctcggcctcccaatgtgctgggattacaggtgtgagccgccgcgccccgccaactttttatatttttagtagagacagggtttcaccatgttggtcaggctggtcttgaactcctgacctcaggtgatttacctgccttggcctcccaaagttctgggattacaggcatgagccaccgtgccyggccagtaatgctgtttaaaatgaaagaaggctctacaatggggccatgacgcacaccgcatatgaagtgggcatcttccgtgtcagtaagttttatgtatgtattctaatagttcttgaggaatctgtatttttctgttcctagaggaatctagggaggaagtaaggtggagaggttaaagtcacagctcttcaatgatcttataactcacagagtttctgtttaagtyctcaaagtgacactgtgatgagcatctgtaaatgtgtgtgtttgtgctctcctggccacttcctcagatgaccttctaggcagaattgccagatcaaaagggtacacaccttggaagcattgatgtgggatgcctgtctcttttttttttttgagacagagttttactcttgttgcccaggctggagtgcaatggcttgatcttggctcaccgcaacctccgcttcyrgggctcaagcgattctcctgcctcagcctcctgagtagctgggattacaggcatgcaccaccatgcccagctaattttgtatttttagtagagatggggtttctccattttggtcaggctggtctcgaactcccaacctcaggtgatccacccacctcggcctcgcaaagtgctgagatgacaggtgtgagccactggccagtctcatttttaagactgcattggtgtggagctgtgagtttgttcaagacagttgaagtgcagtttattataatattgctaaaggcaaacttgtggaaaagtccactttgtcctgagaagaactgacttgcaggaggtcaagtgaggtccttgacagtgctctgagccatcctgtccacttcctatgwgtcaggcagactatgagcccaaaggtcttgaagtattacggtgttaggttttgtttaaacattagttatttctgatttttctaattgtttgcatacacaatctctttttactcttaacagtgagactctagtaagtggtctcttgatgcttactataactttggggatgtttgaaagtgktgaccgagtcmcccacctggtcttctgccatgtcacttggccctgctggtccatttgtttttggccagtgccygtttgggagccaaaccttgtcacctacctccagcccaccttgcccctggggagtcaggtgcagatgcttctccgggcccttcccactgtcctgttctgatcttttacctggtgcagggcagaggggcttagaggacttgacctcattatctgagcaagctcgtgttctccctgaagcctcctggtgcctggcagggttcaggtgctgcaggccagtcaagccgacacataatattaaccatcacagggccacttgtgcctctctttttcttcctcctgctgccgcagataatccattttcagatttcccctgtatgtatcagggttctctagagaaacatatgcatttgtatgtaagatatagaaaagattcatttcaaggaattggcctgtgtgattgtggggactggcaagtctgaaatgtrcaggacaggcaggaaatgtgcaagaattgatgctaaagtcgcggcagaattccttccctctaaaacctcaatttttgctcttaaagccttcaactggttagctgagccccacccccattattgagatatatgcgaagtgtttgtgcttatgtagacacacacaagtatatgcatattagtcatatgtgtatatgagaatatatagacagtgcctaccacatagtgggcactcacaaaaatctgctattagccatgtgcggtggtgcccacctgcagttccagctacttctgaggctaagtcaggaggatctcttgagcccaggagttctttgagttcagcctgggcaacatagtgagatcttgtctcaaaaaagaaaaaaaatatgccgctattagctgctattattattgttcttttcattagttcaaatctttttccttcctccatgtaacaactgccgatccttggttctggttgtctatagttatatggagggagggaaagatttgagaatagtgttcatatctttccctatatttcctcatttaatcctgagcctgagtggagggtgaggctgtgtcagggaaataaggagacgtgggagtgaggccatgtgcttgtgctgggcaggactgtgcatggggcgcacctgtgaggtcgagtaggagagacgtygggtgcttctgggggtggagattagatttgcagattggggagtaggttagatgccctccctgggctctcaacgtggaaaggaggctgggagtgggcagtgrggcctggggcgttagcagytggaggtgggatgacagagaagaacgagaaggccaatggagaaatggcattcccactccagctttctgcaaggttgtatcattgaagtcgtgcatgtsagccttctagatgtgtgggtagaggggtaagactggaggagcagggccgagtcaaggctgggtaggacttgggtgacaccaaatgaaattagtattaaagccagacttgtgatttgagctcaaattcaaacaattaaattctcttttatccattttcaaagaygaacaggctcctttgatgtgaaacagactggttgtggactcagggagaatttagaaaagaaattaattgagtttggatctsttttacaaaatgtatgatttttaaaataaatcatttctactctttattcagtgtgtgcatttcctgacctttgttttcatttaagacaggacaacagttctgagagcagttctggatgtaagtctgttaagtaagatattaatctccttaattacggaaattacatagaaacctttatttttattttaaagtaatacacacatcatttattaattgttgtttccagatatattaattacaagcatggttttagacagcattggaaaagtatttatatggtaaataaaataacttctagttgtcaaggaaagtgaaaaacaggataagttcaagcaagacaagactcatgtctgtgtttcagaaccttcagatcagcctagaaccttctgagacaaggattctgaaaacttttagtctttatttgccattttatcttcaatgctgtttttaaaagctggttctcttgcaayccctggtcccccaacactgccctgataggccaattgtctaggcagcagttgtggcaacagctggaactgcctgcactttctgggcactagtgctggcataaggaccttgccaatcatgctgagcaggagtgcctagcttcccttcacgcgaccctcccaaaggtggctcagatctggaaggtccaaagcccatctcgtggcacattaggtatgaaccccaagtgtttatacctacttttgaagtaggttgttgtctacttttgaagcaggttgttgtctacttttgaagccttgcatttttacatggtccacacccatatccatagcaaaataatagttaatatcagatagctaacacttaccgagtgcttgctgcctgccaggcacaatccccacctgtgatttaatttccataactttgtggaggtgataatattgtaactcccatttaacagayaaggaaagtgaggcacagagagactcaattacacacataraggcacatgctcaggcaacacgtggccagtgcagataacaggaaaattcactgctcttccctctcataatacattttaatattatggaaatgtggtccttgaaaaagtggtcattgagcacttaccaggtgctayggatacaattcctctgcagcwtgcattctagtggggagagacaggaaacaaatgctaaaatgtgcaggrtgccaggagtggcccattccctgaaagaaaaggaaaggggagagtggttgtgtcaggagattctctctgatagggcagcatctgagcagagaccagasgatatgaggggagtgagcaacagggctatttgtgggggaagacagtaagtgcaaaggccctgaggyaggrgcgtgcctttgaaaagaaatggcaaggaatggctggaggacagcaagtgcagggaggctgggaggagacggaggaaagggcartgagatcctagagggccctggccacactgaaagaagctcctgtgaaacggagtctctcagaataggtyccttttaaagtcacctgaaaccaggtgtcagtgcctgcctgcctgccttccctccttctttcctttctttctttctttctttccttcttctttctttctctctctctctccttccttccttccatccttccttcctttctctctttcttctctttctcactttcttctctttctttctttcttctttgtttctttgtttgtttctttctttctctctctctcgcttgcttgcttgctttccttccttccttccttccttccttccttccttccttccttccttctttccttctttctttctttctttctttctttctttctttctttctttctttctttctttctttctttctttctttctttctttctttctttctttctttctttctttctttctttctttctttctttctttctttcttttctttctttcgaagtcttgccctgttgcccagactggagggcagtggcacgatcttggtttactgcaacctctgcctcctgggttcaggtgattctcctgcctcagtctcttgagtagctgggactacaagtgcccggcaccacacccggctaatttttgcatttttagtacagacagggtttcaccacattggccaggctggtcttgaactcctgacctcgtgatccacctgcctcagcctcccaaagtgttgggattacaagtgtgagccaccacgcccggccctagtgcctttcttacttccaaacacatgtttctgaactgcataaggagcctggaaggctgatggcagccaaggctaagtgccattgtgagcactgtgagactctagcagagttctggggtcctggtcgccccaggtgactctcgaatgggagcagctgccctccagttgcaatgctggtctctgagatgagtgactgtaatgaagagattgatgataaccccatgtcctcagaccttcattgtttctgcrgaagggaactgggaaagtcttccaccaaggaatcttttgtgaggcagtgagcttgccttcctgttttctgtaattcctcccattctcccatgtgcttgyggcgagaggaggacgtgaggattgtgttaaagggtgatgagagagcaggagtggttgcagttctggaaaaagatctaataaaacacttacctgcctgaaggcagtgtgctgaaatgaagaggcacattcaacagcattgtcatacattggacctgtgaggggtgtcattgaattgaccacttrggatgtttaaatgtttatttaaagttgcccttggctataaagcctgaagtgggtgttggagtagtcaacgactaacccaggatggatttgtgccaatacacaagtgacaacatctttcacagctgaagagtcggaggataaagccatgcccacagatcgttgtcacacaggtataaccttacattttccaaaatagtcttttaagtgccagcattgttgagtggcatgcactttttgaattatgtaatctgggcatattgtatacctttattttaaaaattttgtttaaaaatgccaatcacgtttattttactttatacmtataagtaacattttttctatcatatataatttaataaaatccaatctcactgtgaacactgtactgctgaaaattcatttttactrtaaaatagaattctgtaaattgctttaagaaagcatttattggctgggtgtggtggctcacacttgtaatcccagcactttgggaggccaaggygggtggatcatgaggtcaggagatggagaccatcctggctaacacggtgaaaccccgtctctactaaaaatacaaaaaattagctgggcgtggtggcaggcacttgtagtcccagctactcaggaggctgaggcaggagaatggcatgaaccagggaggcagaacttgcagtgagccaagatcgcgccactgcactccagcctgggtgacagagcgatattccatctcaaaaaaaaaaaaaaawttatttatatagtacttatatattatctatgtactttttcccagacacacacagtgaacaagtgatcactgggctcctttcccaggcacagtttttgtaagtaattgtgaatgcaggatacctaatatctttgatcatttaagtttttacataaaactaactctagtaggagaaaaacaaaggtgcgtaagtcacgttcacatatcttatgtagtcactttgattgtttccttggataatgatgctctgacagagtgctattgagttctcttagttccttccttccttccttccttccttccttccttccttccttccttccttcctttctctttctctctctctctctctctctctctctcacccaggctggagtgcagtggcatgatcttggctcactgcaacctccgcctcctgggttcaagagatcctcctgccttagcctcctaagtaactgggattacaggtgtgcaccaccacgcctggctaatttttgtatttttagtagagacggggttttgccatgttggctgggctggtctcaaactcctggcctcaagtgaccygcccgcctcagcctccaaaagttctggaattataggcgtgagccaccgctcctggcctcttagtgcttttgaatgaaataaaaacccgtaattattttaagaagtcttcttctatgtaaaaattagaactaggctgggtgtggtgactcacgcctgtaatcccagcactttgggaggccgaggtgggtggatcatctgaggtcaggagtttgagaccagactggtcaacatggcgaaaccccatctctactaaaaatacaaaaattaggcgggcatggtggtggcgtgtgcctgtagtcccagctactcgggaggctgagtcaggagaattgtttgtacctggaaggtggaggttgcagtgagccaagatcgccattgcactccagcctgggcaacaagagtgaaacttcrtctcaaaaaaaaaaaaaaaaraaagaaagaaagaaagaaaaaattagaactaaacaggtgttcttgtctgtccaacatagactggtagactcagagggagtattccaatgttcggaaactgaaaactttatttgaggtcaacagaaaagaagttgagatcaagtatcatgttttgtcctggagccaaatatgtagactttgctgttgagcctggcttgacactggacctttgattgatgttaactgtgactcaccctctcttgcctcctttcagtttccaaattctctctgcttgggtcaaaagtcattgyttgccagaagtttaatagtgtgtgcattgtgtgtatgtgtgtgcatgccaatatgtatgcaacccatacaatgcctggaacaccaatttagcttcatattttaacagaccatgattccaacatcatgtcaaagtcttatatgttaaaagttctgcatccacattagaaggtactatggatcactgtgtakcccatgccaaatggtacatgagctctctttctcctctgggtcctgatattttaaacaaagaaacagtgtgccattatgggcccttgattctgtgcaaagtcattgatcgttacccatccttgaggtttttttcttgaggcagagtcttgctctgttgcccaggctggagtgcaatggcgcgatctcagctcactgcaacctctgcctcccgtgttcaagcgattctcctccctcagcctcccaagtagctgggattacaggcacctgccaccatgcctggctaatttttgtatttttagtagtgacagggtttcaccaygttggccaggctggtctcgaactcctgactttgtgatcyacctgccttggcttcccaaagtgytgggattacaggcgtgagccaccatacctggccccatccttgacttttaacatgtacagagcaaccaataacgagtccttcctcaaagtaaagtgaaatgaataataaatgtctaagactttgtggttaaacctaactccacactgaggtgggtcctgtccctgttgatctaaattttcctccactaggggtctaatttggagcttccctacagaggattgtgtgctgcatcctcagatccatggcgcaaggttttttccacgtgtgaaaagaagataacagatgggaaagagctatccagaattggtgtgggcgctggtaccaggcctggccatggagaggactcccccatatttaacctagggcatctrttttctgcagccttgctgcttaaaatggggtctgggaaccaaggtaccatgaggatcagcatcaactgagagcagcttgttaagacgcgaagtctcagccccactccagacctgcagcactgtaatctgcagtaggcaggattccaaggcaactcttgttcacatcagaatttgagaagcaactgttctagaatacactagggagccatatgagatctcaggrtcaagtgtagagtgacttgaggtttctccttggttgagagctcctcaaataagataggcctcccaggttaactaatttcagagcaatttttyagatttagaaaattggagtcaggcgcagtggctcacgcctgtaatcccagcactttgggaggccgaggcgggcagatcacctgaggtcaggagttcaagaccagcctggccaaaatggtgaagcgttttctctacyaaaaatacaaaaattagtcaggagtggtggtgtgcgcctgtagtcccagctgaggcataagaattgtttgaaccagggaggaggaggctgcagtgagctgagatcttgccactgtattccagcctgggtgacagagtgagactctgtctcaaaaaaaaaaaaaaaaaaaaaaraaaagaaaaagaaaaagaaaaaacaaaaattgggttcattttgggttttgttgcacaaatatacatatttaagcacctgttaggtgcaaggcattatggcctgaggggaggtggtttggatattcataatggaacgagattcctagaatatagaacaaagctgcaatgtttaaaccatttttctaaacttttgtgtaattcagcattgaatctcctttctcatctttacctattgtaagtccagttaaaatgagggtagacgtggatggtgaactgaaagtagcaaagtagacagatgcaatggtgrctacaaatcccactttctgatttgaaatgtgggattgacagcagttgaaaaataaggattaggtctataataaactgtctttattaatgarctatagtttragtaattaacacaaattcagaataagtagtaccatttaatgrgtttatgtttttaacaagtacadtaattagaaaggcctcatgcacacttcctgggaagctagaatagctgatcatattctgctaatgcggagggaggttcccccaagaacaacagggacaatggcatgggaaaggctggacgtccttcctggctgatgttttacacctttcttcttgggttgattgtttttttcctatgtagaagatttccttggacttggccttcagaaaacctaaatttaaagttcagctttatcaggggagcctgggmgaatggttacattaacctctttgtggcctttgaaacatacatagaaaatatcaagggatagwtgtaaaaatgaggataaaaacatctaaagtgctaagtagaaagtaactgagtagaatggaagcctgtagagcaaaaaattagattgtggtttgagtgagtggtttatgcctgtaatccgagaaatttgggaggccaagatgggaggattgcttgagtccagaagttcaagaccagcctgggcaattagcaagaccctgtctctataaaaaattaaaaattagctggatgtggtggtgtgcacctgtagtcccaacratttggtaagctgaagagagaggatagcttgagcccaggaagctgaggctgcagtgagccacatcactccagccaaggtgacagatggagatgctgcctcaaaaaaataaagttagattgtatttgcatgaagggcatgtagttagcctacaggtatgatgctagtgcttatttaattttctgaaatcttttagaagaaggctgcttgtgccacrtggggtacctgtgttcttttggctgtggagtttgcrcaggaagaggtttggagatccaggagcctgaagtcagatgacaggtgccttgacctctgtggcatgtctctttggactctgtgaaagttatttaattgctgtggttttcyagaagaatatgaagataattgtaaggtgccacatgcactgcttggactcttacagttctgacagttattcctgacaaatttcaaaaccaaagtctgtttctacttgtaggatatttctaagatatcccctgagaaattaatgacaatggagaagcctcttgtttgccagaatttattgtagaatggaaataaatacagagtgatgagtgaaccagaaactgtaattaccctagaaatacatattctttttcttttcttttcttttcttttctttttttttttttgagacagagtgttgctctgtggcctaggctggagtgcagtggcacgatcttggcttactgcaacctctgcctcctgggttcaagtgattctcctgcctcagcatcccaagtagctgggattacaggtgtgtaccaccatgcctggcttatttttgtatgtttagtagagatggggtttcactgtgttggccaggctggtctcgacctcctgacctcaagtgatctgcgagctttagcctcccaaaatgttgggattacagacgtaagccaccacgcctggcccagaaacacatattctawaaaccaacttgaattagcagcagagatgtatatcccttagatatggtattttctttctttctttctctttctttctttctcttttctttctttctttctttctttctttctttctttctttctttctttctttctttctttctctttctctttctttctttctctctctctttctttctcttttctctctctctcctttttttttttttgacagcattttgctgtaatgcccaggctggagtgcaatggcatgatcttcactcactgcaacctctgcctcctgggttcaagcaattctcctgtctcagcctcccgagtagttgggactacaagtgcgtgccaccacgcccggctaatttttgtatttttagtagagacggggtttcaccatattggccaggctgttctcgaactcctgacctcaagtgatccacctgcctcagcctcccaaagtgctgggattacaagagtgagccaccgtgccgggccagatatggtattttcaatgtttcaaaatagtgcattgtgttctcacattttataatcctatttctgaaaaaacaatagtttgttaaccttgtagcttattccaaagaagcagctttggaggatttgcagaagtggagtcatgggagggcattttctgagctctatgggccctggtgattgtcagacactcagaggatcctttaaaagtttctaggactaggaatggaaagagagaggagccaggttaaggcaatcaggtggcgatggcaatgcccagtgcagttaagtgctttgttcctgtatttcctccagacttgctgtcaaacctggacaggagccgaggaggtgggaggcaagggccagtgcatgtagtggggttcaaattccagttctacccyttcctagaggaggacttgggcaaatggagtagctcctctgaggttctctgtccataatatagtgataagagggctttctggggggaaggtggtattcagtgaggggagacaactaaactattagcttatttctgtaaatgttctccagttccaggttggagaatgattcaagttagcaaaaatgatgaggaggttggaaagctccaatgaaaccatggtcagtgggtgataagtgtgtgttgcagtttgataacatgaaagactgaaamtgagagagagttgaaaaataagtctttagaaaaatagagtttagggactggaagcctcaatgaggtagaaaaccagggtggagtaaggaggaactgaaagcaaaagaaaagcacgtgtgtgacttgagagtgagatttccaaagtcagtttcagttaccacccaagcaatcactaacccttctaaaktgtcattatttcgtatattgatatggtattttattaattaatacactttttttttcaagatagagtttttctctgtcacctagrttgaagtgcaatactgtgatcatggcttactacagcctcagcttcccaaacgatccttctaatctcagcctsctgagtagctgggaccacaggaatgtgccatcttgcttgtctaactaaaaaaaaattttttattttagacatggagtctcactattttgcccaggctggtgtcaaactcctgggcccaaggaatttacttgttttggcctcctaaatccycttggattataggtatgagccactgtgcccagtctaagtagaattttaaaaatctccttttctaaagaaaattgmatttgttgatagtaaagttttaaaattgggamgttatattgaaatgtrtctggtgcaaccagtggagtttaaattatttttgaccaaaatggattctgaagaaatggtatggatagaaaacaaagaatgtaagttttatcttgaataaaaactagttttcagggtggggtgagtggaactgagggtagaaaagggtgagaaagcaaatataataattgtctcatctctataacatttaaagatttgattaagtgaaacaaagccccagctgctggagcagaggttccactygggttccacagacacccacagcccaaatccctggaggtcagtggggctcacagtgagtgtggggatgcttctaatagtgggtgtgctcagctgggagtgggtttggtttggtttggtttggttcaaaggcagcagaagtctgcatcttagctgtcttaatgtgaatgtgggrtcttgtgacagggtctcttctgtatcctgggggtggatctgcactctgcctgatggcytagctactttgccagaccctgcctgcttggtcttcaccaggttgctcctgctgtgtatgattacagccttgrcatgggactgcatttcccttgtttaatgttggtgctgggaagccctcttgcaaccactcctttaatatcctcctttctcctgggagaagctggagagagctacaggtcmtgaggtcctcctctgggagaagggagatggagagaaacaccagatacacctccatctcctgcagctgttttgagtttgatttcttattctatttgaaggaaattttttagaataacagatacatgtataataaacacattttcgaacgtaaagagggaaagtagsaatgggatggaagtgagaccactgaaattcactggctccatgtgggagctcagggccatagtgtcatcatctacaaatggcactgaagtttctcctgccattgatacaagtttgcagcagatgttatttctgcatcatttgcattttcagttatgatacttcacctctttctcagtatcacacacaattcagtgttgactatgatattctgaaaagcacacaggccgggcatggtggctcatgtctgtaatcccaatgcttttggaaggagaagcaggtggaycctcggtgccaggagtttgacaccagcctgggcaacaaagggagacctcagttcttttttttttgaggtggagtcttgctctgtcacccaggctggagtgcaatggtgcaatctcatctcactgcaacctccgcctcccgggttcaagccattctcctgcctcagcctcctaagtagctgggattacaggcacgcaccaccaccccctgctaatttttttaatttttttgtatttttagtagagacggggtttcaccatgttggttaggctggtctggaactcctgacctcgtgatgcgcctgcctcggcctcccaaagtgctgggattataggcrtgagccactgcgcctggccgagaccccatttctataaaaatttttaaaaattagccaggcatggtggtgcgttcctgtggtctcagctacttgggaggctgagrtgggaggatagcttgagcctgggaggttaaggctgctgtgagccatgatggctgcagtgagtcatgatggtgccagtgcactccagcctgaatgacagagtgagactctgtctcaaaaaaaaaaaaaaaaaaagcaagcaagcaagcacacagatgagtttagtagatggacattaaaggagttttaaccaactcttttatttcttctctctcttaaaaaactatatgttgctgacaagaaattatatttcttctgtcatgtagaatttttattttgctccataaatgtaatgacattgggatatcatggatctgttttctgtacacctacttatcacttaaataacttttgaatcatttttcaacttgtttctattatatccatcaagttatatgtggacagatgatttggtaacaaccaatgctggcacagaatgagtgctgtgcacaggtcatccattgaagtctgtctcctgtcatgtctttgtctctcaaaaggaaactgttttggaactcagtcatgtttagaattctcagtctcagtttaagcataagcctctcctatggatgtggctgaattttactctagatactatcccattcaattagccagtttaaaacaggccagtttattcaaagctaaaattacagctgcataaagaggtagtttggactctctatgtcaggaattgggttgttttttgtggtattcattgctatgttcaaataaatgaacctgaaaggtgtgactttttcatcactgcagatgcctcagtaatagggatatttaactggtagcacccagaataacagatgttcttctacactgagtttcttggctgtttaaaaagctactttataatacctctggtttacttgtttagaatctattttaataatattttgcattgtaagatgcttctggtctctgctctttttttcaggcctaaggcaatagctaattgagactatgcatcactattaaggcatcttcactaaagggcgctgtggaaacgctgcctgagatgcagacacctgtcagaagggggctaaatttcaaacaaggaacgtggtgttgcatcacaataaagtaagtgtccagagggaacttctgcagtactgtgttttccaacgtgctgagtgatattgtaggagactattattttgctggaatttctatgaatacatctatgaatacatttaaaataaaaagtgttttttgtttttttttttgagatggagtttcactcttattgcccaggctggagtgcaatggcgctcccttggctcacacaacctctgcctcctcggttcatgctattctcctacctcagcctcccgagtagctgggattacaggcatgagccaccacgcccagaaaattttttgtacttttagtagagacggggtttctccatgttggtcaggctggtctcgaactcctgacttcaggtgatctgcccaccttggcctcccaaagtgctgggattacaggtgtgagctactgtgcccagccaaaatgtgtttttttaatatttaattttgtggccaggagtctcacgcctgttatcccagcactttgggaggccgaggcgagtggatcacgaggtcaagagatcgagaccatcctggccaacatggtgaaaacctgtctctactaataatagaaaaattagctgggcatggtggcatgtgcctgtagtctcagctacttgggaggctgaggcaggagaatcacttgaacctgagaggcggaggtggcagtgagctgagattgcgccactgcactccagcctgaagacagagcaagactacgcctccaaaaaaataaaaaaaagaaagaaaaaattgttttggtacatagtaggtgtatatatttatgggatatgtgagatattatgatacagaaatgcaatgtgaaataagcacttcatggagaatggggtatccatcccctcaagcgtttatccattgagttacaaacaatcaaattacactctttaagttattttaacatataccattaagttattactgactatagttaccctgttgtgctatcaaatagttggtcttattcattctttctaattattttcttggtagtcaaaataaaatgtttatttttatgacttctttttttttttttttttttttttgagatggagtctcgctctgttgcccaggctggaatgcagtggcgtgatctcggctcactgcaacctctgcctcccgggttcacaccattctcctgcctcagcctcccgagtagctggggctacaggcgccaccgctaccacgcccggctaattttttgtatttttagtagatacggggtttcaccgtgttagccaggatggtctcgatctcctgacttcatgattcacatgcctcggcctcccaaagtgctgggattacaggtgagagtcactgcacccggcctccatataccagtgatagcagtgttttatttacagtaattataggttttttttttttttgagacagagtttcactcttgttgcccaggctggagtgcaatggtgtgatctcagctcactgcaacctccgcctcctgggtttaagcgattctcctgcctcagcctcccaagtagctgggattacagaggtgcctgccaccatgcctggctaattttttgtatttttagtagggacggggtttcgcgatgttggccagcctggtctcgaactcctgacctcaagtattctgcccgcctctgcctcccaaagtgctgggattacaggcgtgaaccaccacgcgcggcctcaaactcatatttgaaatttagagagattgccaagaccctagagttttgcatgttctcacaaattgatttcgttagttcaaatttcataccactttttctaactgatgattcttacaccttgacaggtgactgagttcaatatgattagagctgaaccatttcaaaaagcagcacaagtggcgactgccagtaaccgataataaccgagtttaatccccctcttctgctccttccctctgatggaattctcattttccctggcctcccccattgacattcatccaatgcccatgctgctggatcagtcttcctggagccatatctaacttagaaagatgaaggacttccaaccttttgggagatgacaatgtgttatcaaaatcaacaaactaatagattgacttcctttgcatatttttgcaatgttctgtgagatatcaagtcacttccctggtagtttcttattcagtatttcactgtactgctttaaaaaaaaaaaaaagtcaggcctcaaccctaacagagtcacttggagatcttgttaaaaagttgagtttagagtctgatacaggttttgagatggccctgagaacttaggttttttcataggctctctgggcaacttttatggggcagaggtttagaaagctaggagtaagctgccaggtatcaggaaaccactagatggcagggccatcccttggagccygttcttcaatcaagaaagtggtcagagaggaaagtggagtggggaagagtccaagtacacatgttaaatgcacgttaataagtggatggtgaagatgagcttaggtgttgggtcctagcgggagagtgggaaggattcctgtcacttctcacctctttctagctttatctccagtatttgaaatgcctggaggatccttaactgaaactctccactagtcaactgtgctgtactatagcacaaccactttaaaaaggtgaaagtaggaaaactagctcaatgagagggctaatatttttatggggccaatgatttgaattggtagacatatatgccytcctacatgatataggagatagagtgcaaaaatcaaaccaaagtgttttttcctaccctcactcaccacacactactcctcacatgccvagcaagcaagcaagcaatttttctgcagattctgcagtgcacaccagctgggtgtcctctaattcaactcaactcttacactagctatctagagatactgtcagatcccacaggttaagggctcagtcccacaagactgtcccccacttcagaggccwgttataagactgaattgccagaacttctgatccactggctacaaattggggctcccaagaccctgcccaggggttcaattaatttgttacagtggctcacagagctcagggcaatactttacttacatttactggtttattagttagagatataataaaggatgcagatgaacagccagatggaaagatactcagggagctatctggaatggtcccagcactggagctcctgtccctgtggagttagggtgcacacactcccagcatgtggatgtatttgcaaacctggaacctctctgaaccctgtccttttggttttatagaagctttaatttgtaggcatgattgattacatcactggccgttagtgatcractccattttcagccctcctccctatctgctggttatggggtggagctgaaaatcctaactttccaatccagccttggtttttactgtgacccactcctaacctgaagctatccaggggccctcagctaccagtcacctcattaacatataaaggattatatgctaattatatagtatatattattatgttatataataatataatatatatatctataattacatgctatattatatatgctatctagtaatatagttagcatacactcctttatatgctaatatataattatgctatataattagcgtatacactctaaacactccttagattccaaggattttaggagctttatgccaggaaaagataaggaagaccaaatgtatatttcacaaaaatcacaccttctaagtgtatgacactttctaagaaattagcagacattacaaatcagatataaaacagatattaccatcccatgaggcttttttttgaaatgtgcatttccccctaaaaccaggaagtggcataatggagatgagagctcagatctcttgcttttctccttagtggtcactgaggtcactaagtgtcttggtgtgccactaacatttagataaagacaggtgtgtaagaccaaaactgtatctttctctttttaagccacttgaattatttttgatgtctgaatttttcaaaattccaacctaatttgtgctgtcttcaaaacagtcttattattggaactatcactgtgaatgaacattacactctaacagtggtatgttatatgaaatggtaccatttagtccttaaaattgattggaaaacagtgattggggarcatttaaatatattttaaaagtgagagaagtaacaattaatgctatactttttttaataaggagagtatattttcattgtaagtatctattaatgattgaaatgttcagaggaactactgaattcatcatctgtgtttagatgaagcaaagacgaaacccccttaacagttactcagttttttgattacccttgctggcgacttgaggaaagagtggataaaaactgccactgccagctgggtgcggtggctcactcctgtaatcccagcattttgggaggccaaggcgggcggatcatgaggtcaggagttcgaggccagcctggccaatatggcaaaaccctgtctccactaaaaatacaaaaattagctgggcatggtggcaggcgcctgtaatcctagctatttgggaggttgagttaggagaatcgcttgaacccgggaggcggaggttgtagtgagctgagattgtgccattgcaaacaaaacaaaacaaaacaaaacctgccactgccaatctggagttggagttatcaaaactgatgatatctggaagagggcagaagatgttaccatctgcaagtttaggatgctgaagaagtggcaagaaaaggatcagagccttgccacagcccagaatttatgtaagtgcttgaaagacatcatctctcttgaagtccaagatgtgttggaaggtgagcagaaaattatatcttagttatttgtctggaatcaagctgtgtctttgggaatagytatagaacatgtggcttggttatttataagcttgggttcagagagttatgcaaatgcaaaagcargcaaggggctgctgtcctcttagtaaggatggtgtgtgcagctgagtcagaggaagggttggaagcccagccccagtgctgccctagctttgggactgtaagtaaaatctcaacctaacttgaagcctctctgttcccatctgtgaaatgggttcagaccctcctatgtcctgggctgtggtgagaatgaaaggagaccatgcatgtcaagatccaggcaggtggtctggctcagtaagggagcagtcatgtcaccctggtacttaaggcagggctggtagcattgagccttctgggccttctgtggcactgaagcaggggtcatgggggccactgggtggcgccagcaatattcaaccagcaaagagggcaagggagaaagcagagcccagggagggctggaggggatcgttcctggtgttgatccagaaaaccacagggttccttgtcttggttttcaagcacttctaattttgtatgtgtgtggatggatgtagcacattgtcataactgagctcaaatcaattcaagactttgattattatatgttgttactacaacgaatatagtgttttttttttctaagaatcctcagtaattcagagagaggttttatttaaaattctatttagatttttttattcctggccgggcgcggtggctcatgcctgtaatcccagcactttggaaggccgaggcaggcagaccacgaggtcaggagatcaagaccatcctggccaacatggtgaaaccccgtctctactaaaagtacaaaaattarctgggcatggtggcatgtgcctgtaaccccagctactcaggaggctgaggcaggagaatcgcttgaaccagggagtcagaagttgcagtgagccgatatcacgccaccacactccagcctgatgacagagcgaggctccgtctcaaaaaaaataagtacataaacaccccagaaggttatatcagaagtcaaagtactatgatctctctgcatgcttttcagacatggtgagcgagcgttctgaacccycgggcccactttgcctggaggaccactgaggttttctactctctagtcttggggtgctgaagcctcaagagattagaaacaaatgcaattctctcccacctagcaatttgggatgcaagctcaaaggtgagctcctcatcccctggagaagtacaactggccamacactacttttcttggactttcacrgtggaattatttacttttcatggggaagaatgctactcagagatagctttcacagaaccaagggaaagmtgtcttcttttcttgaaaaagacttgcctcaggaaataatgggcctcattggctsctgctaattggtgaaatgtktttkttttttttttttggtctgtgtagatattgtcactacttcagcatcatgagtgtggtgggtgattaatattctggatatattttacattatttgatccataaattcataaatcatggatgatgagaagaaaaggaagtctgctttttgacactgctcttctttgtattatttacttacaggtcctgttttaaagcatcctattccttggytgtctttcctttggctctttggcaatagttggttttgatcccagctctttggctcctgggccaaggctgagtgagtgccagacagggtaaactagttcaccaggtgttcacacaggttcaggacaacctgcattgtccccacagcccttttgccacaggaataattatggttttctcccttccaaggatgggaaggtgtgtttttatttaaaaccaggcagattcctaatacttcctcatttgtgcatttctcttgacaagggatttttctgcacataatgactctcatttggtccttttgctgtattcctttcggggaaaagtttcctcccgctgctttttcatgagaaagcacgcttcactccattctctaaagagaacacagcagttgctgaatttttaatttgttcccatgagaatcgtggtttccagcagtcagcctaggccactacccgttttctggaagtccttcttagggtgaaccagcacactgcttgctgaagagcttgatcccagggattcactgctggaatcatgtgtttttggttgacaggtgttctcagcctccctgtctatatgtcaggatttgagaagtcctgatcctggctctgcagccgctgatgctaacacggaggccctggggttaaattctaggctctgagttttgagatttctcctgcttcttaagtgagacctccatttccaccctggagcccactgtagatttagacctaatttgttctggtcctgatgtaagtcctcagttaggaagtctagagttagtcagccacctttattctttgcaatcccattcttgctgttttctgtaacctctagcacaagtttccttttcagaagggaagacgctctatgcatttatagcagtgttttcttttcgagcaagcctggaaatcaacaggtggttccattataaaaacaactggagagaggggcttagagtaattcagcaagttttcatttttccttacccacgaaaaccttttgtgaaaggaaatcttacctggaacacgcactggtaaaatattcaaaagtggagctgctgtggtggggtcattgaggggagagggatttcgagggcttaccgaggagccctgcagggcctctgacttgctcctggyagggtagcttggaaaccagcagatcaggtcattatttggatttcttgaagctgtggtgcaggaatgtgtttctaagacatctgcaacctaatgggaagtaaaacactttcccacccctaggtgtggaatatttattggcacgttgtttctgaagcatagacatatactcagaccacaggtatttaaattatgttaactaaatcaaaacgtttatgaatttggatttttccccattatgaacatgtataattattttgaactaagtaagcatatgcattttcaattttttaactctttatttttataattgtgaataagtttctttcaaagactagagacttattttttaaattttatttttatttatgtattttttgagacggagtcttgctctgtcacccaggctggagtgcagtggcacgatctcagctcactgcaacctctgcctcctgggttcaagcaattccctgcctcagcctgctgagtagctgggactacaggcgcacaccaccacacctggctaatttttgtagttttagtagagacagggtttcaccatgttggccaggctggtctcgaactcctgacctcaggtggtccgcccacctcggccccccaaagtgctgggattacaggcatgagccaccacacctggctgagacttctttatttctatctagattaggaaaagacatgagaattgtgggggctcatgaagattccctttgtttctgtatcatttttaagttcctggggctgggaacacaaatacgtgggtaatactacattgcctatatctgaggttcccacagtttagcaagagagagaagggagatacataaataattgggatgatatttatatggttatagggaaagcattcccttgacttagacagtgacttcaacatgagcatagctgctggcacaggctgagaccaggccacttaaaatgttaattatgtgagcttacataatcttattatttattatttttattttttgtagagatggggattttgccatgttgcccaggctggtcttgaactcctgggctcaagcaatccttcatctcggccttccaaaatgctgggattacaggcatgagtcaccgcacctggtcaacttcaataattttcttcactttccacatccataaaaagggttattaggatggttatgtttatttgtggtaaactcttaggaacatgcctggcatttaggaagcacaaytgagcagttgctactactttttttttgtctaaaacagattccattaatatactgtttttgatattacatagatctaattcatactcatatttttaatgtaaaattgaaagatacataaatataactaaagtttttgtgcctgttctcaccacatatatttcaaaacatttatacgcatcctatttcacttttttaaataaaatatttcaagtacatagaattcaatttttggacaatgcggccatatttttttcttacttatcatattgtaatgcagtttgctttaaactaggaagccaaattatgctagccagaaccaaaagtattttttaatttttaatttttttttttagatggaatctcgctctgttgccaggctggagtgcagtggtgcgatatcggctcactgcaacctccgcctcctgggttcaagcaattctcctgcctcagcctcctgagtagctgggactacaggcacacaccaccatgcccaactaatttttgtatttttagtagagacagggtttcactatgttggccaggatagtcttgatctcttgaccttgtgatccgcccgctttggcctcccaaagtgctaggattacaggtgtgagccaccgcrcccggcccaaaatgtttagtcctcaaataaggataataactgaatggcccagtgtgacacagagaagaggacttatgatggctgtgggtgctggcccccaacaaagctggtgttcttttctttttgtctgtagtttcttatcctcctttgggtgtctaagggtcttttacayctcttgagtttttcaatactyacctttggatgtctggccagaccatgtcctagaactgttctgtcttcccaaagtcctggacctttaatggggcagckgacaactaaatatttttcatgttaattctctgatttagtcattcttaggtgtgagatacactttcaaggtttagtttcttttgaataaagtagtttgttaatcaaacgaatctccaattgactggggggtatttttagggggatggtccttggttttgataagttactttgctcctggcctggctcagtggctcatgcctgcaatcccagcactttgagaggccgaggtgggtggatcacctgaggctaggagtttgagaccagcttagccagcatggtgaaaccctgtctctaaaaatacaaaaattatctaggtatggtggtggacacgtgtaatcccagctactcaggaggcggaggcaggagaatcgcttgaacctggagggtggaggttgcagtgagccgaatcgcgccactgcactctagcttgggtgacaagtgaaactccgtctcaaaaaaaaaaaaaagttactttgctctccaccctttgttcttggaaggcagagaccctgccttttgccctcatacttcacaccaggcagccgcttgtgccgaccacacttaatatgctgagtgccatgggggacagcacatcagcgggtgttckgatgtcttgtgagaactgtgacaaatttatgttgagtaataactaggtgytggcastgtattgtgtcatttaatcttcacaataacacagttaattaggtcccaccgttttctgaatttcatcaatgaggaaatagcagcaaagaggaggtaamaaattyggtgcaggtgcttagcccaaagactaataatacatttcaaaatgtgcttacatttattgtgcacttactatgtgccaggtgcaacgctagccctttgcacgagttgttccattttaccctttctctgatcctttkaggtagattctagtattaccttcctttttcagaagaggagaccaatggggagcattggaatgatttggttgcaagcatactacacwacttgtaaactgcagrcacaggcttaaaaaaagtgaaaaactaaccatgcaataaagaatggaatgaaccatgaagctgtttctgtggccagtcatgtttttgaagcatatcccatgctaatttctagaacagaagaaacacacgtgttcttgtgtgtaaacccagtccatggaagagaccgtctgcttgtccctcctgatctctgggcccagacaaccagtagtcaccattccaagtgaggggtggctgcaactctacagccccgttcgtctctcctcactgtcaaagctgctgagaccccagactcracacttgaaagaaacccatgtctgtgaagcacttgtggaccattcaagattgtggaagaatcactcaagagaaggagataggtgatgggatctagcttctgatggtttctattttattgaatgtctaatagggcaagaatttgaaaaacgagaatgtttgycatgcaggaggacctgggaaggagataacacatttacagggagaaagattgggattcagttgggaggagtaactgaggaaaggggtcactcaaaatattttgtattttaggtcctttttctattaaggaggaatggattrtcaaagccttaacattaaattgtaytgtgtcaggtgaattgctatggtttgaatgtggtgtgtccccctcccaaactcacattgaatttttttttttttttttgagacggagtctcgctctgttgcccaggctggagtgcagtggtgcgatctyggctcactacaagctctgcctcccgggttcaagagattctcctgcctcagcctcccgagtagctgggattacagatgttcgtcaccacacctggctaatttttgtatttttaatagagatggggtttcactatgttggctaggctggtctcaaactcccgacatcaggtgatccacccacctcggcctcccaaagtgctgggattagaggagtgagccactgcacccmgcctcacgttgaggtttaattgccattgtaacagtataaagatgtgggacctttacgaggtgattaggcaatgaggactctgccctcatgaatggattaatgctgttatcatgggagtggattccttataaagggacacgttcagcacccccttgctctctctctcaccttccgccatatgatgatggggcacaaaggccatcatcagatgttggccccttgttctygaacttcccaacctccagagcagtaaaaaaataaatcactgttctttacaaatggcccagtctcagatattctgttacagcagtacaaaatgaactaagtcatgaaacctaagatttacatgatttacagcagtggtccgcaaccttttgggcagcaggggctggttttgtggaagacaatttttccacagacccggggggcrgggggcaaagatagtttcgggatgaaactgttccacctcrtattatcaggcrttacttagattcttataaggagcatgcagcctagatcccttgcatgtgtagttcacaatagggttcacactcctatgagaatctaatgctgccactgatctgacaggaggcggagctcaggtggtaatacttgctcacckgccactcacctactgctgtggggcccactgcccaacaggccacagaccagtaccacwccatggcctggggatcggggactcctggtttagagaattaaaaagatggaatttaacatttagctcattaagagcacatctcttaagccaaagtaaggcaattatccatgtggttcaggcaaaagttctatacagttttaaacaaatggagagattttctggttgcaaattagagacaacttttctctcagagcccaaagggtcacaaaaattagaataattaggctagaaggcctcttagtgacattttttttctggttgaagaatactatgaagtatttttctaatgcacagcatacttttagtcttatgttgaacaaaaataataaaccctcaaaaaccatgactcacttggctgccttagtagtaaagcatatcttgtcttactagggtccctttaaaatgagatgaaagggactaggaaaggaataagaatattgtggcattctttccagagtaattttgttgaagtctcatcagagttttcaattttcccacaatgtrtattttaacacttaaaagtacattagaaaaattgcagaatcactttaattcaatacttttatttttagaacacttaaaaatatttttcaaatacacttgataaataatttaataaatataacataaataaatataagttagctcagatgctttcatgattaccaagttatataaataaatattttaaaataagttatgcttacatgtttgtttccacaaacactttggtacagaaatagcttataaatatttgcccttctattaaagtgaatgaaaaacaccttcaggatggatattttcccttcttagcaattcattcatgaaaacttaaaaacaatttatccacagtaaatgtcaaaaatacttgatcagaggtatyatgtggatgtaatrgtcccatccttctttycccctccctagttcttaatccacatcctatcaaagtttcctcatttcaaagttttataaaaatgacaacggtttggagggacctcgctttttaggaagcattcagatagctcrtcactctrtcaatagtcactgcccgaattctgaaagcatgaagaagtatgcagagcttgattttagttttataaaaatccggttcttcaagggaggatttttgtggcayagtctcactgttgaaattcagggcctaggagaatgaacagtaagcatgacttacatggtattccaaaattcaaatattcattcataaaaatgagtgaagccagtacatgtctcagagcctgcaactcrgtcccttatgccactcctaaacccaatccaaatctactctcagccagatcaccaggcagaatgagaaaagaaatactcattttccaagcacatscatcttcaatgagctctgaaaagacccttaaaactatttagaaaaaatcatcagtgggagttgtgtcttagaaagaaacagttcctttaaaatgacatctgctgcaatatctaattaattttatatatgttacattaaaaagcccacttctgtttagcacagggaggtgatggattgctattgatcagaactcactatcagtaacaggcctgtttactgaagacatgccatttgtgtcagataaacctggcaatgaatttcccaagtttagcactttgatttgataacagaatataaaaccttacatttgcacccttgatgaataaatactttcatatcttcctcacaaaaagtctaaaagaaagctagaataaagtcaccccattttatactggaggaaactgaggcacagagggkttaagtgacttgggaatagttgtctggttactggtagaattgattctagcacccaaatcacccaactcttggtcctaaaaatgaaatagcaactacagctctctagatgctaacattctttgatacttggatgaagctcattgcctttcaaacaagaaatctggcacatgcacacacacacacacacacacacacacacacacacamacacacgaaaagaataaaagtaaaacaattacttttcagacaatgatttctgccaccatatttttatcccatgtcctcgtcaccaaagcagtcaccctcrcttatataaatatttgttttatattagcatctgtgttatggtrattcagaacataacaaagcaagttcttgcctatgaataacattatagatgccccagatgataggtcattcttttatttggttcacattttggttcacaatgggtcataatcaggcaccaatcttgcttgtttcccagcaatatttgcagatatgcaaactggccccttgcakgcamatcctggagcacgtcctggagcctttagaggtgagtgagaaggtaagtgtagtgaaatcctcttgaaggattttaagaggcagagcctcagacaagtggtttaactctcctaaggtttggttccctcctttgtgcagatcccatatggttgytttgaggctgacataagaaaatgcacaaaaacatttgccgagtgtgggggataccacagagtgaatactttggagtctgcttttcataatgtgatctgctcacatttgtgctccctatagacggcaccctcaaggctgtcttcttgaaaatgtaggtctgtcaggcctttaaaaggcctccagacctctttttrtatctctttatcaaagaccctggctggttatctttagcatgaaaaaggtgctctcactgatagaatgaagtcttacctgcatcagctcatcaataactgccagcatgttttgatcyagaaagatctgcctcttaggatccatcagaagctttgcattcatggtcttgaactccacctggtacatcttcaagtcttcataaatactactaaggcacagggcctgggtgacatgacaagatggggaagtatccattgagatgggctaaaaacatttcccccattgcatttgaggaaagagctgtgtgtcttaccatcataaaagaggtctttctggaggccaggcaactcccattctagaggaaaaaataatcagacatcagtgatatgaattcatcatacaggctgaaacttttcattttttgacttacagttatgaaagaggtctctctggaatttaggcaactctcattctagagggaaaaaatcatatatcaaagtattaattcttagtataaatctttctgactcttcaggtctcaaattttttttattatggtaaaaacacatatcataatatttagcatctgaactatttttaagtgttaagtgtattcacattgttgcaaaaaaaaccattttttaaaaataatttttctcccaaatctaacttctgaagtaggaccagttaaaatcccataatgatggataccagaaaygtgaatttytagaagcaggtgagatttgatgcacagtttttaaccacactgcatgctctgggaggaaaatcctttataccttggttaattccaatggtaaacaggcctccactgtgctggttttatcttttgtgatatcttcatgatcaatctcttcagaagtgcaagggtaaaattctagagtttgtctggcctataaaaaatgaaggagaaactcagtttataacattgataatgcacctggcaccccacaaggctggtaagccagggtgccaggaaggctccggctggctgcccttgacctctgtcactttgacttgcaggaaattctggttcttcataatacaaaagaaaatagattccttacattctgtctctcaccctcctctccctaagcttggggcatgtttctctggattacatattttttcattatgtaaacacaataaatcatgtcaacagcctgtgctaaccagcctcyacacctcactgtgacacttgcttctggtgaaaattgtttcttcttttgctaaagtgactgtattctatgaatacctatttcaagtataacttctaaagggggaactgttaaggtcacagtytgatggatataacaaacatgcaaacccttaagacaagctgagatttaatttgcagtgcacasacrcacacacatacacagagatgtcatcttagtgtgttggaaagcaccgttgggtaaaattatgaaatgtatcttaggaagtaaaggactgtatgattgaagattacgatcatttttccattcaacagcctaatgggtggcaggcactccattaggtactaagaacatgacagagaagaggaccatgtataccctcctggattgcaagtttagctgctgagacagacaaktgcccaaatgaccaggaggcatcagtaggtgagacatggtgagaagggcatgaagcttctgaggaggggcaggaagggaagcaaagcttcctagagwtgggacacccacattaagaggagtaaagtgtcgacaatggaggagggaaatttcagacagaggtaacagcatgagccaagaagcaaggcctgaaaattcagaatacgtttgggcacaagtagtaaaatccctttctgtggtagctagaccaattctccacctccaaagacatccayctcccaatccctggaacccggtaatgagctatgtgacctgccaaagaggaatgaaggtgcagatgacattcaatttgctaatcagctgatctaagagtagagagatgatcctggattatctgggtgaatccagtgtaagcagtgwcctcaaaagtagaagcrggtagaaggtcrgtccagagggagcagcatgagaaagactcaaccagacattgctggtatggacaatggaaggggccacaagtcaaggaatgtgggcagcctctagacctgacaaagcaaggcaacagattctccccaagagcctccagaaagggctacagctctgctgacacattgactttagcccagtaggacccattttggacttctgatgcccagagctgtaagataataaatttgtgtcatttaaacccactacatttgtgacagcagcagtaggaaatgaatacactattcccggaggtgtttaaacagacctgggcaaccccactattctgagcaggttataaagagttagatttggaggtgtgagtccagtgttgttcttcagatcttttcaagagaagctagaattttgaaatcttaattgaaatgtttggtttttgaatggcatcaaactaaaaaataaacatatagcccaaattctacaaacctgtgccctggatatggccggtgaatcacttgcatctacctcatttgttttctactacagcaaatttgacaaatgatgtacaaaacattaaattgatttctataatcttttgacccttaggactatatctgggagtaggggtgtcagcttttgcacaaaaaaatctatatgaattggrgcacctaaaagttacccattttgaacctttcttcgggaaacaaagcagttttcacttgagccccctgtccaattaagattaattgaattgtgaggagcaatgcacagcacattatgaaagattgaaaggggaaaggagccctttaagaaggcttggtggcattgagyttattttaagatattcctaaggcaacaagctagaaaatactcaagaaaaaattcctagagagcagaaaggcagaggacatcttttaaaacattagcctttagcctttgcagcagtagctactggagcagtttttaacggcaatgttttttacattaaaatatgaaacctaaaagaacgaagctgtaaataaaattaggtaactcttccctagaaaatgaaggctgcatgtgcactgtcatagtcctccctgagatgtgttgctccaagaaggaactgtgtcaccaagtagaagctggtgggcagcaggagggacaaggctatttcatctttgtacccctgccccccaacacagagtatgcacccaagtaactatttccgggattgatcagtggtgtggtgccagagaaaccatgtggacctgacacaattctatctctgttggcaggctacaggaacactgcaaatatccactttactcagtgtagacatagccaaaaccaacatcattataatttattactactcttgctttctctggagacacaatttcactaggactctttaacacttgggccatttgtaaagttccctctcctgctgttgacagctgctaatgaacttccacaatttctctgcagttccatcaggtaccagaggggaggatcagaggccccttcctcagggagggtgcaggtccacagtggagasgacaggaaaggctcaccttctggagcatgttgctgacggccctcagcaggttttgggagtggtgaaggcatgggaacattcctgggtctggagtggccacggggaggtttctggccaaactgaggtggtccaggaggaccagggtagccacaaggaggaggcctggaaggaagaggagcaggtggaggagcttcagcctggatggcctgcctgcaccaccttccctccattctggccaccttcacccatccattcatgcttggcacccacctccctcaacccatttccaacacttttccttcaacacctgagagatgactcgagttattacaaagcrccactctattctagggctagaagccagctccctgtgagggtctagagatgagcttggacaagggtgttgaacccaacactcacccagagaaagcctacatgtttttgatcagggaaacccagaccaggtggtgaagtggctgagtcagacttgggacccagtgttttaaaaacagtggagtgagaaagcctgactttttttgtttttttaagacggagtctcactctgtggcccagactggagtgcagtggcacgatttyggctcactgcaacctccacctccgagttcaagcaattttccctgccttagactccsgagtagatgggattacaggcacccaccaccacactcggctaatttgtgtatttgttastagagacggggtttcaccatgttggtcaggctggtcttgaactcctgacctcaggagatctgtccgccttggcctcccaaagtgctgggattacaggcgtgagccattgcacccggccaagcctgactttagaactggctaggatctgccttctgtttgtagctgagggaccctaggcaggaaagcaggaaatctcccacgctgggcctcagtttctcctctacgaagtgggcataatgatagctcatcaggctgtttcgagatgaaaagagacatgccctatttagcacacggtgagacccctattcttattcctctttgcaggagacggctgctgctgttccagtctctccttaggcagacttgagtttctacccactcttcccaagcagccgcccctccgcacccgagcgagccaaagacctggcgggctgagtactcactgcgcgctggacacatgctgagccggcactgcagggacacagggcgagccgctggatgcagacctgtggccgcggcaggtgagggcggtggctgggaggctgacccaggggrccacatttttataattgtcccgaggcgcggcaggactttcccgggactctggtctcttgctttctgtctccttctgtgtctctctctacatcagcttctcggtgacacgtgcggtgcggccggcccgcggggcttgcggcgctttcggattaactcccggggtgcccggccgcagccgttccgggacggccccgccgcctccagctcggcccaaaatgaaagcgaaatgttcgcagttactgcgcggggtccacaggcgggcgggacaccccgcccaccaccctgggtccccggccttagccggacgccccgtgtctaagctaccccgccccgcagctgtgcagcgccccctgccgacgtagagagaggagtgcctcccactttgcatgtcctgcgtagggatgggccctaaccacgacctccagcctagtactggaaggggtaggcaaatcattcactcatcatcgttcctttagatggctcactagatgccaggccgacgttgcaccaggtgcaggacacccagggagaacaggacccttggggcattgccacactaaatcagactcaaggcgttttgttcacaggtcttttctgaaacctgaaaagggatgagagctggctgactctgcaattattactcttgtagagaatccagtttaacgataggatgaatacacagagtcctgggaggaaagacctagagaaagagcccacgctcagccggagcaacggggtccaggagtcagcaaaggctcccgggagcaggcaggggccccaacctgagtgttaaaaacaagcaggcattagaccgcttccagcgggagggcacgcagggtctagccaggggaaacagggatcagaagcgcagtcatgaagggttgagggaggtgggggtctaggtgtccttgcagggtgtgaggctggagggctggatggggccatgccatgagggcaggggatgccatactaaggagtgtactttctgtgctgagagtagtggggagtcttcctgggttttaggcgggagatgtggcagaatttgcatgatggggggatcccttcagccacagcatgaaggatggatccaggggtcaggagtagagcagagggaagagttgacaaggtgtggccaagtccttattcagtatggagaacacagggtgggcaggagggactctcagagggcttgtgggccaaggcttggtagctcctcaggtgagcgggagaggaaggccctgagaatggggaatggagattgttctagctttacagggattactgtataagaggactgagtttggaggagatggtgagaagttccattttggatgtgctgggtttgaggttcctgtgggactttttagttcagttgtttttcccacaggcattagtcaccctaggcgtgggtagtggggaggatgtgtttgatctctgacttggagcttccaaagggcctgactacacccaggccctaggacctaataactggagctgccttctgggtggctcatctgctcgaagctgatgaagcacggctgtagggagttttaggtgtgtgtaaaataagagaaatggttgatctctaaggccccttctaatgctgctgtctgagaattcccccacgggatacagagtaatccattgtcagaaacaattgcgtttagcagtttgtctagagcaaatgacaggtgcagagctgtgttgtggccacaagggtttagtgtggagttaaatgtacttaaagtcaggatgaagacaagtgtatcacaactgagctgtttctcccctggaagggccatctcctatacaaaagtaatttctgttgcttagatgagcacagggccactgttaaaaatggattattggctaccagacacagtttctaatttacatttttgtgaaatagtttcctgaagtgctccatgtcctctagctaagatgaaatgaaaaccttcttctaggaatacatgatttttctataagtgacagtcttagctcacaatcactacttcacagtgtgtagcattgtcgtggaggtctcggccaatgctataaggaaagaaaaagaaatgagagctttaaacattggaaaagaaaaggtaaaactgtcactttttacagttgatatacaaaaagaaaaaaaattaatagactattagaactaagaagagaatttaacaacatcatgcaatacacatatcaacttaaaaaaaatcagccgattttctttgtatctgcaacaatccatcagaaaatgtaataaaaacaagatgacatgcatagaagcagccaaactataaagtaactgactgtagatacagaggcagtataatggctaagagtatggactaaactatgttaatccaggttctgctacttacttgctgtgtgttcttaggtgagttatttatctctctgggctcagtttcctcatctgttaaatgatgataataaaagtacctacagtatagagttattatgattattacatgagcttggataactacagaatagtgtttggagaaaaattttaaagttcagtcaagaatatagtgtgatttaattaaataattctatacccttgggtggaaggtttctctatatagaaagcttaagcctcttttcgttaattcacatgctcaatgtaattccaatacaagctacaaataaattttctcagaaacttaataataagcctactctaaaatacagatgtaataaaatctatgactaagttaaaaaaattttttttgagacatggttttactgtatcacccaggctggagtgtagtggtggcacagtcacagctcactgcagccttgacctcctgggctaaagtgatcctcccacttcagcctcctgagtagcttggaccacaggcaacaccatcatgtccagctaatttttatttttgtattttgtagagacggagtctagttttgttgcctaggctggtctcaaactcctgggctcaagtgatccacccaccttggcctcccaaagtgctgggattacaggcgtgagctgctgttcctggccttaagtaaaaatgctaagggaataatgaaaagggggactaaccctatcacatatggacataatttaaagccatagaaattaaagtagtgatctttgcaacagatcaggcatatggaccattgaaacagagtagagaaattatagatagatttgtatatttgggtattaagtataagataatacagatgattccctgatcaatgaggaaaacatgcaatatttagtagaaaatactcaatgggctgggcataatggctcacacctgtaatcccagcactttgggaggtcaaggcaggagaattgcttgaggtcagtagttcaaggccagtctgagcaaaaactccctacaaaaaatttttttaaaaagagaaaatgttcagcgtatgatgaaaaataaaactggactccaatctaaaacaacagaggtgaatccatttggaagtgaattaaagaccaaatgtgaaaagtaaaattgttacagtagtagaagaaaatatagaggactgtctttgtcacttataagtgggaaggacttttttaaaacttctaaagctccaaaccataaggcaaaatacctatcaattggattacataaaaatgaagatttctgttttacacatttcctctatgcatgaaccaaatgaacagacagctgacagattgagagaagatatttttcagtgtctaaaaccaatattttcaatgtctaaaaacaaggaactcttgtaagtcagcaagaaaaagacagaaacactagtaaaaaatgcgtaaagctcatgaataagcaatttaacgagaagaaaccccaaagactaatgagcatacctggaggctcagttatatcagaaaatgcaaatgaaaaaaagaatgagatatctctttacacctcttagactgacaagttgagaacactggatactggtaagtgttgggaaaatgggggactacaggatctattatatcacaccatgccagtaggctgacatggctgttttgaagggtattctggcattccttgaccagattaagtatattcacacccatgacccagctgttaaccctgggtgtatatcctatggagattctcatacaggtccacaaaggaacatgtatgaggatgttcattaagtcattgtttgtagtgatggggaactggaggcaatgtagctgctcattactgggggagtgggtgagtggaatgtagggatccacttcatggagtattctacggcagttagaagtaatagactagatgtacatgcagtaacatggatatgtattaaaaatataatactgagtaaaaacaggaaaacagagtaagatctctctctataatgtataagtagacaattaaaaccctttggggctgggcacagtggctcatgcctgtaatccaagcactttgggaagccaaggaaagtggattgcttgaacccaggagtttgagaccagcctgggcaacatagggattccccatctccacaaaaaatacaaaaattagtcaggcatggtggcacatgcctgtactcccacctaccaagtaggctgaggtgggaggatcacctgagcccggaaggtcaaggctatagtgagccatgattgtgtcactgtactctaacctgggcaacagagtgagaccctgtctcacttaaaagaaaagaaaaaggaaagaaagaaaaagaaaaaaatgggggggctcagatttgtttttggaattcaaaatgcttggaatttagaaaaggaagaggtggcatcgcataatcaagcataatagttccgcagcaaaacataggaatagttacattgagtggctaaagaaccccaagtaaccccttgtcgcttcagtcagatttcgctgttaagaatttaagagaaaacttctggtgtccagagctgtgtaagtttaagaattgtgagtaagtgattgcggaactctattgacttaaatgagaatgatatattcaaaatagtacacattatacaaagacacagacaaaaggatatatattagtaggatagatcccactggggagtgaggggaatgagaatgaggactagtgataatgaaaatatataaatacatttagatatttgtatttgatggggacaaataacgtcatggattaaagaatatggtccactccatcctcttcatcagaagtcctttgtccaaaagacagatagacaccttctgtaagcagatgactcaaggtcattgtttgcaaacttcaattgctatttggtacattcaggtagttttttgttttgttttgttttgttttcgagacggagtctcactctgtcgcccaggctggagtgcagtggctcaatcttggctcactgcaagctttgcctcccaggttcatgccattctcctgcctcagcctcccgagcagctgggactacaggcggctgccaccacacctggctaattttcttgtatttttagtagagacagggtttcaccgtgttacccaggttggtctttatctcctgacctcgtgatctgcctgccttggcctcccaaagtgctgggaattcaggtagcttttattgttagttattcctttcccattcggtttgagctatgagtcaatcaggcattttcatcactgagagacaagggtcttttcaaaaatttgacagaatatattaaagatctatttctgtggttctcagttggagatggccttgctccccaggggacacttggcaatgtgtggagacattttgagttgtcataattggaggaagggggttgccactggcatctagtgggtagaagaatgttgctaaatg

SEQ ID NO: 5632 - DNA, 23962 bp, Homo sapiens
  misc_feature (1)...(23962): n = A,T,C or G, or insertion/deletion polymorphism (see Tables 1-2)
ttgtctgtggctgcttttgctctatacttgaagagttgagtagctgcaacagagatcgtatggccacaaagcctaaaatatttactgtgtagccctttaagaaaaagctcattgacccctgtgtctaaggcttcaaaccctccatggtttcccatcccactcagaataaaaactaaatcctcaccactggcttaggaggccccgtgttgcctgccctgccgcccctcatcctctcctgatgttctcttgtgttcaggaggccttctacccctgagcttcgcaggtgctgttctctcgggagtgcccatcctttccccacctccagtgtctgcccttcccagcacttcacctgacccccatatgtaaatagtgcccgtagcaccttagtagcactgatagctgatctatcatctcattggagttttgagtgtcttccctgaattgaatataagccgcatgaggacaggcactggtttccttcaccaggatccccagaatctggcatgatgtgccaatcagtacttactgaaagactgaatagttgaaaatgtagacattatctgggatgggagcacatattgcattatccgcccagcggtactttgctcacagaataagactgtcccggagcacagtcaactccaggtgacctatgagcyccttggagccaccatcagtggcatcagatctgggttttcctttatgggggcctgggagttggggaagccagggaccacgcaggcagagcagatacacagtgatgaagaaagggcttctgggtccctgtagctccccgagtccatgcctaaggtccagctttatttctgatcttaaattccacaaaatatcccaggactcctattgccaggcccctggcctcctcaaacaacaccaaggtctctcccctaaagaccccttcccaggggtctttgaggccaggtgattgaggatgtctgccagaggcatggattccttcagccactaccctctggggaagaatcacggagtctggagtacatttctaacatttgtttgccctctggccttccaggtctgggaccagcagcgctggctacccccagcccaagcagacccagtgagctggggagcccctgttttcttccactctggaggaatggcttcatgctgcagtctccagcccagaaactggttcctagtgccacccagattggcagcgaaaatctggggccgaaagtgaactccccagagctctgttcccatttgagaaagggaattgaatcctggctggagcaggcccacagtggaccatttcccctttggatgattcaaatcagcaagctgtagcccgtgagcccccctagcagcaggggaacgggggagggcaggcagctgggcgtgacttcccctcctcccttctgggccttgcttgcgagcagctctgttcttattctatttcatgagaccgttgctttcattcgaacaaaaggtcccattgtgagtaaactgaaaagaccactgccctgagaaacaagcggcacaaccagcaagactcttgctttcctcggaggaaggaacaggcttttaatgggctttgcagtctggctgggctccggtccgcctgtgccctcctgcgccaccagggagcctcagtttccttggagggacagtgaccactggcaagggaggtgggattctataagcgacgtcacccctgttttccccatttttagggaagcggacacaggtttgcataggaagccagcacctggtcggggagggataacagttcctgacaagttacacatagattataaaatctcaggctatacctggcctgtcagttatagtccttgcctagccacatatgttcaggattccacaaatgtttaatttttcattttctttaataactgtactgttgaccaacctaagcttggtaaataccaggctgaagctaagttgcgctggcttttggcacccaagcctccaagccttcctctctttgtctctataatatgaggctttattacagctgtgcttgtcactggtgggaacagttccccaccccgaaacaacaaagaagcaaaacgcaattaaatagaccactgcacacatgcagctgtacaggctgtggtgttgcctctggggactggggaccaccatgaggctgcaggcattttcatccatcagcgaatggaaggaagactgaatttagtgcacggatgatcatttaagtataaagaggttataggttgtttgtttgaataccaaatctctagttgctcaggatccacttgtaagagagctccaagtaggggcccaatgagccatgtttttgctttaacatggggctgttccaacagtagcaggcagttagttacaaccaggagcacatttttctcagaagacccataaacagctcttgcttcctaggctagcccactactgggctccagtgtagagaggaacctaacacccactggctttgctgattgcaattcctgctccacaccccaagcaggctcacacggtgttgcgaggaggtggggagaactgggtcctcttagaccaatcacagcaggcaaggtctgcaaggaggagctggaatcacttatatattgaaccaatatttattgtgattgaatgcaggctctttcataggacaccctaggttcagactctggctttgccacttactagctctgtgaccttaggcgagtttcttaacctctctggaacattttttttaatctacaaaatggggatactaatagtacctacctcatgaggcagttgtaacaattaaacaaagtagtagaccaggcatgatggctcatgcctgtaatcccagcaccttgggaggtggaggccggtggatcacttgaggccaggagcttgagactagcctggccaacatggcaaaaccccgtctctactaaaaatacaaaaactagcaggccatggtagtgagcacctgtaatctcagctactaggaaggccgaggcaggagaatcacttgaacccaggaggcagaggtttcagtgagctgagatcgtgccactgcactccagcctgggcgacagagtgagactctgtctcaaaaaaaaaaaaaaaaaaaaaaaaaaaaagaaaaaaaagtaaaatagacatcattatatacattttttctatatacaaatatagaaaagaaaatatatttaaaaggaaaggggcattaataattatgccacccagagataggcaccgtcagcatttctttcagtctgtcctctcagcatgcaagcacacttgaattatgctgtttatatacttctgtgccctctcttttctacctaacaggtcttgagtgctttataagcattcagtataaatataactttcatgcctgcgtcacattccatcaagggacaggtttctgtagtaggggagtctgtgttttttcccaatatttctctcacctcagatatcattgcttcaatcttggaaggcaacttggagtatttttcttgggcttcattcctagaagcagaaacatattcactttgagtctttgactctcacagatgtcaggtgcggtgaagtgtggttttatggtcttcacacagacgacatacaccagatttatcttagcaatatttgctcctctgagaaggaaatttcactgctcaagtctcaccttgaaatagattacttggagctgggcgtggtggtgtgctcctgtaacagctactggggaggctgaggcaggaggattgcttgcttgagaccaggagtttgaggctgcagtgagctatgaccacgccactgcactccagattaggccacagagcaagaccctattacacacacacagaagaaatagcttacctgctgctaagctactcctttttccttacatatagtaattgctgatgtgctggagctcaccgttcagcctgcaccatcccaggctaggggttaagatcaagaacattatttcatgtgcctggacttgagtcctggctctgccattactctgtgtgcccttgagcaaggcacattctccctctcagcttcagtttcctcatttctaaaggcagcttcgaggattatatgagctgatgtatgcaaagcacctaccacagggtctggcattgaccacaggctcaggaaacgttaagcgtttgtgttgtgaggctttgcaggtgatgaaactattcaactctgccgctgcaacgtgaaagcagccagagacaatatgtttacaccaattagtgtggctgtgtcccaagaaaactttatgaaaacggaatctcgaatttcgcacagtttttatgcatcacaaaacattttccaaccacttaaaaatgtaaccaccattcttagctcacaagctgcacaaaaccacgtggcaggctggatgtgacagacagcttgcaaccactcacctccgctaatcagagagtgacctgcaggcagtcttgggtgtgtttagagtttctcagtcccctgtccctgaaggatggctatttccaaacctgctggggaagggtgaggggcctgggttctaggggtctcacttcccctcttgtggcttcagtttccctgtccgtgccggcagggtgagcttttggctgtttccagctgcagcttcttaaggtggctgagactgtgtcatggcgaacacctgctgggtctctggttttcattttaaaacaacctgtgtgcggctgggcacggtggctcacgcctgtaatcccagcactttgggaggccgaggcaggtggatcacctgaggtcgagagttcaagaccaaccagcctgacaaacgtggagaaaccccatctctactataaatacaaaattagccggggtggtggcacatgcctgtaatcccagatactcgggaggctgaggcagaagaatagcttgaacccgggaggcggaggttgcggtgagccgagattgtgccattgcactccagcctgggcaaaaagagtgaaactccatctcaaaaaaaaaaaaaaaaaacaactttgtgcaaggcaagatatgagtatctttctgtgcatgtcctgagcccttgcctggtgcaaagccgcagggcagatcctgggagacccccctattccctcccttctggaagtgtctgggtattcttaggcctcccagcctttgcctctgctgtgctctctgcctgggatgcccacctggcttgtcatctcaagtgccacttcttggaagctcctcctgttaacctccctcccccacccaggatggaaggagaggcccctcccttgctcaccgcaggatggcactcactgcgctgtgtcattgtggcatgatgttccaccgaattgtttactcgctggcctccccattggatggagggctaccagagggccacagcccagaattgctggcctttagacctcagggcatgcagtctggagtgccagagttggtcaaatgaacaaatttaggatgaagaaataagataagcaggacttgcccttgtggtatctgtagtccagctccctagagaggctcttggttgcagctgaaagggcctgtgctgtgcatctacagagagtgttttgagtcctgcgagaagaaatacaccatatttgcaaaccctttgaaggttcatattttgtgttttttgctccctgaccacctcccacccctccccacgccccaccaatcttgggcaagaagcgagaccattctcctttttctctggtcactcctgtccttcagggggctccctctggccccgactgtccattgctgctgaagtaatgctgtggcctttctcagtttgggccccacccaaaaccgaagaacttctccccagaaagcttctacttggttctcagtgttttcacagttatgggaacccaagaacagtgtcagacctaggaggtgccccactaccaccctgtctttatcaatgttgtcaccaaagctgtcacaaacaatggggtgtgggctgtcacatggccctgcctaagtaaccacattctcgcttcctccttccacacacagccattgggggttgctcggatccgggactgccgcagggggtgccacagcagtgcctggcagcgtgggctgggaccttgtcactaaagcagagaagccacttcttctgggcccacgaggcagctgtcccatgctctgctgagcacggtggtaagtgctggcttgcaaaaccacagggagtggctggaggtccccatgggccaagggcctgccttatagctgctggcaggcccgggtaggaccgccaggcccttcttgagctgcagcacctggggagggcaaactgaggctcctccgactcaagactaaagtcttcctggagtctgtggccttattctgtgactcttctgaatcctgctcctgccaactttttttttccttctttttttgagacagggtcttactctgtcacccaggctggagtgcagtggcacaatcatggctcactgcagccttaaactcctgggcacaagtgatcctcccacctcagcctcctgagtagctgggactacaggcgcacatcgccgcatgcagctaatatttttacctttcctagagatggggtctcactttgatgccgaggctggtctcaaactcctggcctcaagcctcttgcgttggcctcccaaagtgctgaaattacaggtgtgacccaccrgccccagcctcccattaacttacttccctccctggccagtttgcctgcagcgtctggcttggcggcattctgattttgaaaatcagagaaaccatgagtgtttccctagaaatgatcttatcctctcctttcctggatgggaaactgaggtcgggagaggtgaagggatttgtttaggggcagagctgagattaggtctggaagactccagaaagtagggggagtgcaggatttctcttgaagctgcatgttatggacgcataaaaaagttcttttcagagaaagatgcattcttcccactttttataagactgaggaaatgacacttgtctgtggcaaactattaaaatattagaattaagatactattgttagcaaaagggaaaacaataataataataataattagaatacttggctgggtgcagtggcttacacctgtaatcccagccctttgggaggccgaggcaggtggatggcctgagctcaggagttctagaccaacctgggcaacatggtgaaacctcgtctctaccaaaaatacaaaaacttagctaggtgtagtggtgtrtgcctgtggtctcagctacttgggaggctgaggtgggaggatcacttgaacctgggagggggaggtcgcagtaagcygagattgtgccactgcactccaacccgggtggcagagtgagaccctgtctcaaaaaaaaaaaaattagaatactcttattagtttgtatttgagatactttcaggacactaaaaggaaatggtgggggccagttgtgccctgctgtacacacattcacacacacacacacacacacacacacacacacacacaccccatattgtcgatatctgggcttctgttgcctggaattctcttcctctttcctctttcttctgttttccttttttttccatctctgactttgaggcccccagagccaggcccctcagtgggccggygcctcagaaggtggctcccaggccctcagacagccccagagtctcttccgaggccgtgccctgggtggttgatgcctccctcagcaggcttggccagcagccaggggagttaaacctcagagagcggaagggctgggntgctaggctgggcccagagtggggcattcagaggagctggggaatcaatcatccgagaaccttggagggtggacagtgccccttttacagatgagaaaactgaggcttgaaggggagaagcagctgcctctggcggcatggcttctggctgcaggatgcccatggagttcgtggtgaccctaggcctgtgtctcggcttcctttgctgaacttgaacaggaagatggcagtgggggccagtggtctagaaggagataagatggctggtgtgtgtgtgttgggggtctgtgtttgttaatctgtctgtctacacaggggtgtttagaaaactgtttaaagacagttgttcaactaaccagatgtaggtctcattgaattcatttgtgccaagtaccttactgcctctggatcaggccagcaagtttgggttccaacaggtgtaacttggttcttggtggggtggagggtrgggaggggggtgtaacaaaaaaatctcaactaacactgtggtttgcaagccaccaaacattaaacagatacacagcatatctgtgctattaacttttcatgaggagggctggtcaccgtggctcatgcctataaatcccagcactttgggaggctgaagcagatggattgcttgagcccaggagtttgagaccaacctgggcaacatggggaaaacccatctctacaaaaaatttaaaagtagccgggtctggtggcatgcacctgtagtcctagctacttgggaggatcgcttgagcccaggagttcaagcctgcagtgagctatgattgcaccactgtagtcgagcctgggcaacagagaaagaccctatctctaaaattaaataaataaataaacctttcataagggcgatgataagtgggaaaaaatgtctacagagactccctgatgtgagttgaggtagatgacggaaagaggttgsaaagtgtcagctggcaaatgtggtgtgaaaagtgtgaagacagcacgtgctgtgcagttctgtgcacgttcccctgcctcagtcacatgtcctcttctgcagaggcatttagtgaggcccctggggatgccaggagacccaggagagctcctgccctccaaaaacttgtggtctggtgggggcagcagagcagacagccacagtggttgccagccactggggcragtgttgcgaggggtgtgtgcctgcccatcggctgaatcctgggcctgtggcctgatcagcaagacagctgtggttcctgccttctggaagtttaggagtcaatgtgaatacatttttagaaaataaatgaacagcagaaatgatttaaacacgggaggtgactaatcgtgcctggggcaatctggaaaggcttctgggaggactcagcatttccctggccctcttcaacccacaacaaccccataaaaagcgggtgctaccattgtccttgtattccagctaaggaacccacagctcagagaggtgaggtgagttgccccaggtcacacagcttctaagggacagagctggggattgacctggtttgatgtgactcccagggcacagcagggcagggcagggcctgtcctgtctacccagacttagatctgctgcctgtgcctcagttatctggggtctttccttctcttggtgactacttgacccaaaccctgagatgctcagtcttttgaattttagcattccaagatcctgcccgctctgaccaccagtttcaggattctcagtgcaaggttcctagcggcgtggagccccacgaggatctttcctgagcagctcagggcggccacacggcgggktctctggagctggagtctgggccccctgcagcctgctcctccacacagcctagatggggcccatatrgggtctagatggggcctgggccagaagcagcctggttttagggcgaaagaggcaaacgagcagtctctgacctactctgttaggcaagtgttgagacaaataggacgtggtcactggagacgcctctgtcggagccctgccctggccccacttctgtgggactgttttttggccttccaggaagaggagaggtggaaggtggggcctgggagtgatcccgccgctccgggccttgcttgctaatcagtgtgatggcaccgttagagccagtgaacacaggggtgaggaggaatgaggtcaccagatagtgagaggatgaaatcatccctccgtgggaggggcttccacatatgtcatttttattgttgtataatacatttactgtagcaaatattaaggaggtattatgctacctgccatacacggtgagaaaactcagctcctcccccttctacctgtgtggcctcagctgagacaagatctctcagagcctcgggttttcttttctttcattaaaaaaaatatgtttttttcttagagacagggtcttactctgtcacccaggctggagtgcagtggtgcgatcatagctcactgcagccttgacctgggctcaagccatcctctggcctcagcctcccgagtagctgggactacaggcatcaccagcatacctggctaatttttaatttttttgtagatatgggtctcagtatgttgcccaggctggtcttgaaccyctgccttcaagtcatcctcctgccttggcctcccaaagtgctaggagtacaagctcgaggcaccgtgcctggctgagcctcagattttctttctgttagatgggctgatgcctgctcagctgtggcctggctccaggctgctgtgtcttaaagccagtgggatggcagggaccaggctggggtgaccaacaaccccccacccccagtttgcctgggagtgaggggtttctggggttgagggactttcagcactgacaccaggaacatgtaggataaggtggttgctttagacgggcccaggaaaggaggtctgggctttccgaatgtaccaggtcttatcataacaggtacggaggtctctgctttctcaaagcccaaacacccacaggggaggtagagaggccgccatctccataccctctgagtctgagacctccatttcctctgctcatctgcctgcagcgccgaagagagtccttcagataaagtacccccggctggaagccagcgtctgggamcttccatacactcattcaattctcatgatgattttttttaagcaatattgccggttttacaatgaggaaactgaggcttagagagggtgaagcaacctgcccgagtttacacagccgctaagtgggggcaaatgtgggattcaggccccagcctctcctccaccccagctgtctctgggtgcaggaggctgtggggatggctgtaggggaagggtgggcaacagtgacagcctacctgaagaactgggccccagcaccctccgtgtttctgtgttattctcccagcctccggsctgctgcaagtccggccctgactcaccaagatgcctcccccaacccgggaaccagggagaccaggccttgcaactttgcccccaccttctctgcttccaggaagtggctgagggctttgccttccaggaacagagaactgcccaagtgggggttggtagctgtgagtgtgctcataagtatgaaatatgtctctaggctaatggcttcttcctaaagtccctgcctccaggaaagtggggccaaggttgggccgtagattcttcccccagataagaactctaccccaaagaaattctgctgccctgaaggcaaattgggaggcaaaagtgtgtgtgtgtgtgtgtgtgtgtgtgtgtgtgtgtgtgtgtgtgtgtgtgttacatttattaagcacctactgtaagcttggaacttttgttttcttgttttgttttgagacagggtctcactctgtcgcccaggctggagtgcagtggtacaatctcggctcactgcagtctcaaccttccaggcttaagcgatcctcccacattagcctccccagtagctgagacgataggtgtgcatcatcatgcctggctaatttttctatttaaaatttttttattttatttttgaggcagggtcttgctttgtcacccaggctggggtgcagtggcatgatcacagctcactgcagcctcaatctctccaggctcaagcaattctcccatctccgcctcctgagtagctgggactacaggggcacaccaccactcctggctaattttttgtattttgtagagacgagagacagggcttcaccatgttgcccaggctggtctggaactcctgagctcaagcaatccacctgccttggcctcccaaagtcctcggattacaggagtgagccaccgtgactggcctaatttttctatttgtgtcgagatggggatctcactatgttgcccgggctggtcttgaactcatgggctcaagtgatctgcctgccttggcttcccaaagtcctgggattacaggcatgagccaccatgcccaccagcctggaacttttgaatctatccccttgttgcactgtctcaacagccctgtgagatgggcactgtttcttatcccaattttacagatgggaaaactgaagctcagggaggcaagcatctgtgtcaaggtcatacagcttgtaagggacagagctaggacttgaacatcctttttgtctgaccccacatctatgctttcaaccctatgccctgcatggcacccggtaaatatgtggcaggcctttctgggggacataactttcaagctcctcctttttcttactctgccctccctctcccacccaagtccacaagcccagccttctgtctcctcaactaggtcaggtgtctcctgacggcctcatgccttcctgaacctcactgggtttcagtctgatcttgacctctcaccagctgtgtgtctttgggcaagtcacttcacttctcttaacctcagtgtggtccttggtaaaatggggataattgtgagggccagatgtctctggtgcaaatatcgtaaagtttggtttaagaaagtatttttttattttttagacagagttttgctcttgtctcccagactggagtgcagtggtgtgatcttggctcactgcaacctctggctcccaggttcaagcaattctcctgccttggcctcccaaatagctggaattacagggagcaccaccacgcccggctaatttttgtatttttagtagagacagggtttcaccatgttggccggactagtcttgaactcctgacatcaggtaagccacctgccttggcttctcaaacagttgggattacaggygtgagccactrcacctggcctaagaaattattttaagatgtgggtcgggtgtggtggctcatgcctataatctcagtgctttgagaggccgaggcaggaggattgcttgaggccaggagtttgagaccagcctggacaacagcaagaccccgtctctacaaaaaaaaaaaaattaaaaattaaccagatgtggtggcatgtgcatatagtccctactactcaggaggctgaggtgagagaatcacttgagcctaggaggtcgaagctgcagtgagctataattgcactactgcactccagactgggcgacaaagtgagaatctgtctctaatataagtaagtcaataaataaatggaaataaattagtttaagatatgatcagatttgcatatttgaaaccaacataggcctggcacggtggcccacgccctgtaatcccagcactttgggaggccgaggtgggcagattgcttgtggtcaggagtttgagaccagcctgaccaacatggcgaaaccccrtctctactaaaaatacaaaaattagctgggcatagttgtgtgcgcctgtagtcccagctacttgggaggctgaggaaggagaattgcttgaacccgggaggcggaggttgcagtgagccaaggtcgtgccactgcactccatcctgggcaacagagcgagactctgtcttggagaaaaaaaaaaaaaaaraaaagaaaagaaaccaacataattctaactaacatatgaaagagatcagattgaacctggctggaaggtgaggggcccgtgagtgagttacagtcacccgaggaatgatgagcaactgttcgttcctccaaatcatgtgaatgaagtacaaaggaagagactggaaattgtccgggtgctattcttgaatgcccactctgcatcagacactattctaaaagttgtgtgctgctgaagggtgttatatccagggaatgcaggaatacctgaatcctgccccagaacgtggctgtcactcaccataggattctcagcatagaatttttaattctgtaaacaccagccagtgccaaggagagcatgaggggagagaaagaaaacaagaaagcacaggtgttcacaatgccaagaagaaagatcaatgagatgaccaaacaagaggcactgtcttttctggctacctagtagggaggacaatgtagagtctctgaatagacagtggtcctacccacaggcacactcagtgactataagcttcctgagagcagggctgttctgaagagatttgagttttctcctggccatggagagtgtaattaagtagccctgggcccttgaagacttatagtgcaggttgactgaaagaactaaatcagccagtctttgcggagaggttgtcatgcaaacgaagtgctaagggtcttgcatgcatcccttcattttatcctcacaataggctgtgaagtaggcaccgtcatccctgttgtgcattgtgcaggcaagaacaccaccaaagcaaatgggaccaagacaagacattgagaaggaatgagacaaactgagactctgaggactggcaagggctatggagggtggaagcaagataggagaaggaggaagacagacatatagaggtggcatggcagtgggcagggagagggggcagcaggtagaatcagactccaagaggcctcaaaggtccaataagcagcggtatctgggaggtctgtggtttacaaactcttctgcttatggacttcgtaagtggtcaattaatctatttatgaattctgtgcaggtactactttactcttatgatagattataaataatgtaatacttgaaattaagaaggagtgacatgaggtcgggcgcagtggctcatgcctaatcccagaactgtggaaggccaaggtgggcagataacttgaggccaggagtttgagaccagcctggccaacatagtgaaaccccgtctctactaaaaatacacaaattagctgggtgtggttgtgcatgcctgtaatcccagcttctcaggaggctgagacaggagaatcacttgaacccgggaggtggaggttgcagtgagctgagatagcgccactgtactccagcctgggtgacagagcaagactccatctaaaaaaaaaaaaaaaraaaaaaggagtgacatgaaaagttaatagaackagaagcagaagcactaawtctttctacaccccagtggattgtcttgtccacaaataaagtggcttaaccaaaatggagagggaggcaaatcaatttctatgcaccatctagaagaagttaaagggccctcctggatggctttattcatgttgatgagtaataataataactgctactggctgaggatcttctccatcccaggcatgtcagggatgcctaagtccccagtccctgctccagaccagacatgcttccagctgtggcagtagagggtggtggtctagggtgcttgctaagcccaagggtgaaactgtcttgacatccctccgcccattgtctcctcctaggtgccatgcctctgcaactcctcctgttgctgatcctactgggccctggcaacagcttgcagctgtgggacacctgggcagatgaagccgagaaagccttgggtcccctgcttgcccgggaccrgagacaggccaccgaatatgagtacctagattatgatttcctgccagaaacggagcctccagaaatrctgaggaacagcactgacaccactcctctgactgggcctggaacccctgagtctaccactgtggagcctgctgcaaggcgttctactggcctggatgcaggaggggcagtcacagagctgaccacggagctggccaacatggggaacctgtccacggattcagcagctatggagatacagaccactcaaccagcagccacggaggcacagaccactcaaccagtgcccacggaggcacagaccactccactggcagccacagaggcacagacaactcgactgacggccacggaggcacagaccactccactggcagccacagaggcacagaccactccaccagcagccacggaagcacagaccactcaacccacaggcctggaggcacagaccactgcaccagcagccatggaggcacagaccactgcaccagcagccatggaagcacagaccactccaccagcagccatggaggcacagaccactcaaaccacagccatggaggcacagaccactgcaccagaagccacggaggcacagaccactcaacccacagccacggaggcacagaccactccactggcagccatggaggccctgtccacagaacccagtgccacagaggccctgtycrtggaacctactaccaaaagaggtctgttcatacccttttctgtgtcctctgttactcacaagggcattcccatggcagccagcaatttgtccgtcaactacccagtgggggccccagaccacatctctgtgaagcagtgcctgctggccatcctaatcttggcgctggtggccactatcttcttcgtgtgcactgtggtgctggcggtccgcctctcccgcaagggccacatgtaccccgtgcgtaattactcccccaccgagatggtctgcatctcatccctgttgcctgatgggggtgaggggccctctgccacagccaatgggggcctgtccaaggccaagagcccgggcctgacgccagagcccagggaggaccgtgagggggatgacctcaccctgcacagcttcctcccttagctcactctgccatctgttttggcaagaccccacctccacggkctctcctgggccacccctgagtgcccagaccccawtccacagctctgggcttcctcggagacccctggggatggggatcttcagggaaggaactctggccacccaaacaggacaagagcagcctggggccaagcagacgggcaagtggagccacctctttcctccctccgcggatgaagcccagccacatttcagccgaggtccaaggcaggaggccatttacttgagacagattctctcctttttcctgtcccccatcttctctgggtccctctaacatctcccatggctctccccgcttctcctggtcactggagtctcctccccatgtacccaaggaagatggagctcccccatcccacacgcactgcactgccattgtcttttggttgccatggtcaccaaacaggaagtggacattctaagggaggagtactgaagagtgacggacttctgaggctgtttcctgctgctcctctgacttggggcagcttgggtcttcttgggcacctctctgggaaaacccagggtgaggttcagcctgtgagggctgggatgggtttcgtgggcccaagggcagacctttctttgggactgtgtggaccaaggagcttccatctagtgacaagtgacccccagctatcgcctcttgccttcccctgtggccactttccagggtggactctgtcttgttcactgcagtatcccaactgcaggtccagtgcaggcaataaatatgtgatggacaaacgatagcggaatccttcaaggtttcaaggctgtctccttcaggcagccttcccggaattctccatccctcagtgcaggatgggggctggtcctcagctgtctgccctcagcccctggccccccaggaagcctctttcatgggctgttaggttgacttcagttttgcctcttggacaacagggggtcttgtacatccttgggtgaccaggaaaagttcaggctatggggggccaaagggagggctgccccttccccaccagtgaccactttattccacttcctccattacccagttttggcccacagagtttggtcccccccaaacctcggaccaatatccctctaaacatcaatctatcctcctgttaaagaaaaaaaaaaatgggactgggagcagtggctcatgcctgtaatcccagcactttgggaggccgaggcaggtacatcacctgaggtcaggagttcaagactagcctggccaacatagtgaaaccctgtctctactaaaaatacaaagattagtcaggtgtggtggcacatgcctgtagtcccagctactggggaggctgaggcaggagaattgcttgaacccgggaagcggagggaggttgcagtgagctgagatcacgctactgcactccagcctgggtgacagagtaagactccgtctcaaaaaaaaaaaaaaagattcaatgacccttgttaaagcatggtaaggaagactttgttcaaggggagtgggactctctcaatcactgcagggactgcagctatgggattttgcagtgggggcatttgggctcaactatgagtacagcaggggcaagtgggagctgatagccagggaacagggttggatatctgcagctggaaaattaccaagaggaaacatcaggggaaggggaattctggctaaactgactgctggggatgggttctcggtcattttctacactgacctaacaggattcatactggaggcaggccagggtgctcagacatcaccggggggatggtggcagatgaggaacgtgatcagatataggaggtgatcagatatgggaggtgatcagatatggagtggtggggggagggttgttgctaagctgacttagcagagttcttgttagaactggattttatttatttatttattttgagatggagttttgctcttgttgcccaggctggagtgcaatggcgcgatctggctcactgcaacctccgcctcctgagttcaagtgattctcctgcctcagcctcctgagtagctgggattacaggcatgcgccaccacgcccagctaattttgtatttttagtagagatggtgtttctctatgttggtcaggctggtcttgaactcccgacctcaggtgattctcccgccttggcctcccaaagtgctgggattacaggtgtgagccaccacgcccggcccagaactggattttaaaaggaagtgcacagatgggcctaggagaggactcaggggcctgactgattaaagcttggccaagcacagaatctttcccactctccagaagctcaccctgacctctccttttcactcaggccctgtctctcattaacagccagtagcttattggtgatcctagatgcagcctgcaaccttttgtacaactcacagaagcactgatttgctgtcaaatggtggaaaagttcaagctgccaaactttttcttaaaggaccaaacagtgaatactgtaggccttaactgttgcaacaccatagcctctgttgcaacaactcaactctgtccttgtagtacaaaagcagccactgacaatatgtccataaatgaatgcgcatggttgtgttctaataaaactttatttacaaacgggcggcaggctcatttcagctccgtcagtttgctgacgcctgattttaagcatagggtgaccagtcgtcccagtttgcccggaactttcttgattttagcactgaaagtcccatattccgtgaaactcagccccagtaaaccaggttggccctgctatttaagcaacacttgcattatcccattcaaaactcacactaccttgtgggggtcaggtcaccgcccagtggatccaccttgcctgctgcctagacagagccgatttatcaagacaggggaattgcaagggagacagagtaattcatgcagagcaggctgtacaggagacggggatcagagtttttaacgacaatttggcgggtaaggacttgggaagttgggagtgctgattggtcaggttggagatacagtcatagggggttgcagtgaggttttcttcatgtcttctgttcccggctgcgatggcagaactggttgagccagaataccagcctaggtggtgtcaactgatccatccagtgcggggtctgcaaaatatctcacgtagtgctctgaggttttacaatactgatgttatccacaggagcaatttggggaggcttagactcttggagccagaggctgcatgacccctaaaccataatttcgaatcttgtagctaatttgttagtcctgcaaaggcagatcggtccccaggcaagaagggggtcttttcggggggaagggatattattaattttgtttcagagtcaaaacacgaactgaattatttcccaaagttagttcagcctaactttggggaaggaatgaacaaggacagcttaaaggctagaagcaagatggagtctgttcggtctggtctcttccactgtcatcatttcctcagttataatttttgcaaaggcagtttcagtcagattagaaaaccaggatttggagagttcttgctcttctgctcccaaataccttccagtcatttccatagagagagaaagaagctgccgcttaaacagactctgttctaccttctaggagaggaataaaagtcatctcaggggatagtctttatttttcttcttgaaaaatacctccggctgggtgtggtggttcacgcctgtaatcccagcactttgggagaccgaggcaggaggacggcttgagctcaggaatttgagatcagcctgggcaacatggtgaaaccccgtctctacaaaaaatacaaaaattagccaggtgcagtgatgtgcgcctgtagtcccagctactcaggaggctgaagtgggagaatcacttgagcctgggaggtagaagttgcagtgagccaaggtcatgccattgcactccagccttggcaacagcagtgaaaagctgtctcaaaaaaaaaaaaaaaaaaaaaagaaaagaaaagaaaaggaaaaagaaaaaaaataccttcaatggcctctttggaagtgaaggacttctttccttgcccccaatggtttatcccggaaaaggggagttcacagagaaggttgagtctggcaggggttggctgtggcttgggagagaggggttggaggaaagagacaagggaaaggtaggaaagagccgtcagggggaaaggccatgggacagcatcggggaggagtggggagagggcccacacatattggaaatgcagtgtctgtctcctcccctgaacttctggaaggatcaaatctgatacacacaggcaggtgtgttcaaagtgtcctgggggtgctgatggaagaaggtgggagtgtctgccatgggctgggtcagttaacacccggggtcggcaggctgatgggtcaggagagactgagtctacctcccctttgggagggatcagaaaaatcagagaaggggagctgaaggctccacagcagggggctgtggactcaggctgaaggacctctgagttgttccccagggatcttgtcacctcgtcttcctgggagctttcccctatttcctgacagctcctgaggatgctgtgtaaccacagatttccatttgcgttggaagagggccaccttccctttacagttttctctctctccaaggtgtgggatttcattcagggtgggcgaagccgggtgcttgaagcggccaccagggggcgcccgccgccagctcttagagcaggtggaagcctgcgtttcccttgggccagacttggagatcatttagccaggaaggagccccaaagccagtggcgtgctgttaagtgtttaacaactggcttccaatgggaaaaagtcctgatttgtagcatttgccaatgtcttccatgtaaatactcccacagccgattttgagctaccaaccattatatagttgatgatacaataggtgttagtaacaagggcatcgatcatcggataatgtagtacaattattaggaattggtgagttttgagtactgatgaccttggcttttaatataatagaatttaatttattaaacaactgacacaaaattctgaaaattttgttgattagctctcacgggcagatatagtctggctcctgcacacccctgtgccctcccctcctgcctgggcctcccatgcccttgaggaccaccagcctgaatcaccccactcatccattcagcaaacacatcctgaacacacacacagctgcaatatccccgtgaatcccctcaaacagctctcacagacggttctagtattctccccattttacagaagatgaaactgaggatgagagctaggtgaagtcacctgccccaggtcatgaagaggatctgagattggaacccagacctgaaagccaggatcttaccactgtgtcacgctgtccttgagatcacagcggggttctgggggaatcccacgccccaaaacctcagccctgctgacctgccctggggcctggaagtcccccattagtcaccctctgtggctcctggctgctgagggaaggcgctgttccttgggagggtaaccgagtacagcgcagccctctcattgcagagaacacaacacagcagagctggggcctaggactaagagggatggccgggggcaagcagctggcctttactgagcacttactgcatacctagtgccttgtcaaacagtttgtctgcattatctcatttaggactcaacctcataatgtgggtgcaatgattgttccattttcttgccagggaaaccgaggttcagaaagctgaaccacttgctccagccggttgcacggttaggaaaccacactgtgctgacttcagctctgccagcagggaaggaaggagggtagacaggaaatggggggcgggggatgatgggctcagtttgttccaggtcccttgtctcttacaggctggggctgccaccctgggggtggttcatccagcagctgatctggcaggggctccccaaattctttccccagatcccatccctctttgccactcaaccaagccaccgattactatggaatgtgccaggcactgtgagaggccctgggatgccatgtgagtaggacaggcctgtaatcccagaactgtggaaggccaaggtgggcggataacttgaggccaggagttcgagacccctttggggctcatggtctagagggggacagattgatcaaataatcacccaggaaaagatcagattatgtcagattatggctgggccctgagcccagaggagagatgctgggagcaatggggccagagctggggggcatgggtcaggaaaatcatggttgaaacttgaaggacacagagttattgacttgggagggaagggatagagggaagaaagttccaggcagtgggagcatcatgggcacaggagtttgcactaggggagcagacaaggtgggggcagctggaaggagccagggtggccgcatggaggaggaagaggctgtgtgaggatgaggagaacctggactagagcagggtgcaaagaagttgtggaatcgagaggtaattgggaagaaaagggtaggagttgctgatgggttggaagtgaggaaaaaggaggttgaaatctcaggtttctgacttgggcagctatcctgatgagggtgccacggggtggctgggaaagccatggaaggaggttgcagggctggtggtaagaggagtgtcctgagctggggttcagccaagttgggtctcagggcctgctcaacctccaggtggaggttccaggaaagctgttgcaaaagatgcttgaggtcattagccatcagggaaatgcaaattaaagccacagtcagatgccacttcacaccctccagcaggactagaattagaaagactgacaacacccagtgctggtgaggatgtggagaagctagaacactcacatgttgctggtgggaatgcaaaatgatacagccactttggaaaccagttgggcagtttcttataaagttagacgtgtactcaccatgtactccccatccaagccagaaatcccattc

SEQ ID NO: 5633 - DNA, 44763 bp, Homo sapiens
  misc_feature (1)...(44763): n = A,T,C or G, or insertion/deletion polymorphism (see Tables 1-2)
tccctgtctgacaactttgaagagagtagtggttctcccagcacgcagctggagatctgcgaatgtgcagactgcctcctaaagtgggtccatgacccccgagcagcctaactgggaggcatcccccagtaggagcagactgacacctcacacggccgggtgctcctctgagacaaaacttccagaggaacaatcaggcagcagcatttgcagttcaccaagatccgctcttctacagccactgctgttctgcagccactgctgctgatacacaggcaaacagggtctggagtggacctccagcaaactccaacagacctgcagctgagggtcctgactgttagaaggaaaactaacaaacagaaaggacatctgcaccaaaaacccttctgtacatcatcatcatcaaagaccaaaagtagataaaaccacaaagatggggaagaaacagagcagaaaaactggaaactctaaaaagcagagtgcctctgctactccgaaggaatgcagctcctcaccagcaatggaacaaagctggatggagaatgactttgacgagctgagagaagaagtcttcagatgatcaaactactccgagctacaggaggaaattcaaatcaatggcaaagaagttaaaaactgtgaaaaaaaaatagatgaatggataactagaataaccaacgcagagaagtccttaaaggagctgatggagctgaaagccaaggctcaagaactacgtgaagaatgcagaaggctcaggagccaatgcgatcaactggaagaaaggttatcagtgatggaagacaaaatgaatgaaatgaagtgagaagggaagtttagagaaaaaagaataaaaagaaacaaagcctccaagaaatatgggactatgtgaaaagaccaaatctacgtctgattggtgtacctgaaagtgatggggagaatggaaccaagttggaaaacactctgcaggatattatccatgagaacttccccaatctagcaaggcaggccaacatacagattcaggaaatacagagaacaccacaaagatactcctcgagaagagcaactccaagacacataattgtcagattcaccaaagttgaaatgaaggaaaaaatgttaagggcagccagagagaaaggtcgggttacccacaaagggaagcccatcagactaacagcggatctctcggcagaaactctacaagccagaagagagtgggggccaatattcaacattcttaaagaaaagaattttcaacccagaatttcatatccagccaaactaagcttcataagtgaaggagaaataactttacagacaagcaaatgctgagagattttgtcaccaccaggcctgccctaaaagagctcctgaaggaagcactaaacatagaaaggaacaactggtaccagccactgccaaaacatgacaaaatgtaaagactatcaaggctaggaagaaactgcatcaacagaaatcatagtaaactgtctctcagaccacagtgcaatcaaactagaactcaggattaagaaattcactcaaaactgctcaaccacatggaaactgaacaacctgctcctgaatgactactgggtaaataatgaaatgaaggcagaaataaagatgttctttgaaaccaacgagaacaaagacacaacataccagaatctttgggacacattcaaagcagtgtgtagagggaaatttatagcactaaatacccacaagagaaagcaggaaagatccaaaattgacaccctaacgtcacaattaaaagaactagaaaagcaagagcaaacacattcaaaagctagcagaaggcaagaaataactaaaatcagagcagaactgaaggaaatagagacacaaaaaacctttcaaaaaattaatgaatctgggagctggttttttgaaaacgtcaacaaaatcgatagactgctagcaagactaataaagaagacaagaaagaagaatcaaatagacacaataaaaattgataaaggggatatcaccaccgatcccacagaaatacaaactaccatcagagaatactacaaacacctctacgcaaataaactagaaaatctagaagaaatggataaattcctcgacacatacaccctcccaagactaagcgaggaagaaattcaatctctgaatagaccaataacaggctctgaaattgtggcaataatcaatagcttaccaaccaaaaaaagtccaggagcaggtggattcacagccaaattctaccagaggtacaaggaggagttggtaccattccttctgaaactattccaatcaatagaaaaagagggaatcctccctaactcattattttatgaggccagcatcatcctgataccaaagcctggcagagacacaaccaaaaaagagaattttagaccaatatccttgatgaacattgatgcaaaaatcctcgataaaatactggcaaaccaaatccagcagcacatcaaaaagcttatccaccatgatcaagtgggcttcttcgctgggatgcaagggtggttcaacatactcaaatcaataaatnnnnnnnnnnnnnnnnnnnnnnnnnnnnnnnnnnnnnnnnnnnnnnnnnnnnnnnnnnnnnnnnnnnnnnnnnnnnnnnnnnnnnnnnnnnnnnnnnnnnnnnnnnnnnnnnnnnnnnnnnnnnnnnnnnnnnnnnnnnnnnnnnnnnnnnnnnnnnnnnnnnnnnnnnnnnnnnnnnnnnnnnnnnnnnncaccactcctattcaagatagtgttagaagttctggccatggcaattaggcaggagaagaaaataaagggtattcaattaggaaaagaggaagtcaaaattgtccctgtttgcagatgacatgattgtatatttagaaaacccccatcgtctcagcccaaaatctccttaagctgataagcaacttcagcaaagtctcaggatacaaaatcaatgtacaaaaatcacaagcattcttatacaccaataacagacaaacagagagccaaatcatgagtgaactcccattcacaattgcttcaaagagaataaaatacctaggaatccaacttacaagggatgtgaaggacctcttcaaggagaactacaaaccactgctcaatgaaataaaagaggataccaacaaatggaagaacattccatgctcatgggtaggaagaatcaatatcatgaaaatggccatactgcccaaggtaatttatagattcaatgccatccccatcaagctaccaatgactttcttcacagaattggaaaaaactactttaaagttcatatggaaccaaaaaagagcccacatccccaagtcaatcctaagccaaaagaacaaagctggaggcatcacgctacctgacttcaaactatactacaaggctacagtaaccaaaacagcatggtactggtaccaaaacagagatatagatcaatggaacagaacagagccctcagaaataatgccgcatatctacaaccatctgatctttgacaaacctgacaaaaacaagcaatggggaaaggattccctatttaataaatgttgctgggaaaactggctagccatatgtagaaagctgaaactggatcccttccttacaccttatacaaaaattaattcaagatggattaaagacttacatgttagacctaaaaccataaaaaccctagaagaaaacctaggcaataccattcaggacataggcatgggcaaggacttcatatctaaaacaccaaaagcaatggcaacaaaagccaaaatagacaaatgggatctaattaaactaaagagcttctgcacagcaaaagaaactaccatcagagtgaacaggaaatctacaaaatgggagaaaattttcgcaacctactcatctgacaaagggttaatatccagaatctacaatgacctcaaacaaatttacaagaaaaaaacaaacaaccccatcaaaaattggcgaaggatatgaacagatacttctcaaaagaagacatttatgcagccaaaaaacacatgaaaaaatgctcatcatcactggccatcagagaaacgcaaatcaaaaccacaaggagataccatctcacaccagttagaatggtgatcattaaaaagtcaggaaacaataggtgctggagaggatgtggagaaataggcatgcttttacactgttggtgggactgtaaactaattcaaccattgtggaagtcagtgtggcaattcctcagggatctagaactagaaataccatttgacccagccatcccatttctgggtatatacccaaaggattataaatcatgctgctataaagacacatgcacacgtacgtttatagcggcactactcgcaatagcaaagacttggaaccaacccaaatgtccatcaatgatagactggattaagaaaatgtggcacatatataccatggaatactatgcagccataaaaaatgatgagttcatgtcctttgtagggacatggatgaaactggaaaccatcattctcagcaaaccatcgcaaggacaaaaaaccaaacaccacatgttctcactcataggtgggaattgaacaatgagaacacatggacacaggaaggggaacatcccactccagggacggttgtggggtcaggggaggggggagggataacattaggagatatacctaatgctaaatgacgagttaatgggtgcagcacaccagcattgcacatgtatacatacgtaacaaacctgcatgttgtgcacatgtatcctaaaacttaaagtataataataatttaaaaaaaggaaaaaaatatatgtataattgacaaccctcataagtacaggctatcatgagtgcatattttctggggtctttcagcgttagagttatttctcctagtgaagggaggtttaactgagaaataaagtatatgtgagtgagagttatcttagagaaaggtacgggtagggaggcagtaaacacagaaggaacaatatgtatgacataccatgaggcagggagagatttggcatgcccgagaagtggaagaaaactggggtgcctttgttgactgggttctagtgaatgtctctctggaaggctggagttgctctttaattccccatttcaggcccatcactaacacctgacaatatgtatgccatgatgaactattagtagttcttttgagcttatatgtttttatatacaaatattcatttgtatgtgctatttttatgccttaaactcctttatcatttgtccctttggcaatgtttttctcatcttttaggacacaatttaagcctgtcctcagagaaaatagttttctgactgttcattcctttctctcaatagataggactactttgtccattatttttaacactgcactttagctttatgttcattgttgttatcatatgtgtttctcttacttgaatctgagttatatggagctaaaatcatgtgttgctaatttttgtttcaccatttgtaatatcagtattagtcatggctaattctcttggtgtacttcatcccattagaaaagaaatgacaaatgctgtgtctcaacaacttacacaaaattactcattagacacatttgattatggaaataaaattaaaagtgcatatgataaaatgttatttaattatgttttgcctgttttgctttagttttttacataatttttctacatgacaattagtaattttttgtgtcttatatatttgtccaaaatgaagttcaaaaatgtaaaatatttaattcagcaacagcagcatatgagttagtatttcctctaatttttcgaaatctgtgggaagtgtttcccaatttcctttggttgtttcatgtgctatattgaagaaaacatgagtatgaaatggaacctcagctctttcaatgacttccctttttgagttgactccgcctccatatgtagccttttcattttcatgaaagtgaagtgatttttagaattcttagttgttttctttagaagaacatttctagggaataatacaagaagatttaggaatcattgaagttataaatctttggaatgagcaaactcagaatggtgctrcttgaagactctggatctgctggtaaaagcttctcatttattctacatttcccctttaatggggtatgtaattattatgacagtcaatggatgtgatttaaaagtgattggcatcaggagagtaaggagtggaaaaaggacataggcttatatggcagcacctttgatctgccatagattcaaaattgaagatgtgatatgggaatcagagtcggcattaattttgtaaaactgctgaggtgaaattaagtcaggaactaaagttaactgaaatgtactgagtatgaaaaaatagttgttagaaaagatagaatatgcagaaaggaatattgatagagagttaattacataaagaaagttatctactctgataagtgagttatctattttaagacttatttggacatgttaaaatcatttagcatttttagttttaaattagtgttgggttagagtaacgagaagatatgagagtaataacagcattaaagagtgtattatgtgataaggatacaggtagagatgacaagatttaatatttgagtttttcagatatggatatcatcacttaggtattgttctgctagctactatttggcaagcatcaagccaggtactggtgaaattatggtgaacatgatagatataattcgtttactcatggaacttatcctctatcagtgcggctaggtagtcttaaagatgggggcatccataattgaatatcaaggtggttagggaatagagaaatctcaggataccttccctgtgcctgctgggagaattgtccactactaagtttcattgatgttgtttccattttccaggttttaagggttgaccttgcaattctcgtttccaccaccaaccttctgctaatccgtcacctctaggttgcctataaacatgaacattttcaaaaccatttcactgaaactatatgagcctgggtatgaatgttttctgcctgccttgcaatttagawtgaagagttttctgtcttggtttgagcttctttgttaattaacctctgaaaccatctatcttctccaaagtctctttttgggaagatgctacttttgccctcttttctttttcacagacttcagaagacattttgtcaacytgagtcccttcaccattactgtggtcttacttctcagtgcctgttttgtcaccagttctcttggtgagtactttgtcaaatttacttacagccttagcccactctgacaagaacagttaaaaggcaaacaatttttctgaaggccaagtagcatctaaaaactaggtgacatgctccatgtattcaaaggrtcagatattattaaaagcacacaataaaaatctaaccaaaatattagcatggttcctcaccaaatgaaataaactcacaggagagaaatgaattttacttaaagattagaaataatgttgaactgaaaaataggaaagaatacaaaggaggagaaacttcagaatcattaaaacaaaagtgaatttgggaaacacattagtaaattcaaatgccaaaatttatctaaaaatgtattgagagatgccaggttggtgggaccagattcctacataaagctaaaataatgccaaggaggcaactgagatcatctatcatctggggatgggaagagagtacaaagaggtttattttatggtagaaaatagcagaaaatatctccatcttaattttagataagtttcagtctagcgtttttaagatttatgctattttacatatacgtatgaaataagagttaaatttcttacaactagtcttttcatcttcataaattctctatcagccttctttctatcgaccttaggattttggagaaatgtaaaaagttcatccccataacgttttgtagcatcttatttaactcgaaaatgcttcacaggaattatataaattgccactattaaggctttccagccataaaataaagctattaaacactattgtgttacttacctttactggtcatatagcactgcttaatttgaaaccagtgatactgatacttatatttgaatgactgtgaaataacattcttctgttttaccatggataggactaggatggttctcaaatctgagtttgaaggataaataagtaatgtaaaaaaataattttctacttgctctttgcgaccttggccaattactgtcttaatccattgttgcaggaggaacagacaaggagctgaggctagtggatggtgaaaacaagtgtagcgggagagtggaagtgaaagtccaggaggagtggggaacggtgtgtaataatggctggagcatggaagcggtctctgtgatttgtaaccagctgggatgtccaactgctatcaaagcccctggatgggctaattccagtgcaggttctggacgcatttggatggatcatgtttcttgtcgtgggaatgagtcagctctttgggattgcaaacatgatggatggggaaagcatagtaactgtactcaccaacaagatgctggagtgacctgctcaggtaagactwgcattagtcaaagcctcaacacaaaatccttggtgggaaaaaaatatgtagatgggttaaaacctagaataagccactttcctgtaagcaatctagttcatgtataaaagtactccatccattgctagaaaaccacaaaacacgaggtcatttttttttaataaaaaaaattctgaacactgtgattaatgaggaggtgactggcttcaattttatacatgatcttagccaaaaagccaagaagtggtggtttaaatttgatattcagtaagcttactgtaacctactattcctatatcataaaaatatcatgacatctaagttatttccttgttctttcccagtgacttgttttgatatgttgacccacaaattattaccattttgtccattaactgataatcaacttagtgaatcaaaaaacaactatttctagcattaatacatcatttcttgttgtaggaaggattctttgaaagtataattgcttgaccagtgtgcaatgctagtcatttcatttacattgtgcttttaatttacaaaacatctccatatgttttattgcaattgaccccacaataactgagaaagtcatgtgtcaggcctttctgctgacaaatcccaagggcacatttctgatccaactcagattcctgggatccccatttctttttgtttgtttcattcctttttttttttttttttttttttttgggacgaattgtcgctcttgtcccccaggctggagtgcgatggcgctatctcggctcactgcaacctccacctcccgggttcaagcaattctcctgcctcagtctcccgagtagctgggattataggcacctgccaccacacctggctgatttttgtatttttagtagagacagggtttcaccatattggccaggctggtctcgaactcctgagctcaggtgatccacctgcctcggcctcccaaaatcctgggattacaggtgtgagccaccgtgactggcctgtttcattaatttttatacaatcctctcacctcccagcctctctctctcccataggactgactatagaaaggacttatctctgtccaggcatcatgatgtgataagagaaacacacagtagcatctagaaaaatgctgaaataaattttcacatagctaatatcctgtgattttgtgcaagttgtcaaatctctctaaacttcagtttctgaggattcaatgatataatacatgtaaaactactggtacactgtttggtatgtaacaggtgctgannnnnnnnnnnnnnnnnnnngtgactcagttctctttcttctttctccgcttcctcttcctcttccttctcctccttctcctccttctttcctcttatttttaaccactatgggaggtgtgaaatggggaataacaaaagtaacatctactgcaaagtttaaaattatcataaattttagcaggctcttatcataattattgctgtgtatagaactggctgtttagctaaaacagtgtagtacttttagctctttttttctgttgttttataactaccagtggagttaatcaatttgctttttgaaatttatacacttaaagctttaacctgagtcaaatttaaataacttgagtcgaatttatctatttctgtacaaaaaagagtatttacatctgtcctagtaataggtggaaacaaaacaaaacagaaagtttaaaaactttaacctgtaaacattttcctttgtaagtagatatagataaaaatcctaattgcttcctagattttaacatattaaaattctctactgtgtggagctgggcaatgtccaaaatcaggcaccattttaaggacaacataaaatcccaagtgtccagaggaaacttcttttctaaaatcacttctaaatgaatgtaacttctgaactctggtcttttctctgctccagatggatccaatttggaaatgaggctgacgcgtggagggaatatgtgttctggaagaatagagatcaaattccaaggacggtggggaacagtgtgtgatgataacttcaacatagatcatgcatctgtcatttgtagacaacttgaatgtggaagtgctgtcagtttctctggttcatctaattttggagaaggctctggaccaatctggtttgatgatcttatatgcaacggaaatgagtcagctctctggaactgcaaacatcaaggatggggaaagcataactgtgatcatgctgaggatgctggagtgatttgctcaagtaaggactgatcttggctcattctattctccaggagaggacaaaagaaaggggtaataaatcttaagagcctgaactcttaagaacataatgaagtctgcttcttttgtcaccgcattttaacctaacttcaggttccagttctgatacctgtggactttttaccttaactgaaattaggagaaataggttagggaagtgcatagtgaaactgagatccaggtcataagaaaagaagaaagtgtttaggaaaagcccataaagaaagggagagaccgaaaagaaaaagaggggaaaaaggaaagaaggaagggctttactaggaaattttgcactatgaagttttatgaccaaaccactccagttatcatctaatccacaaaagcctcctcattagcctcattaacccactccttcccaaatcatttttcaagttcacagaatcgaatcacttgttaaaaatcaatattggtttctcattaaaactttatttatactagatatgcattgtatctgtctagagactttcacgttgtatactcagactgggggcggggaaaatcgtttgtgtgtgcagagataccactcttcgtttttctgttgaattcttagtataaaaggagattgagtgtgtcttgaaccccagagaacacttaggaaaataagagtaaaaaatccctatcttcaccagatccctttctctctctctctctctctctctgtgtgtgtgtgtgtgtgtgtgkaaataaaggaacttccattcaaacttgtttaaaaagaagagaatactggctcacaaaactgggaaatccagagggtatagttagcctcatgcatggttggattcaggttcttgaacaatgtcatctgggttctatctctttctgcatgtcttgaacaagctttttcttgttgaacaatgtgatcagctatagcctgaaccacaatgaatggaactcctacaagaaagatagattttgttaggttaagaatgtgaagaatttggagtagaaaaaacacagactgtaccttccattctcttttacccatcaacatttctctaggcccccagttagcacatgctgacgaatcacaatcccacaatgaataacattgtgggaatgaaaacggaaactgccagaggaaacaaccagtttaatttattacagaatattcttcagaatcaacgtctgttctttgaagaatattgatttggggaaggtgaaaattgtagtactgaagcctcctttctctttgctctgcttttaaactaaggaagtggtcacaacaggttcaggtgtacaacacaggctaggtagtatcaatggagaatgcagtcagaggcaaaagggattgctaagtatggaggcaaactgaaggatgagggagtcacctaaacacatgcaaatatattttaaccagaaaaagtaaacagttctaacaagaactctgtggtggtcaaatagcaggtctctagatgaaattcagtccctgtatctcctgttagaaacacttcctgtagtatatgctgtctatactgagatgtcccatcttcttgcctgatccactcctccttccatcttgaatgatttccagtggtagtacagtacatcacagttttctctgtctccacttatatctctccccttttccttaactcatctcaggtatagctatttatagtctcatgttcttgcttccttatcgcagacctgttgtgtgtctctgttacagagggagcagatctgagcctgagactggtagatggagtcactgaatgttcaggaagattagaagtgagattccaaggrgaatgggggacaatatgtgatgacggctgggacagttacgatgctgctgtggcatgcaagcaactgggatgtccaactgccgtcacagccattggtcgagttaacgccagtaagggatttggacacatctggcttgacagcgtttcttgccagggacatgaacctgctrtctggcaatgtaaacaccatgaatggggaaagcattattgcaatcacaatgaagatgctggcgtgacatgttctggtaagttaaaaccaaaccaaaaccaaaacactaaacaaaaagaaaagcagaaacggaaagtcctgtgctccttaagagtaggaacgtgctccttaagaagtagaaatgcctagtaaattccttgctgggaattcctttatacctgtaatctttgacacattctttattcaactagtttggaaggttgtctgacggcattctctgtaataattactcagactgcttttatggagcacacttcaaactcagaatctacctggagctcagagagacaaaatttcctaggaatctgtttttaaatttttttaatttacttatttttttactttaagttctgggatagatgtgttgaatgtgcaggtttgttacatgggtaaacatgttccatggtggtctgcttcacgtatcaacctgtcatactaggttttaaccccccatgcattaggtannnnnnnnnnnnnnnnnnnnnnnnnnnnnnnnnnnnnnnnnnnnnnnnnnnnnnnnnnnnnnnnnnnnnnnnnnnnnnnnnnnnnnnnnnnnnnnnnnnnnnnnnnnnnnnnnnnnnnnnnnnnnnnnnnnnnnnnnnnnnnnnnnnnnnnnatgggcatttgggttggttccaagtctttgttattgtagatagtgctgcaataaacatacatgtgcatgtgtctttatagtagaatgatttataatcctttgggtatatacccagtaatgggatcgctgggtcaaatggtatttctagttctagatccttgaggaatcaccacactgtcttccataatggttgaactaatttacactcccaccaacagtgtaaaagctttcctatttctctacatccttgccaacatctgttgtttccagactttttaatgatcgccattctaactgggatgagatggtatctcattgtgattttgatttgcatttctctaatgaccattgttgataagctatttttcatatgtttgttgtccgcataaatgccttcttttcagaagtgtctgttcatacccttcacccactttttgaggaatctcttttaaagctgaattgctcatatctttctgccattgacaatttttatcaacccttgaaactacagtcccatttctaacaaaaatttatggtctatattattgtttcttaaaaagtcaggaaataagttacctataattttcaatgcatcagtatcagagaagaaaaaagacaaaaaaaaatcctctggaagctaacctccatatgtatcgatggtttaagtttatgtttcttttgcagatggatcagatctggagctaagacttagaggtggaggcagccgctgtgctgggacagttgaggtggagattcagagactgttagggaaggtgtgtgacagaggctggggactgaaagaagctgatgtggtttgcaggcagctgggatgtggatctgcactcaaaacatcttatcaagtgtactccaaaatccaggcaacaaacacatggctgtttctaagtagctgtaacggaaatgaaacttctctttgggactgcaagaactggcaatggggtggacttacctgtgatcactatgaagaagccaaaattacctgctcaggtatgactttcaatcaacttgttaagaagaagggtgtaaatttccagtactacctttgaaattgaaaagaaacattggtccttatgactagatcactctcaagaaaccaggaaatatctacacaaattccactgggagagtcagataagtttacaattcatgttgcactttagatagaagtgtttgggttttgctcactttggtttttgagtaatttttagatcaatagaggtataagattaaggaggattaaaatttaaaaaatagaattcaatatttctttcacaggatgtcaccaaaagatttaaaaaataaccatgttagataaactgacataaccttcagctccctctattgtactgtgaaagaattttctttttttttggaaaacctgtgaatatttcactgcaacctctttaaaaagctcaaaaatgagttgtaaactggttaggtttgtggataatctttagtattttatgctaattatatytatacaaatgttaactttgttgaaaagtgatgctttttaaataactctaaagtaaatgtaacttttactcatgcaacaaaaaggcttcagaaaacacagtgtacaagaaaaccattaaacatgtagagacctcacagaatggaaacttgtacgtgctgcatgtcctctaaccaacaatatggctccagatacctcccaacctaggcatgcagtgaggggcatttccctgatgttacaaatggtgcttacctctagttaagtagaaattatcctccgattgaaaaaaggcaatcatttaagatataaatttgaatttctatattactttttaaaaaatattctggaccaggcaatataatcacatggtttaaacttcaaaataaaaaagtgtaaactcttcccccactactatccaattcttttcctcacagacaacttatgtggttggaatatttatatatcatttgagatatttcatgtaaatacaagaaaatacaaacaaatctatatatagctatcatttgctttcattatccaaatggtggcatgttgtataaattgttttgtacctgaagtattcacttagtaaaatttcttgatcaaatttcacatcagtatttaaagagctgtctgaaattacttccatatctataacatttcttataatttattaccgtgtgtattcatttattcttttaattttttacctgacaaggttagccattcttttacctaaatttttttttaaaaaaccattatttggattttaaaaaattaatgttacttttatttcctttctaattcattaaaatttacttttctttctaataattctcttcagatttcctaaagtttgatttctttttggcccccaacttcttgagttgaatcttaagttttatttcttctgatttactaatataaatattttaggttatagattttccttctaaatttataatggtttgtatattttcttattaattgtattttacattgattagcattaagttctgctgtatctaaaagagaaacaaataatagtgactgaagaaagacagtgttcactttttctcatttaaaattagtcaaatagataagcagtttaaggctgttttggtgtctctgttgtcaccaagaaacatccagaatagatttgctgcagtaagtatcaaatcctaccggacaggaaggataagccaccccgcagctcagtgagttccttggaaagccaatctggtagacgaagtgctggcctctgagaaggtgtcttctgtccgctgtccttcatgggccccagtgttgctctcagggcagttcttcctggcacattattcttcacagttacatccaagtttggtttggagagtatctctatctaaggacagcacacctttcacaacccacttcctgctaatattggtttagggacctttggattaaagattgactaatcaagggctgatgtcagctgccctcaaattcaacaaaaaagttctttccaaggttactaagcttctagtctacttgctttataacccaatgccatctgaaagtaactatagtccaagagcatataaatatactttgatctatgctgtgaccagcccttctctttaattattgaccactgccttaaggccgtttgaaactgtgggtttgggaggaaggacaagacctaaattccgtctttgccggtagactcattgcctttgtatctggagtatcaattttatcttctgacaaggctacagttttaccaccacctcaatttggggggacaggatacttagagttttttcttcaattcttcaattccaaattataggactcttgattaacaatatacaacacctgcaggcagaccatacccccttataaaattgatatttctcctcccatttctgcttgcattctgactgctggtagtctgaattcatctttcttgtaaatgctaaaagtggcaaggagaatccacgtcatgcaaatattctgattttttgtagttttgtttcttgtactttgcccaataaattctgcattttttaagcatcagtgagcacacggttttcttttcaaagtgaggcttacccaaatattttaccatgtgtaagactccttaggtttttagyctctcacacctgagtcattaatgcattctgcccatcaactccattcaaccacacccatattttaggttgcattactagaataccttacttatggtaacatgttctaaattattcaggattctattcagatgtgtataatagaaatcatgaataacataaatttgcaacttaaggtgggctccgtacttcacagagctgtatttttgtttgctatttgccatgtgcactttttgtttccttttacaaactcttttgttatattgctgtaggttttggaagttcttctacttatgttgggggccttggtttttagctttttacatgttttgttagtaatatagtttgtacttttgtttctttatttacttgatactttcaatgatgacatactgtctctgtcaatgatgatatgctgtctctgtgcctgccaaattcaagctaygaatttgatcatctgtttaaattgtttaacttttatatagtacagggctatacagcttaaaagaaccaggagaattcaactaagcaggagaattggaaacaatttaagataaattgttgacagaaaaaggtctaggaaattttggccacaaaattactttgaatctcagacattttgtttgtgatgtctgtgtatgtactgtagaggacatctgaccttaagaaacagttcatttgagctatgctgtcttttaacttaggatggagaaataattctgagattatgatgatctatacttcttcagagtctgaaaagcattaaatgttgaaaatacattaaagcttctttaaatcataattgtatattttatttatcactaaacaaaaggaagtaattctagttaattatgtctctaattatgttaaagctctttgtagatctatttatttttctagaaaaagaaagaaaaacagattcagttacttatgccaggggaaaactgtagttgttgatcaatggtgctaaatccaggtgcaaaaatttacttaatggtttttatgtaaaaacacagtcagagacttagcagaaaaaaatccattaaagggatacatttccaatattctatccatgtctaaagagtaacgatataagcaaagcgacccataggatagattaacatgttactagcagattcacgaaataaaggctgaggatggagtctccaagtcactttctgagttggagaatttgtcctctgccttgactcaaatatgttagtacaaagaaaacaagaggatacttatagaagggactttttctcaattgcttaatgagttttcacaatggaaaagaaaatatttttgtttgtttgtttgtttgtttttcactggttttcttttggtttattttgttcaagatgggtccaaatgaaagagtaagaagttacaagaaaccagaatttggcttgatctaggagactgcctttacttaaagatttagggctgtccaaaagaggttgggatcatatgaatactagttaatgatatcttagagaaatttcatgcttgaataaagattcaaaaagaagaaatgaaagaccatcccactcaagggtcattaattatttgtattgtagaggtgttatttgctttaaactctgagctatgtttagaaagcaacatgtttttcatttcaaatttggataggaatttgctttgcgcagatttaatggataatgggtgaaattttgacatgttgaggtattctatattgctgtagtacagaatatggtcatattcgaaacattttctaagacatttttgtatcaggtgaaaggtttatgagagatgaaaggaaatcagagtatgtagattggcaagggctgatggtgtatctatatcattgtgatagtaacatcaagagattacaaaaattgttgatatttgatagcaggtatctataaaggacttaagaccttcagaaggtctaattttcaactgcattttctttatttctcttaaagaacaagttaaaagaaatagtttgtatctcttaagtactttatattgcctctgagtattttcaaagaaactcacttatcttgatgattgtgtttcttaacttgacaaagagcatcttcataatataaattccatttattatttctggtgtgtcttttctttatattttaaatttcagctacagtaagttacttataattcttcaatgacaccatgcatttcgtgaccatattccttaaagattgtttcacacactgtgtatttggcaaactcctcatcttttttcaagatccagtttagatctatggtattctctcccccatagtctaaaacagagtgaatgactcctttatttgttagttttatgtctaatacatatttctatttttgggttcatcactattaaaatatgtatatcttgtagtgaactgtgttcatggaggagaaggctattagtgagaaattgaacagccttgaaaagaagtagccttttcctaggtatataaggtagggaaataaattttaagtagagagaaaagtttctacagaggcacagaagcatgaaaattacggcatgcccaagcatctttaggctggagcatcaaattaggttgataaagtaatagatattaaagcttttaaggtaacagcatactattttaaagtgtactaaagaattagtgtttatcacctctccttaattttaatagctggacgaaattagggaatctatgaaaactgtttgtgctgcagtttgctcagaagaaaaatgggagtggtaatagggcctacctcacaggaattacacagtgagctataaatacatgttagctaatatgattatgattattatttttagtattatctatcttcactgacagactgaattctgtggcggcctttttaacccacccatcatcaaatgcctaaaatagagtcagagaacattacaggttgttacattataggtcattacattgatacttttggattaattattgcatacatgattattacagaaattataagaaattatgtaagggatcattgcatacattttaaggaaacgttaagtcatctaaaggaaaaacatcacatgaaaatatttgaaatttattaatatatttataatcatggcataaatttcttggaaaaaagactttgaagcaaggaaacaatttacgaagctattgtagaggtctgcatgacagatgatgacaaatcactttatggcaatagcaacaaatatgcagaagaagaaatatgctggaggaccaacagatatggtggttttctacatgttcaatgtatcatgaaagtcaacattctaggctctggaatatactgtctggcttcaaattctgttctcttactaattctgtagtaatttcttgtgtgaccttagcaaattactacacctcacctctctatgtttcagattccctgtctgtaaaatcagaatgatattaacaattatctcctaaggcaattttaaggattgaatgaaataatgtttgttaaatgcttattggaatgccatatatgtaatataatagacgctcacttaatattcactgctatcattattaccattatttgtggtgagataaagtgggtcaattttaggtggttctaatttggcctgtatatcattaattaagtaaagaatatagtgggcttgtcatacaataattcattcaactttgaatactttaagctccacatgtctaagcagatacgtttgtggatctaaaattaaagaaaaaagtatggatgaaaatatatttattagcagttgagacatgtccattgagcagatgagaaggttacggacagaactttgactcaaggaatacacgaaatgttttgataaagcactgtcagaaagaatggaggagaaaatgggacaagaagggtcacgtataccaaacgtaacagacgtcaaaaggaagaagtctgatgttcattctgaaaattagaagtatattgaaaagctttacatagaacaattcaaaaaggttgagcagaccccagattgcagtacatggaggaatgagtgcaagactaagagatagcgatagtagatacacattgtttgtggtctctaatgttattatgaataaagtaagcaaaattttggaagaacagagttatcattgcctttggggatggttggctgcacaaggtgaagtcccagaattctctcagatggatgagttcagctaggaatggggaggtctagatttatccatacccaactcgaggcagaaaagccaagacaaacaagtgtaggaaatcactgagcaccctggtctccatttcccactccacaccaccttcttcaccctcatcatgaatggaaatctggaaatcatattacctctcactgaaataatatttatttttcagcccacagggaacccagactggttggaggggacattccctgttctggacgtgttgaagtgaagcatggtgacacgtggggctccatctgtgattcrgacttctctctggaagctgccagcgttctatgcagggaattacagtgtggcacagttgtctctatcctggggggagctcactttggagagggaaatggacagatctgggctgaagaattccagtgtgagggacatgagtcccatctttcactctgcccagtagcacccygcccagaaggaacttgtagccacarcagggatgttggagtagtctgctcaagtaagacccagaaaacatctttaattggttctyatactgtgaaagggacagggttagggagtcatagctgtctttttctaaagccctgtctccttccaggatacacagaaattcgcttggtgaatggcaagaccccgtgtgagggcagagtggagctcaaaacgcttggtgcctggggatccctctgtaactctcactgggacatagaagatgcccatgttctttgccagcagcttaaatgtggagttgccctttctaccccaggaggagcacgttttggaaaaggaaatggtcagatctggaggcatatgtttcactgcactgggactgagcagcacatgggagattgtcctgtaactgctctaggtgcttcattatgtccttcagagcaagtggcctctgtaatctgctcaggtaagaggatgacgggcagccagtgatgggtcttaagagaaggtgtacatagggatgaagaacaaaagtaaaacgcagtgatccattttgaagggtcatgagaagaatgaatactaattcatgcttcagaatattaacctcatttgtcttttcagagggtgagcaaacctaattttgatggacttcttagttatccagtgcttactatgtgccaagcccatctcaaagcacctgatttatttcaaacttgttgaccatccaccttcccctctctctctaagctatgtttgtcctcaactcatccatataacatttcatctgactcccctaaccttttgtgtcttgtatgactgagtaccttggtgtttgcaggaaaccagtcccaaacactgtcctcgtgcaattcatcgtctttgggcccaacaaggcctaccattccagaagaaagtgctgtggcctgcataggtaagactctgtgacaaatctatgaaaatattaataacaagtggaatgctcattattaatagtttcatttctctttgcagagagtggtcaacttcgcctggtaaatggaggaggtcgctgtgctgggagagtagagatctatcatgagggctcctggggcaccatctgtgatgacagctgggacctgagtgatgcccacgtggtttgcagacagctgggctgtggagaggccattaatgccactggttctgctcattttggggaaggaacagggcccatctggctggatgagatgaaatgcaatggaaaagaatcccgcatttggcagtgccattcacacggctgggggcagcaaaattgcaggcacaaggaggatgcgggagttatctgctcaggtaaattatgcatatgacctttggtcataattacatagagaaaggactgaggaagggtagtgaggggtattaatcttaaagattttcctgaaaagttgatccaaaaggaactattgtgggagtcaggacaacagaagtctgggtttgatgtgctagtggtacttcatgagcaaggtagtgcaacattgtaaagagaaaagaccagaaatggtcttgtatatcatgaaaatgacaacaaagttaataatgaaggtttttaataaatatatttggggccagatattagatagcgatccaatagcaacacttgataattacagtattagtaaagaagtagatttaaagggacaagaagaaatatatatgttgcatcattctacagaaaaaaagataattactatgcccaagcaatttttcatggcagataaatgagacttacttgtcatagaaacaaaaagtagcatgaggttactgccctcatactgctttgtatacatggtgagttttagaaaacattctgaaatttaaaaatgtactatttcatatgtattatggggaacagaactatgattcagtaacttaaggaagtgaaaaactctgtatctcagaagtgatttattcctattttaatgacataaatctggtagaagacatgcactgcaaaactgtgaagtgtcagcaaatgaactgtcattttaagagatgtacacaaaacattgattttagtgcctgagtgtctaacaattttaactatcaaagacagttgcaaaaaaaggagaatatttttgggaaaaaatccaaactatgtaactgaaaaaagcctattagaatgattgagggtaatctaaagaggactctgagtccaaaaccaaagaccaaaaaactataatgtatttatagaataaataaaatattttaataatatctatgaaatcatccagaagttactaacgaattattagtaactgacatattgtactattgtacctatttttaaagccattcttacatcaaggtaaagggaaggagtctctgaatcttcagaaaagatgcaaaactactaattctatgtttygctgcagaattcatgtctctgagactgaccagtgaagccagcagagaggcctgtgcagggcgtctggaagttttttacaatggagcttggggcactgttggcaagagtagcatgtctgaaaccactgtgggtgtggtgtgcaggcagytgggctgtgcagacaaagggaaaatcaaccctgcatctttagacaaggccatgtccattcccatgtgggtggacaatgttcagtgtccaaaaggacctgacaygctgtggcagtgcccatcatctccatgggagaagagactggccagcccctcggaggagacctggatcacatgtgacagtgagtatccatcgacctatatgaaaattccattctgcagcccygctatcatcttctgataatggacactggattttattttcctattctcacactggcttaaattgttagattgaattaagcaagaatgggtaacttgtgggtaatatctattctacctggatagtgtaactggttttatttaatttggcctgtagatattcaggatcagctattattattctaaagaatatcatactccccatggtctgcttgaaagatttattcaattgctttctctgaggaggagagaatatgtggtttaatatttgactgttgaatggtctaccttaccttcccatttttctttcaaatattatcttgttacactaatataaggagaaaagcagtcagaaatcagaaagatcaattctgaagtatttccacattctacaggttttttttttttttttttttttgagacagagttttgctcttgttccccaggctggagtgcaatggcgtgatcttggctcactgcaacctctgccttcttggttcaagcaattctcctgctccagcctcctgagtagctgggattacaggcatgagccaccatgcccagctaattttgtatttttagttgagatggggtttccccatgttggccaggctggtcttgaacttctgacctcaggtgatccactccccttggcctcccaaattgctgggattacaggtgtgagccactgtgcctggcctctacatcttcttaaactgtgagatttgtgacaacctgccagtttcccaagaatcttgcctatttgaaagaatttgacatcacatatttataatgttaactttaatcatttaacatttactgggtcacattatgtatcttatgtgcaggatggaatatacctagttggctgtaatgacaagtcctcttataaaagataaattttgtaaaaatataaattttaggccaggcacggtggctcacgcctgtaatcggactttgggagtccgaggtgggyggatcacgaggtcaggagatcgagaccatcctggctaacatggtgaaaccccgtctctactaaaaatacaaaaaattagccgggtgtggtggtgggcgcctgtagtcccagctacttgggaggctgaggcaggagaatggtgtgaacctgggaggcggrgcttgcagtgagccgagattgtgccactgcactccagcctgggtgacagagcgagactctgtctcaaaaaaaaaaaaaaaatatatatatatatatatatatacatatatatatataaattttaatatgcacattcagtaaaattttaaatagtttttttttttttttaagtttcaaatctctcttttcacctgtgaactcctggaaacttttagaagtcttagaaataggctacatgtctctgatttttcagacaagataagacttcaggaaggacccacttcctgttctggacgtgtggagatctggcatggaggttcctgggggacagtgtgtgatgactcttgggacttggacgatgctcaggtggtgtgtcaacaacttggctgtggtccagctttgaaagcattcaaagaagcagagtttggtcaggggactggacccgatatggctcaatgaagtgaagtgcaaagggaatgagtcttccttgtgggattgtcctgccagacgctggggccatagtgagtgtgggcacaaggaagacgctgcagtgaattgcacaggtaagtgccagaagcctggattgagcttggaatctctggcagcaaagaggggttgggcagtgatgtgtgttgtgtaaaaaccggatttatcagcacagggatctggtggggattctcagagaatcataatgtctctactgaaagaatgatgaaaacaattgttatacaatggccttcaccaaggagacacatacaacctatattccctgtgcagagaaagaaagactagaggactctagttttaggtgggaaagagtcatatacttggttgagaggtactaaggggtcagacaaggaaatcagaaggcttgttctatatatcatgcaaagaattaaccctctctctttcttttctcctacagatatttcagtgcagaaaaccccacaaaaagccacaacaggtatatcatggagtttatgatgatgagaccaattatctgcatacatagaatttttcttgtttagaaattttaggtcagacgttctgaggatttgatatttacctcagggatcaagtatttgacctaagagagaatcagtaactagggaccttgatcttttcgataagacatgatcatatctcttgatatttacttttacttaggtcgctcatcccgtcagtcatcctttattgcagtcgggatccttggggttgttctgttggccattttcgtcgcattattcttcttgactaaaaagcgaagacagagacagcggcttgcaggtttgagccaaatttggtttatctaatatgtctacaggataagggggttcttgtaagacgaaaatattagactcaagtctaatggccagaaagatggactctaaaagaggtttgagcagtttctcaaaacagagggaagggccaggcacagtggctcacacttgtaatccctacactttgggaggctgaggcaggagaatcgcttgagtccaggagttcaagaccagcctgggccacacagggagctcccatttctacagatttttttcattttttaaatagagggaataagatttcagaggagaaaaggggtttaggttgcattgatgattccctgtgttctatctacatgcttaactggaacattacagaattgaaagttcagaatgaatatgttagatattgtttagnnnnnnnnnnnnnnnnnnnncatgggacaataaatcttggtggaacttcaagtctagtggaagagatatatatgtaaacaaatacactacaatgtagccattttacattaataggaaaaaggaacaaaagtggcacagagaagggagtaattaactgaaaggggagggggattactggaggcttcaaagaggcttggggacaaatttcgaacatagaggctcagagaattgggtgaggaacattctagagaagaatatgtacaagtctagagaagcctaaaggatgaagcatttcttgtttttttcctgaggggcggggggagaaaagttgagtgtgaggagagaggctgctaagtctgaagaagagaaaaggcacaaattatgaagttcttatgtttcacataagattcatagtcattaaagagtatcatgtaggggagtgaaatggtcaagatatcttttaggaagatcttttggcaacgggatctaggaggattgaaggaggaccacttgactgacaggaatggcattttgtaacagttgaggtgaaaaatgaaaagtactataacatatatagtgagaatggaggggagaggaaagacttttagagatacttaagaaaagctccagtgagttatggaagactgctggcttcccttgggtaaaaacagtgggttgtttatattaatacaatggcagtggggaagatttagccttgtgcctatttcatttgagtgtgcggaattgtaagggaagagcttggtagtagaatgggatagaaacaatagcagggataaagacgaggtatgtttgcagcgcttggaaaaaacacacttacagcaagggaaattttattatgatagctgatccctaacctagggatctctgttttcagtttcctcaagaggagagaacttagtccaccaaattcaataccgggagatgaattcttgcctgaatgcagatgatctggacctaatgaattcctcaggtctgtgggttcttggagggtctattgcccaggggttcagatcagtggctgcagttgaggcacagacattctactttgataaacagttwaaaaagtctaaaaatgtaataggaagcttagatgcatataatggacaagaatgactgaaaattattcttggagaatatcaaaattgcaatcatagggaggcctttagcttaagaggcctgtgattattcctgatagaggtatggaaagaaccatgcagaggaatattatgacttggacctcattttattaaaacagaaattaatcttacaaaagattgtcataagtgacagtttaacttttttctttaaattttgttgtgtatatttaaggtatacaacatgattttatgggatgtatatagatagtaaaaagcttactaaagcaaagcaaatgaacacacccatcatctgacatagttacccttttttgtgttgttcttgtggcaagagcagctaaaacctactcacttagcatgaatcctacatacagcacaatgttattacctataatcctcatgttgtacattagacctctagactggttcattctacgtatctgctactttgtatcctctgacctacatacgtctttcacagtttcttccattcccatttcctgtcattttttttctctagcttgatatttattatatttttccctaaaagtctaaaaccttaaactttcaatatctttattgcatgagaagccatacaaatccacagaactagccttatttctcatcacatcatgctgttttatccttgaacttctatttagcaccagtgcactaattctgcatctgggcaggatgactttactgggttggaagaaatatcccaaaacccattgtctttactccatgaagggtccctgaccttctgagaggggcctgcctcacttcttccrtccaaagaattatgcatctgctactgtgtcagggaacatatttaaggaacatgtactgttactgtgtcaggaaacatatttaagaaataggaaagactttctctgccccttaaatcacacatgcttttcttcctagttatgggtggtgtttttagttgctcaaagagcctcacagttacgtgagaagaggtctggtttatttcccagtaattattttcttcctttcagaaaattcccatgagtcagctgatttcagtgctgctgaactaatttctgtgtctaaatttmttcctatttctggaatggaaaaggaggccattctgagccacactgaaaaggaaaatgggaatttataacccagtgaggtgagtgatgagaatttattagtcattgttcaaaacagctgcattccttttgaggactgagagctcttctggcattagaaagaaagaatgtatataaacatattttatttgcttatgtgcatatgtttgtatatgtatatatctatattgagaatatataaaagcttataaatataactgattcatctcttaattatacacacaaatagtaataacacatccatggagctaaggagaaactgagtaaacaaatacaaattaatcttttgaagacattacaggtatcatttcaggaaaaagataagacatattgtacatctacatcgtataatacatgctatggtaaagactgtacaaggcactacagaaagtttgcctaagaaactttggggttgttgtaagatgatatgatatttaaggtaaactttaaaaataactgaaaaatagacagttccaaagaaaggacacagtatgtgcaaactagaggcagaaaaaagaaccatgcctttagggaactataagaagttttttattcaaaaacatatattgaacgtatttatggtaacaagtggtaccgtgagcactgaagatagagataaaatctactattggcaaagacatgattgtttaataaaagatatcatagtctataggtggtaatatgaagaggccatgtggagagaagagaggtggttagaatctaagctgaaaaggctgcatagagccctgtaatgaatggtcttacctgctatactttatgttctctttcactgggggtctgttgaagaggtgatgatgagctttgaaagtttcagatgagacaagatgattagaattgcattttacaacttgctttcatgagaaaaacataaaaaaaaattcaaatgtgaacaagacgtatagttaagctatacatcaagagaaaaagattgtgaaatgagttactagatacattttctgtttttaaaataataatttggggaagactacatctagaaatgaaatgtagaaaaagtattttttatagaaatattatatattcctataattcatctacatattatatatctacattgtataatacatgctatggtaaagactgtacaagacactacagaatatttgtatatacgaaatatagattaagacaaaggataagagttggaactcttaaagtacatgaaatataaattgtgaatatctataaaatgcagagctaattttacatacyatatatatacacacatagatacatagagttcttakaaactgyacagagcacaaaagggttaatatatgtgaatgtaaattgtatgtatgtgtatgtgtaacatctaatagataattgggcaaagctatgaaaagacaattgacacaaaatgaatttcaaatgacagacatttttaaatgtctggaggattgaaattataattaacaatgagctatcactttatacaaatcagactaacaaaaatttgaaataccatcaatatttattactggcgggaatacagagaaaaaggccatttcaaacactgcttttggaagtgtgagatatggtaggtagcctttggagaaagcaatctggcagtttctattaaaaattattttcaaagattcacagaccctttgacccaataattctatccctgagaatttcttcttaccaataaagtcactagtatgtaatgacaaatatacaaagattcctttctgccatgttgttgaaagtggcaaaaactagaaacaaagtgaatgccaattgatggagtaatgactggaaaaatgacggtttaggcaactaaaaaagaaaaaatcattataaaatataataatattccatttatgtattggctataattaaatacaatgcttacrtctataaaattatgcattcatatgtgcataaagaagctaaaaattctagtgttgtaaactgagaaccatgaataatatttgatttataatctgaagcatatgaatgttttctgatgtgataaatgataattgaactacttttccctgaaagagtaatcactgctgaataactgcttcagaatcacatgagggtgcttttaaaaaatgacgattctttttttgtttttaatctttaagttctgggatacatgtgttgaatgtgcaggtttgttacataggtatacacgtgtcatggtggtttgttgtgcctatcaacccgccatctaggttttaagccctgcatgcattaggagcttaaatttgtcttaatgctctccttccccttgcccccaccccgcagcaggccccatgtgtgatgttcccctccctgtgtccatgtgttctcattgttcaactccaacttatgagtgagaacatgcggtgtttggttttccgttcctgtgttagtttgctgagaatgatggtttccagcttcatccatatccctgcaaaggacatgaactcattcttttttatggctctatagtattccatggtgtgtatgtgccacattttctttatccagtctatcattgatgggcatttaagttggttccatgtctttgctattgtgaatagtgctgcaataaacatgtgtgcctgtgtctttatagtagaatgatttataatcctttgggtgtatacccagtaatgggattggtgggtcaaatggtatttctggttctagatccttgaggaattgctacattgtcttccacaatggttgaactaatttacactcccaccaacactgtaaaagcatttctatttctccacatcctctccagcatccgttgtttcctgactttttaatgatcaccattctaactggtgtgagatggtatctcattgtggttttgatttgcatttctcagatgaccaatgatgatgagcctttcttcacatgtttattggccacataaatgtcttcttttgagaagtgtctgttcatatcctttgcccactttttgatgggttgtttgtgtttctcttgtagatttgttaaagttccttgtagattctggttattagctctttgtcagatgcctagattgcaaaaattttctcccattctgtaggttgcctgttcaccctgatgatagtttcttttgctgtgtagaagctatttagtttaattagatcccatttgtcaatttttggcttttgttgccattgcttttggtgttttagttatgaagtctttgcccatgcctatgtactgaatggtactgcctaggttttcttctagggtttttatggttttaggtcttatgtttaagtctttaatccatcttgagttaatttttgtatacggtgtaaggaagtggtccagtttctgttttctgcatatggttagccaattttcccagcgccatttattgaatagggaatcctttcctcattgcttgtttttggcaggtttgttgaagatcagatggttgtagaggtgtggtgttacttctgaggcctctgtcctgtgccattggtctatatatctgttttggtaccagtaccatgctgttttgataactgtagacttgcagtaagtttgaagtcagatagcgtgatgcttccagctctgttctttttgcttaggattgtcttggctatacaggctctatttttgttccatatcaaatttaaagtagatttttccaattctgtaaagaaagtcgatggtagcttgatgagaatagcattgaatctataaataactttgggcagtatggccattttcacaatattgattcttcctatctatgagcatggaatgtttttccatttgtttgtgtcctcttttctttccttgagcactggttggtagttctcctttaagaggtccttcacatcccttgtaagttgtattcctaggtattttattctctttgtaggaattgtgaataggagttcactaatgatttggctctctgcttgtctattattggtgtataggaatgcttgtgatttttgcacattgattttgtatcctgagactttgctgaagttgcttatctgcttaaggagtttttcggctgagacaatggggttttctaaatatacaattatgtcatctgcaacaagagataatttgagttcctattcctgtttgaataccctttatttctttctcatgcctgattgccctggccagaacttccaatactctgttgaataggagtggtgagagaagacatccttgtcttgtgctggttttcaaaaggaatgcttctaggttttgcccattcaatattatattggctatgggtttgtcataattagctcttattattttgagatacgtttcatcaatatctagtttattgagagtttttagcatgaagcactgttgaattttatcgaaggcgttttctgcatctgttgagacaatcatttggtttttgtgatttgttctgtttatatgatggattacgtttattgatttacatatgttgaaccagccttacatccagggatgatgccaacttgattgtggtggataagctttttaatgtactgctggatttggtttgccagtattttattgaggattttcgcatcaatgttcatcagggatattggcctggaattttcttttctttgttgtgtctctgccaggttttggtgtcaggatgatgctgacctcataaaatgagttagggaggagtctctctttttctattgtttgggatagtttcagaaggaatggtatttgctcttctttgtacctctggtagaatttggctgtgaattcatctggtcatggttttttttttttttttttttttggttggtaggctattacttactgcctcaatttcataacttgttattggtctagtcagaaattcgacttcttcctcgtttagtcttgggaggatgtatgtgtccaggaatttatccatttcttttagattttctagtttatttgtgtagaggtgtttatagcattctctgatggtagtttgcatttctgtgggatcagcggtgatatcccctctatcactttttattatatctatttgattcttctctcttttcttctttattagtctggctagtggtctgtcgattctgtttatcttttcaaaaaaccagctcctgggttgattgatttttgaagggtttttcatgtctccatctcctttggttttgctctgatcttagttatttcttgtcttctgctagcttttgaatttgtttgctcttacttctctagttcttttaattgtgatgttagggtgttgattctaaatatttcccactttctgatgtgggcatttagtgctatacatttccytcttaacactgctttagctgtgtcccagagatttttgtatgttgtgtctttattctcattggtttcaaagaacttcattatttctgccataattttgttacttattcagtagtcattctggagcaggttgttcagtttccacgtagttgtgaggtttcgagtgagtttcttaatcttgagttctaatttgattgcactgtggtttgagagactgttatgatttctgttcttttgcatttgctgaggagtgttttatttccaattatgaggtccattttagaataagtgctatgtggtgctgagaagaatgtatattctgttgatttggagtggagagttctgtagatgtctattaggtccatttggtccagagctgtgttcaggtcctgaatatccttgttaattttctgtctcattgatctgtctaatattgacaatggggttttaaagtctcccactactattgtgtgggagtctaagtctatttgtaggtctctaagaacttgctttatgaatctgggtgctcctgtattgggtgcatatgtatttagtatagttagctcttcttgttgcattgattcctttaccattatgtaatgcccttctgtgtctttttttaatctttattggcttaaggtctattttatcatagactagaattgcaacccctgttttcttttttttgttttccatttgcttgttatgttttcctccatccttttattttgagcctgtgtgtgtcttgaacatgaggtgggtctcctgaatacagcacgccgatggatcttgactctttatccaatttgccagtctgtgtcttttaattgggggcatttcacccatttacatttaaggttaatattgttgtgtgtgaatttgatcctgtcatcatgatgctaactggttattttgcacattagttgatgtggtttcttcatagtatcattggtctttatattttggtgtgtttttgcagtggctggtactagtttttcttttccatatttagtgcttccttcaggagctcttgtaaggcaggcctgatggtgacaaaatccctcagcatttgcttttctgtaaaggatcttatttatccttcactcatgaagcttagcttggctgaatatgaaattctgggttgaaaattgtttcctttatgaatattaaatattggcccccactctcttctggcttgtatggtgtctggagaaagttctgctgttagtcagatgggctgccctttgtaggtaacctgacgtttctctctggtgcccttaacattttttcattcatttcagccttggagaaacggatgattatgtgtcttcgggttgctcttcttggggagtatcttagtggtgttccctgtatttcctgaatttgaatgttggcttgtcttgctaggttgtggaagttctcctggataatatcctgaagagtgttttccaacttggttccattctccccatcactttcaggtacaccaatcaatcataggtttgttcttttcacatagtcccatatttcttggaggctttgtttgttccttttcattcttttttctccaatcttgtcttcattccttttttcagtaagttgatcttcaattactgttatcctttcttccacttgatcgatttggctattgatacttgtgtatacttcacgaagttctcatgctgtgtttttcagctccatcaggtcatttgtgttcttctctaaactggttattctagttagcagttcctgtaacctttaatcaggttcttagcctccttgcattgggttagaacatgctcctttagctcagacaagtttgttagtatccaccttctgaagcccacttctgtcaattcatcaacctcattatctgtccagttttgtgcccttgctggasaggagttgtgatcaattaaaggagaagagccattctggtttttggaattttcagcatttatgcactggtttttcctcatcttcatcgatttatctacctttgatatttggrgctgatgacctttgttggggtttttgtgtaggggtcctttttgttgatgttaatattattgatttctgtttgttagtttttcttataacagtcaggcccctcttctgtaattctgctgcagtttgatggaggtccactccagaccctatttgcctgggtattaccagcgaaggctgcagaacagcaaagattgctgccttctcattcctctggaagtttcgtcccagaggggtactggcctgatgccagccagagctctcttgcatgaggtgtctgttgacccctgcttggaggtctctcctagtcactaggcatgggggtcagggacccacttgaggaggcagtctgtcccttagcagagctcgagcgctgtgctgggagaattctccttgtcaggatctgctgctctcttcagagccagaagacaggaatgtttaagtgcgctgaagctgcacccacagccgccccattcccccaggtgctctgtcccagggagatgggagttttatctataagcccctgaggggggctgctgcctttctttcagagatgccctgcccagagaggaggaatctagagaggcaatctggccaacggcctccttggcctccttagcgctgtcacgggaaaaccgtctactcaagtctcagtgatggcagatgtccctcccccgaccaagcttgattgtccgagttcgacttcagactgcagtgctagcatcgagaatttcaagtcagtagttygtgacttgctgcgctttgtgggagtgggacccgctgagtgagaccacttggctcccttgcttcagccccctttccaggggagtgaaaggttctgtctccctggggttctaggcgccactcagttggaaatgcagaaatgactcagttggaaatgcagagacttctgcgttggtctcactgggagctgcagactggagctgttcctattcagccatcttgccagctcctataaatggcatttcttaatcttactgtatttccatggaataaaagtaattcttatgcacactgaagttaaaaaaaaatagcatttaaaatttctgctcaggaaagtagtataatttttaacataagtgartttctctttgtgttataatgtaatgaattcttatacgcatatggagaggaaaatgacatttttctatttatggttttagttcagcctttaagataccttgatgaagacctggactattgaatggagcagaaattcacctctctcactgactattacagttgcatttttatggagttcttcttctcctaggattcctaagactgctgctgaatttataaaaattaagtttgtgaatgtgactacttagtggtgtatatgagactttcaagggaattaaataaataaataagaatgttattgatttgagtttgctttaattacttgtccttaattctattaatttctaaaygggcttcctaattttttgtagagtttcctagatgtattataatgtgttttatttgacagtgtttcaatttgcatatacagtactgtatattttttcttatttggtttgaataattttcctattaccaaataaaaataaatttwtttttactttagtttttctaagacaggaaaagttaatgatattgaagggtctgtaaataatatatggctaactttataaggcatgactcacaacgattctttaactgctttttgttactgtaattctgttcactagaataaaatgcagagccacacctggtgagggcacaaagactcagtggtttcgtttctcattcctcaggacattataagtaaagcttaaatacatacataaactatgtcttttctatgtaaatataatggttataaagtaagtttgtatattactaaaagttacttatgatacatattcacataaagaaaagatagcatttaaagtagtacaacactaaacttagggcctactaacttgctaaatatcctagttttctatgcaattgatttttttttaattttagtgggtccactgtaagtgtatatatatatggggtatatgagatattttgataaaggcacacaatgtgtaatcatcacatcagggtaaattaggtattcatcacctcaagcatttatcctttctttgtgttatttattttttaaatgacaaaattttacatatttatcatgttcaatatgatattttgaaatatgtatacattgtggaatggctagatcaagctaattgacatatgcattacctaacatacttacttttttctgtgagaacacttaaaacctcctctgagtgattttcgagaatacaataccttgttattaactgtagtcaccatgttgtacaatagatctcttgaactttctcctcctacccaatgaaaattttgtatcctttgaccaacatcctctagacaccttcctccagctactggtaaccaccactctactctctgtttctataagttcaactttttcacattccacttataaatgaggtaatatgacatttgtctttctgtgcctggcttatttcacttaacataatgtcctctaggatcatttgttttgttgcaaaggacaggatttccctctttttaaaggctaaatagtattccattgtgtatatgtaccacattttcttcattcatccatcagcagacacttaggttgattccatatgtgggttattgtgactagtgctacaataaacatgagcatgcagatgtctcttcaacatgctgatttcctttactttggaaatatagacagaagtggaattgctgaatcatatggtaattctatttttaatttttaaggctgtcctaatttgcattctcaccactagtttacaagggatcccttttccccacaacctcatcaatcctcatctttcatgtttttgattatagctatctaataggtataaggtgaggtgatactgtggttttaatttgccttttcctgatgattagtgatgttaaggattttttttcatatacctgtttgacagttgtatgttttcctttgacaaatatctgttgttctgcccatttttaatgaggttgttttctcaatattgggttgtttgagttctctctatattttggatattaacccattatcagtatgatgtaaactcattcgtttacgttcatctttgttgtctgtgttttatttccaaagaatcattgtcatgaaatttcccgtgccccaccctttattattattattgttgtactttaagttctgggatacacgtgcagaacatgcagttttgttgcataggtatacatgtgccatggtagtttgctgcacctatcaacccatcatccaggttttaagccctgcaggttttaaggtatttgtcctaatgctctccctctccttgcacccaactccccgacaggccccagtgtgtgatgttgctctccctgtgtccatgtgttctcattgttcaactcccacttataagtgagaacatgtggtgtttggttttctgttcctgtgttagtttgctaataatgatggtttccagcttcatccatgtccctgccaagaacataaactcattcttttttatggctgcatagtattccatggtgtacatgtgccacattttctttatccagtccatcactgatggacatttgggttggttccaagtctttgctattgtgaatagtgctgcaataaatatacgtgtgcatgtgtgtttatagtggaatgatttataatcatttgggtatatacccagtaatgggattactgggtcaaatggtatttctagttctagatccttgaggaatcgccacactgtcttccacaatggttgaactaatttacacttatacaatgagtttggaagtattcactcctcctctattttttggaatagtttgagtaagattggtattagttctcttctttaaatgcttggcagaatcagcattgaacccattggatcccagaatttttattttttaatgggagattttttactatggcttcaatcttattattgttattgatctgttcaggttttggatttctttattgttcaatcttcgtaggttgtatgtgtctaggagtttgtccatgtcttctagattttccaatttattagcttatagttagtcatagttgccactaatgatccttcgaatttctgcagtaataattttcatgtcttctttttcatctctgactttatttattcggattctccctctttttcttagtctagcttactaaactaaaggtttgttaattttgtttaattttcaaaaaaccaactgtttgatttgttgatcttttgtattgttttattcattttaattttatttatttctgctctgatttttattattttgtttcatcttctaatttcggctttgatttgctcttgtttttgctccagttttttaagatgcatgattaggttgcttatttgaagtctttctacctttttgatggatgtgtttattgatatatattttcttcttaatattgcttttgatgtatccaataagttttggtatgttttgtttccattttcatttgttcacaaaatttttaaattttatttttaatttcttcattgaccaatgttcattcaagagcatattttttaatatctgtgtatttatagtttccaatgttacttttgttactgatttctagtttttttctactgtggtcagaaaataaaattgatatgatctcaatttctttgaacttcttgaggcttgttttgtcctctaacatgtggtctatcttgaagaatattctaagtgctgagaagaatgtgtattctgaagctcctgaatgaaatgttctataaatgtctcttaagtctatttagtctatagtgcagattaactctgatgtttctttgttgattttctgttgtgatgatctatccagtgctgaaagtggaatattgaagttcccaacttcagttgtattgggtttatttctctttaacttaataacatttaataacatttgctttatgtatttggggactccagtactgggtgcatatatatttacaattgttatatcctcttgctaagtcgactcctttattattatataatgatcttccttgtttctttttatagatttgtcctgaaatctattttgtctgatataagagtgactattcccttttcttttttggtttaaatttgcatggaatatcttttctatcctttcatttttagtctatgtgtgtttatataggcaaagtgaatttcttgtaggaagcatgcagttgggtctttttgttattattcattcagccactctatgtgttctaattggagaatttagtccattaaccgtcaatgtattattgacaggaaaggacttactactgccattttgttatttgttttctagttgtttcattggtcctgtcttcatttcttactgtcttcctttgtgtacaagtgattttctctggtagtatgttttagttttttgctttctagtttttatgtatctattttagtttttcttctcatggttaccatgaggcttgtaaataacatcttataacagatttttttaagctgatgaaaacttaattatactcataatagaaacggaaacaagcaaagagaaaactaaaaaatctacactttaactttattctccccttatcattttttgagttgttgtctatatatctttttatattgcctgtatttaacaaatcattgtagttgttattattcttgataggcttgtcttttagtcttcatactaaatatatgcatggtttacacactgcaattacagtgtcagaggtgttctatatttgtttgtgtacttacttttactggtgagttttatactttcaggtgatttcttgttgtttgttagcaccttatctttcagactgaaaaattcccttcagcaaatttttgcaaagcagggctgatgttaatgaaatcccttaggtttttgtttgtcttggaaagtctttatttctccttcatgtttgaaggataattttgctggatataacattctaagttgaagaggtttttttcttcactactttgaatatattatccccatcccacttggcctgtaaggtttccactaaaaagtcaactgccagatgtatcagagttcctttacatgttatttgcttcttttctcttgctgcttttaggatactttgtccttgaactttgagagtttgattattttgtgtcttgaggtagtctcatttgaattgaatctccttggtcttctttgagctttatgtacctgggtattcaaatcttcctctaggtttgaaaagttgctatttctttgaataaaacttcttcactgatctcttattttacatcctttttaaggccaataactcttagatttgcccttttgagggtattttctagaacttgtaggtgttttcactccttttaactctttttttctccttggactctgtctttttaatatagctattttcaagctcactaattcttttttttctttacgtcttctaaaaaaatgggatacatgggcagaatgtgcaggttggttacataggtatatgtgtgccatggtggtttgctgtaactattgacccatcctctaagttccctcccctgactccccacctcccaataggctctgatgtgtgttgttcccctccctgtgtccatgtgttctcaatgttcaactgcaacttatgagtgagaacatgtattgtttggtttactgttcctgtgttagtttgctgaggatgatggcttccagcttcatccatgtccctgcaaaggacatgaactcattcctttttatggcttcatggtattcaatggggtaaatgtgccacattttctttatccagtgtatcattgatgagcatttgggttggctccaagtctttgctattgcaaatagtgctgcaataaacatacctgtgcatgtgtccttatagtagaatgatttatattcgtttgggtatatatccagtaatgggattgccgggtcaaatggtatttctggttctagatccttgaagaatcaccatactgtcttccacaatggttgaactaatttacattcccaccaacagtgtaaaagtgtccctcaccagcatctattatttcctgactttttaataattgccattctgactggcatgagatggtatcttattgtggttttgatttgcatttttctgatgaacagtgatgttgagctttttttatgtttgttggcagtgtaaatgtcttcttttgtaagctcattaattctttattctgcttgatcaatactgctgagagacactgttgtattttccagcttgtcaattgaatttttctgctccagaatatctgctttgttttttaaattatttaatatctttgttaaatttctctgatagaattctgtacttcttttctgtgttatcttgaagtttgttgagcttctgaaagacagctatttttaattccatgtctgagaggttgcatgtctccatcactctagaattaatcactggtgccttatttaatctacttaatgaaatcacattttcctcaatgttcctgatgcttgcaaacattcactaatgtctagacattgcagagtcgattgtttatttcaatcttcacaatctgggcttgtttttattcatcctttttgaaagggcttttaaataattcaaattagaaattaagacagagaaattcacccaaagccatacagttacatggaaattgaat

SEQ ID NO: 5634 - DNA, 87467 bp, Homo sapiens
gcccttctctccttccattcattcatttgacatttgccaagtacttatccaagggtgcctggtacctagtgctgggcatacagaggaaacaagacagagcctctgcccccagcaaacttccagcccagtggagagtcgatggtaacaatcttccacatttgattcaaaatgctgaaacacagccaggctgtttgaaggaaattggttcccagaagaatggccttggctacaacagatggaaactggtagcgtgtcagttggcagagtcctgtgtgacatcttttgataaattaatctcatgtgaaagaagtcacccacaaaattctttagccagttgtcttgcccatacctttggttctgagggagaccattatgtaatcacttgactaatcacctggtattgacagtgacacaacttgacgccacaatttctacaaggcttgtgattgagaaaacttcattctttgtcaattatcaacaaacttctcagacattatactcatgcgagctgccttcagggcattttctttttccttttcacatctgtgcttaatgagtagcatttttgcacattgtttttctaagctttatatcctcatctgtaagaggagaggatgatagtgcttaccttaaaagtttgttgatggttagatgaaaaaaattcatatgaaacacttagtactggatctggtttagagtgtttaataaaatgtagctatttatttctatctaggtgctgaaatctttgtgacttcgtgactacttaaatgtgcatgcatgtaagcagtgccttagttttcttttttttttttttttttttttttttttaggcagagtctcgctctgtcacccaggctggagtgcagcggggccatctcggatcactgcaagctccgcctcccgggttcacgccattctcctgcctcagcctcctgagtagctgggactacaggcgcctgccaccatgcctggctaatttttttttttttttttttgtatttttttagtagagacggggtttcaccatgttagccaggatggtctcgatctcctgaccttgtgatccgcccgcctcggtctcccaaagtgctgggattacaggcatgaaccaccacgcccggccagcagtgccttagtttttaatgtttaaaatagtaatgattttaaatgtccattttatctcagtaaaatggtcatacttaatgaaagaatatatcaaacttatctagaaaatagttcaatataaatttacaataacatgtatatggcatctttacaattcgattgaatgtattcttaatttattttaactaattaattcactaattagacaggtaggcataaatattgactgctcatatcaaaatagtctattgttggcataaattgttatttactagataatgtttgtggttatttttaagcatttggctcaactaacttttgtgattagctgcatatgagatgtttaaagtatgttaatgcaaaaaggatagaaaataatttaaatatggcaaaacttctatttttttttaaattcagcctttcaacaacaacaaaaaactctttaatgccagcaacatgaaataacatacaaaattaaaatttttacaagaagctgctactttgcttggaaagatgaaatgttctccaagacagttttggttacatgttccagctacacagtagttagttcccattttactggataagttaaacacctttgccatgcctgttgggagttacatcactctaatgagaaaagaatattcctgttaagaagcaaaaagcatagattaaggcttttaaaaagtgctgattaaaaaataaagtcacttaaaatgtaaacaaaatgcctattaagcgmaaactggttagctttcatggcataatttaaagcccttatccagtattttctccctggttgcaggcaccctgtcaattcttgacaaacttttcagacattctacttacgagggctgcccgcagggaagtttatttttaacttctcacacctgtggttaatgagtaacatttttgtaaacgtggccattttcaaggaagaagggaagcattttatgccaaaaaaaaaaaaaaattcaaaataagaaaaaaaaaaaactaccctaatttatctccctctaatctacctatagaagaagatgaaatgaaagttcgagctctccagagtcaatggcctcctctctagcagaactggaagaaattaataacaggataaaagccaaaggtttcaggaaaaacagcccatcaattaaatgttacacctaaatgtaacatttgaaatgtaacatctaaatgtgacatatttaaatgtaacctttaacatttaacatttcaatgttaaatgttaaatttttgagacaggatcttgctctgtcatctaggctgggtctggagtgcagtggtgtgatcacagctccctgcagctttgatctctcgatcttctgggctccagtcatcccccaggactcatgtcagactcctgartagctgggacgagaggtgcctgtcaccatatctggttattattatcattattattaagagtgtctcactatattgcccaggctggacttgaactcctgggcttaagtgacccttccacactggcctcccaaagtgctgggattacaggaatgaatcaccacacctagcctgtttttatttcagtccttctaaatgactggatctgatcaattattttttgtgcttaatcaaatgtctccattgctaatcttcaaaacaaatgaaatcaatttaattcagatttccataattgctcatgctcctccttaaccttctggaataataaaatttcccaataccattgcccccygccacccacacccccctagttcccraaaatatatgtgcttctttttgttacaaaaagtttaaattgcctgaggctctgggaaaattctatcactatggcaattccaagaagaaacaaggcacagtcctaaatgaagatttgttctgtctctaccacatatatgccttcacacaaatagtaggtttcagaaggagttactggtgtagaagaaatccactactatattcaaggcaaacttcctctcagaaaaatgaagaaatgaggacgccttgtgtatgttgctgctacctgagagcaagtctttgaaaccaaaatcaggagatggttaagagtaaaaaagaacaaatactaatttttaaaatcaacttttgaaaaaaacaactttattgaagcataatttacataccgtaaaattcactcattttgtgtataatccccagaattttgaagcttttaccaaattgtacagtcatcactgcaatgtagttttagaacacagatttccatcacctcaataagattccctgtgcccttttacagttaattcctgttcccagcccataaacttgggtacccatgaatctactttctgtctctattgatttccctttttttgtcacatttctctctctgaatacagttttagaaagaaagaaggaaagaaggaaaaagaaagaaagaaagaaagaaagaaagaaagaaagaaagaaagaaagaaagaaagaaaaagaaagaaagaaagaaatccaagagtatttcctaccaataggagaatacaatttactgaggaagaacccacctggataaaatagaattcttaaggaagtccaacgatcctggacaccacacacgttggttgaattagagtcagagtggtctttaagatttaattatctctccaattagagataacagacttagagttacaagggaccttgataattaaagaatactgtagtaagccctgttatcttaactaagaaacgcctctgtttctaaagtttaaaaaaaaaggcaaaaaaaaaaaaacctttcaagtaaaagagtaaactcccaagcattcctataaaaatcagtcagatgttattttttttcttatgagacagagatatcctgtttccttaaataaattagatatctatgggattgaaatataaaagtttcttccaaaatgtaaggtgggctttccacttcaagctccactatgcataygattctagtgtattttcagtgcagtaaatatatcaaactatcatggttttggttgaccaaatacttttctaatcacttatttccttcccccagaatcaatgaattttaagaaagctttagctacaggtttatcttgcttacatccggatttccaggtatccttccctctggaagaaacactcggcttcccagaaatttaccaagcattttacaaggagctcttttatatttgaaaagagaaaactgttttgtcaagtgatgagaaattccaaaaaaatcctctaayccagacaggattctaaatttggggaaatccatggcactctttcaatttrgagtgtgggtcacaaagattcctcaagaggtttttttacactatttgtaggaaactgatatttgctgggtgttttgctttgttttggtttggttttaaatccttgcatgaataaaaacaaatgctaattttgtgtctttaatgtgtcaggcattttatagaacacagagttctaattactcctgtggcaattactgaaggtgaaacttttggagaaaataggtaccttgccgaaataaatatattttattagtagcttcttgtgttttaaagcaaatggaacctctgaactcctaacacaaggagaaggcaaagcattcagttcgggtctctctggatctactgtggaagtggtggactcctccttctgaagatctttaaaagcaattgtgcctgtgtttatctgacaaaaaggactgatgtgatgtgttgctaaatgagagacttttcagattccctttccactctgagtttagagttcaaggcgggggaatcttaaaggagaactttccacactcttggagtaaataacaattgaaatataaaaaatctggcggcgggggatggagggggcattctgtaatggaacttgtcagcaaaaagaaaatggcaaataaatgtgagaaaggggccgaaggagggcaagacagtacatagggtgccccccacccacccggcttttaatgattcaagcaaaaaaatctctgctttgtgtgtaactggcacggtgaacgtgggaaaggacacgaagacctttctctccccacagctggtccaactttccaattttcaggttgttcacagtgatttcactttcagtggaaacgggcgtcccatccccaggaaaggaaggctttcctgcatgtgtaaaaaagtaaactgttactttgtccttgcaaaagaaaacttcattctctgaacttccccgggatctgcaaagcgccccgcggaactcccggtacttagtagaagctcattaaaggtctctgttcccctttgctccccgttcgcccgctggccctttctcagagccagacaggcacagcgctgagaagggaagaagtccgaacagggagctgtgaagacaaaataagggagtcccgagtcagtaccctttagtccaaagaaagggagcgggatggggggaaaggcagccccgccctgggactgaaaagtctggattcttaacagctgcaaggtcgtggatattttatgggttttcttcctcacaaaatacactcctataagcagagattccccccctccaccccgaagagaggtgacgcaatgtcctcaaacactaccaccacccccaataaaaaagaaaagggaagggggagcgtcttgcaaccccttcgcttcacacaagtccagccactccctttcctcccagccgcttcccatcccttcccccatcccctaaaaagtttgatgaccgcaaaggaaaccgaaaaaaagttgtcttgccccagtcctggcgggccatcagcatctcttttgttcgctgcgaacccacagtcccccgtgacgtcacccggagcccgggccaatcggcgcgcggtcggctgcggcggccggcgggcgggcgggtggggtggggcggggcggggacagcccggcgggtctctcctcccccgcgccccgggcctccagaggggcgggaggggaccgtcccatataagccccggctcccggcgctcggacgcccgcgccggctgtgctgcacagggggaggagagggaaccccaggcgcgagcgggaagaggggacctgcagccacaacttctctggtcctctgcatcccttctgtccctccacccgtccccttccccaccctctggcccccaccttcttggaggcgacaacccccgggaggcattagaagggatttttcccgcaggttgcgaagggaagcaaacttggtggcaacttgcctcccggtgcgggcgtctctcccccaccgtctcaacatgcttaggggtccggggcccgggctgctgctgctggccgtccwgtgcctggggacagcggtgccctccacgggagcctcgaagagcaagaggcaggctcagcaaatggttcagccccagtccccggtggctgtcagtcaaagcaagcgtgagtactgaccgcgggctgaaacaggctgcctcagggatgggaccctaaagccgaccaaagttggggctgaagttttgtgcgcgcgygtgtgtgcgagtgtgtgcgcgctttactgagagaaaccagctgtgcacacaaaaggaccgagttttgagcacgctggttctgagggcctgggatgataagaccrtgcattggaggacgaggactctgcgactttcccgtgttctaataaattctgcacgttcagattgtccttctaggaattaaccaaaacttgcctttaaagagaaaaatgatgcatgtctataaattttccgtctgggattagtgtggtccttactgctacttatttccttctgttaaataattggtcaaatattttcaacatgggggtggaaagggggtattgaaatagctgtcttgtttctaactaacttggaagagatgtaattggttcagacctctttagggccgctcaggatacttcaccaagaacagaggttggaattctttccgtttttcaaagacacaccctccttttgctttgagaaagctgcttaaagttgtcctttttgactattactccaaaagaatatttaagttccttgcatgttttaaaaatgtgacttcaattgtctgccttccaaaatgtttccaacttttttatgtagacccctggccagatggaaatgacatcattgtatataacttttagcaaagttaaaaggaaaaaaatatgtacstcaatattcacatgaagaaaattccataattttgggaaaaggagaaatgcaaatgtaacgttttccttcaattatttkyagccggttgttatgacaatggaaaacactatcagataaatcaacagtgggagcggacctacctaggcaatgcgttggtttgtacttgttatggaggaagccgaggttttaactgcgagagtaaacctgaaggtaagtgacaacaagccccatagttagtatcttttaatacatgaagtggtaattgttaaactttgcattagtaagtaaaaatacatacaccatttttctaatagaattacctgtcatttcctcttaagtttaaaaackgcttatatttgcttttcacatgcttttacctttaaaacaaagaaacgaatctttcccaaattagttcctagagtcttctttttgctttactctcccaaagtttttgatgagaaaaatgaaagattttgtgtgtcctccgacaaaaaaaattgcttataaaattttaatttattagaaagcagtctcaaatcttaaactgttagtttatgagccagaaaacactttggggacttacatcgtaaaatgatttgtcagcggcagttaacacaaaaccattagccacttcaaagttctcattcctttaggaccaatgatatttttctcataaattatagcaactctgtcagagaagcactgatcaggggaaaatggaaatcataggattaacaactgtcaaggccttgtgggaggtggggatcttcgaattgtttgtttgtttttgttttgttttgtttttgagacagagtcttgctctgtcaccaggctggagtgcagtagcrctatctcagctcactgcaacctctgcctccagggttcaagcaattctcctgcctcagcctcctgagtagctgggactacaggcacatgccaccacacccagctaattttcatatttttagtagagacggggtttcaccgtattggtcagggtggtctcgaattcctgacctcaggtgatccacccgcctcagcctcccaaagtgctgggattacaggcgtgagccactgtgcccggccaatcgtttgctttttatgtgaaccttgctttgactttctgagtcagagattggaatgtgaaacccttcacaaatctagctctgtcataagttagtactttatatggccttttcctaagagcctgagatttttctacaatatgaataatttacagaaaatttgacaatatgtcaaggtcaaaaaccatggccttattagagcttaggataaaaatctgtatctctcacttcattttattctttgaggtgtaccatgttacttgtggaatagagaagtgggttttcctttagaggggattagtgaactagaaaarcttgtacctaagtgaggctcacatggactttccttttcccctcagctgaagagacttgctttgacaagtacactgggaacacttaccgagtgggtgacacttatgagcgtcctaaagactccatgatctgggactgtacctgcatyggggctgggcgagggagaataagctgtaccatcgcaagtaaggaagagattgtgtaaaatgatgccaaaatatcaaatatgaatttctctgttaccatcactgtcattttctgttatccatgactggatattccgaactttgaggtttgcccctggtgaccaggtactcttaagtggtcacccaactggttcctgtgtttcttaaagacgggtatgagcacagatggaatcagtgtttgatgtgtgtgcgtttatgagtgtgtgtgcatttatgagtgtgtgtgtttstgtacatagtagaaccaagagacctcttgggttccatttcagtaagacatgcttaggggagttgcccattttaaatcacctggatatcttcaagctagacaaatcatgagacttttctgcagtgactgggaaggtgttcrtgaagagtgaaccagccatgtgttgtctggtcttcatgtttgcaatgcagagacctcttgcacctcacagaaacagtctggtttcttggtgaccagtaggttatacccaggaagcagatgtcactattcctagggataatacaaaattattaacccaatagagtttgctaaggaactttgggaaccgggctgattctcaactctagtttagctaaggcactctttccagtatgattcactgggttaccaatagattctattaagatagtatttaagttttttaatccattctttaaatataagtcgtcttaaagacttctattcaaaagaacaagtcccgtgtgaataggcccaatcaactttccccatatttcatgttagggtttatccaagttcacaggcaaatcgcaagaggcaagggtccrtagtgtttacaatctagttcagcatttgaatgtgccattgggcttaacaacttagaaaactaccaggatttccacactttatatgcatatgtctgtttgctttccaccaaaatgacatttctatcctagggtaaaatacaggctctccatgctcccaaaagctggagtgctgtgcctgatgtggccttttcactgaattagtctcagtcttagcctgctgtgtatgagtgaagaccaagcctcccagcctttcttttctgcttaggacccaatttcctgtgatctctctgggaaagcaggattcatgacctcttccttgccatccagatttctctgtggttttccattgtgttctaagcaagacacttaaytgaattgactccaagtgaccagacctgttaacgtttcccctgtctctgatgggaaagctgttgtctgtgtctctactttagccaacctaagtacctaccatgggtggaatatgagaccaaaaaaaaaaatctgttctgccctctcctaacattttcgttgtatcttcaacagaccgctgccatgaagggggtcagtcctacaagattggtgacacctggaggagaccacatgagactggtggttacatgttagagtgtgtgtgtcttggtaatggaaaaggagaatggacctgcaagcccataggtgtgtgagtcttagggctgagcaagagctgggatgcttagttctaatgtggggttggaccagaatcacatctacataggtcatagacctgaattccagtgaaaaccaataaagaaatgggaattttgtttgaaataatgaattattatataatccatagtcttcttacaggagttagatcaaaaagtactgactacacatagaagtcttaactttgcttcaaaagcataaggtagaattgaaagatttagaatggagtcatttcttttacctaatagctgatctcagattcctccttsgtcaagatataatttatttaaaagaaaaaaaaatgacactttggacacatttctatatggaatgtcctggaccgaaacatgaaatagtgtgtgcttgtcacactctgctcatttcttttcaaattaaaagttgttgagcttctttggatctcaatcctcagttgaattttgtaagtacaagcctgaaagtttctggctataaattttactctgtttacttgtcttctaatttagaggtttttgtcttgttttgtattgttttgctttccaatatttaaaaatagctttctttgtcattgtatttaggccactcaaaattcataattggtcatttataattaagattggaattttgcatatgtagtctcccacagactagatacatacatagatccttgctactggaaatgctgctgggaagtttggggctcgctgaaaatatgtagtccatgtacttattaggagaatggaatttctgcctgccaactcagcttgagctttcttttgccttggctacttactgtgtgcttagatgctgggtgtgtcattctttctgaacagagtgccacttaaaaaaaatgtggctgaatttttgcttacacactacactttaaattacagggagcttgcayaattcaaaataacctttttttcctgtttttcttccaaatttccctacagctgagaagtgttttgatcatgctgctgggacttcctatgtggtcggagaaacgtgggagaagccctaccaaggctggatgatggtagattgtacttgcctgggagaaggcagcggacgcatcacttgcacttctagaagtatgttttacatctttatgttaaagattaagccaggtattgttttctggattcctagagagaagggtaatactatgttactcagaacacatccagtataycagcatgctttggtaacttctggawgtcaagaaaactttcataaccaacttattcygcatcttcagagaagactacataaatagaaaaacatatcactttgataaggttcaatctcagctcactgccactgacatagagttgaacaaaaggtttaggtttccttctatgtttgaaatttaaatagggcacattcacaggctaaattgataaaattaaaaagaatttatcccataaattaaaatgatttatctactctggagttagggatagtgtctctgacctaacgcatttgattagtgctgtaaagaagctggcctctggygtctttactgctccttctaagattgtcttggggtcttaattgttgcctttgggtttsaaggctccttttttgatattgtaaactaataacagctagagagtttgttgaagtaaaacagccattaactactggtgttgtaaataagtttaaaatcaaatccaaataatttgaacctgttttatttatctagctgaacccatttaactacctttaacatagccatcatccaaattcaaattctttgctaacaaaaataggtctctcatgaaaagtggtaaccattttgaccaaagctttcccagaaacttgctggtttattagatattttgcatttaaaatgttactgtgatyatcagacttccaagatctttgtggcaatattttagcttaagacaaattagatgtctgattcaaaccttatctgttatttagaactctttaaatagcaagttgggaaaagtttctcaaagagaagtcatttattccagaaaattttataaggacttactttgttcaaggtattataggggtgcagatatgaaatgaacattagcccagccttcaaagagtacttagggggtcagggagatgagaaagtcttatacatatttatcatctgcaaaacacagtattaaagatttcaacagaaatactgaaagtagtgctatggaggttcaggggatgataatacttttcgctggggatttgggaaaaagctctaatcagtaattataccttcatgcaaacttctattcttgtggtagatggatgtgggtgtgtatttgtttgaacctacatcaactattaattttttttctctaacccaggagttgcaacaatatccaattcacaaagacatcagatcctctatactcacatcgtggcacagagcaaatttggattataatttaaataatctatttaccagataaatgcacgcatagactaatggtcatttagttacaaattatcattttatgttgatcccactcttccagtggagggctaacactgaataatttggggctattttgctagtgatttttaaatactgtagatgtttgggtataggggaagggaaaataatattttagtcaaagaaattgtgcatcctctacattttttacataacaaatgaagaaagagatactaccaccttcttatagcttctttgtagccattggtgaagaccctttgatacctgcttgcctccccattgttataagcttttttttgtttgcttgttttttttgttttgttttgttttgttttgtttttgagacagtctcaccctgtcgcccaggctggagtgcaatggtgtgatctcagctcattgcaacctccacctcccgggttcaagcgattctcttgcctcagcttcccgagtagcttggattacaggcgcccgccaccacagccggctaattttttttggtatttttagtagagacgggggtttcaccatgttgcccaggctggtcttgaactcctgactgcaggtgatccaccctcctaaagtactaggattacaggcgtgagccaccgcgcttagcctgtttttagttttctaaagcaaggtccctattgaaaggcaggccataaacagtgatgactaagaaaaatcctggaagagcctgagaaggaaaaagatgaaatataatgccagagaatgaagttagtcaaaggaacagtgtgaaaacaataaataaatagataaatgaaaatgttatttgacagagagatgaaactagactaaaccattcagctgcctttccactgtaacaaatgtaatttcatctttcagaagtgtaataccttgcagcaccagagctgaatatgaacatattaccaaaaatagattaccaggcatagatagcattccttttttaagtttgaattgaccacttgcgactctcgacctgatgtatgtatgtgcttcctttgtgacacagatagatgcaacgatcaggacacaaggacatcctatagaattggagacacctggagcaagaaggataatcgaggaaacctgctccagtgcatctgcacaggcaacggccgaggagagtggaagtgtgagaggcacacctctgtgcagaccacatcgagcggtgaggcacaggacgagcaggggcgggaaatggggaagcaggtcaagaaatatttccgcaaatccatctttcctttgacatgccatttgaggataatttgcagtgtttcagctaataacctaagataatttacacattattggttgttaaaactttttttaatgtcaagttttaaatttttcagaaaaaaagaaaaatgacatacaaataaaccttagggggaaaaaagccagatttatctccaaaagataaaactgagttttaaagaatgctagcatcataaaacttaccatggatagatcacgcacacacgcacacacacacgtattttgaatatccaaagttcatttgaaaggaaatgagagttataattaattatatgactacctggttcttctgctaggaaaggacaaaaaaagtgcatttggattttttgtttgtttgtttttgaatgaaatatacttccctgtcccgacattgaactctttttgtagtggaaaccatcctttatatgtggtttctatgctctggcaaactttgttacattctataaagtaacacacaattatttycttcatgtattggcattcgaaattttagaaattcagagaggacttagagatggccatgaaagacatgatatctaagcattctttttaaaaaacaagttttaatcatttttggcatgagaaaaagatttttacgtcataaatgtttcataaaaatctgaagagagaaatatggccaacaaggacgtgcactcctctcattatttttaatatgttttgattaactttttactatatgatgtgccaacatcattacgtagtgtctcagccatccttcaattaaaaatattaattgttctaatttttcttcttttgatgagtttttgtcttgctttgagcacttatgaaggtgaacaagattagatttgataatatctttgagttattttattatcattaataaaattgctactggccaaaaaaaattataaacatcggccacgcgcggtggctcacgcctgtaatcccagcactttgggaggccgaggcaggcggatcacgaggtcaggagatcaagaccatcctggctaacacggtgaaaccccatctctactaaaaatacaaaaaattaaccaggcgttgtggcgggcgcctgtagtcccagctactcgggaggctgaggcaggagaatggcatgaacccgggaggtggagtttgcagtgacccgagatcgcaccactgcactccagcctgggtgatacagcgagaccccatctcaaaaaaataaaataaaataaaaaataaaaaaaattataaatgtcagtctaccaaaatagattaaaagtgtaggtgggaattaaatggggataaacactcaataaatgttagctatatatgaatattgccaatactgaaaagattccattgttcaaaaaagtttgagaagcaatgggttaaacaaaatggaacctgctctgcagaatctgtgtgttcctttacatcatactctccatggtagagtgtaggggatgggcgccatgtctccctagtacgtttgaccttgggattctttgtctgtgaacatctttgggttctagtgttcagcagcacttagggaggcactgaattcagtgtacctttggtctagcctcagccctgattctgttctgcggtgggccctggccttcaagagaacagatatctaaaagttgaaagaaaagatcggccgggcgcggtggctcacgcctgtaatcccagcactttgggaggccaaggcgggtggatcacaaggtcaggagatcgagaccatcctggctaacacggtgaaaccccgtctctactaaaaatacaaaaaattagccgggcgtggtggcgggtgcctgtagtcccagctactcgggaggctgaggcaggagaatggcgtgaacccgggaggcagagcttgcagtgagccgagattgcgccactgcactccagcctgggtgacagagtgagactccgtctcaaaaaaaaaaaaaaaaaaaaaaagaaaaaagaaaagatcaacacatcctgttgtgttattctgaaaggaaagctgtcttaagaggatcaattggttttagaaaaaacacaatagaatcacaaataatccagaggagaaataaaatgtggaaggtggaggtgacctccagaaaatccaggacagctgctgaaggcaccctctgatgagctcggttactcagaagagtgaggatgtgttgaaggtatctgctgtatggagtggcaggatgatgtctgtgattgagaaatataatcccggccaggcgaggtggctcatgcctgtaatcccagcactttgggaggccgaagcgggtggatcccctgaggtcaggagtttgagacaggagtttgaggtcaggagtttgccaacatggcaaaaccccgtctctactaaaaaatacaaaaaaaatcagctgggcatggtggtgcgtgcctgtaattgcagctacttgggaggttgaggcaggagaatagcttgaacccaggaggcagaggttgcagtgagccragaccgcgccactgcactccagcctgggcaacagagtgagaccccatctcaaaaacaacccaaaaaaccaaaaaacaaacaaacaaaaagaaatataatcccagtagccccagctgagctggaggatggagaccacttggtagacacttgtggattatttcctaggctaaatgcaaaagctactgctgaataagggwcatttttttccagtcccaggccagtagcgacatagatttcagagtgatctctgtgagatcctgaagatcctgactgcagaaagtagtgaattgtcttctctcacccagttttgtgacattcccttttcatgccattaggatctggccccttcaccgatgttcgtgcagctgtttaccaaccgcagcctcacccccagcctcctccctatggccactgtgtcacagacagtggtgtggtctactctgtggggatgcagtggctgaagacacaaggaaataagcaaatgctttgcacgtgcctgggcaacggagtcagctgccaagagacaggtatgcattatctttttgaagaataggactgatgactttattatttagtttttgaaggacaatacattttcaatgtgaaacaataaaacaaacaagaagcctgtaatcttaccaccctgtgataacaattagggttggcatttgaaatagtttcttccaatctttttaatttatgtattttctttctggtcatggatatcatgggtaaaaattttattgtatttatctgtctaaagtgttgttacaagagagctactttctgaataatcatcaatgttttatattctaaatctcaaatttcagcagctttgtgatgtaaacatcttccaataacctaatatatgtattctgcactacaaacatggtagtcactatggcaataacaattgctacacaattctcccccagaatagtctcatatattaattttatggcatagatatagtcataaatattatcccaacatccttaagyagcatccttaattgacctgtataaatatagctttacaaatagagaaactgaggcatggcagcagaagtggtcatgaaggacatcagcagaagaactcaggtgtcgttctatccacagtagacatggattcctgagtaatgcattttgactgaaattaacgagatgatcatctatactcatagcttcttcctttgagggcacaagctcagtatctcattgaagccataaataagcagctgctggtgggagataaagcatctctgtttactgacactcttttgattatgattgtagctgtaacccagacttacggtggcaactcaaatggagagccatgtgtcttaccattcacctacaatggcaggacgttctactcctgcaccacagaagggcgacaggacggacatctttggtgcagcacaacttcgaattatgagcaggaccagaaatactctttctgcacagaccacactggtgagtgtcccaagggggagccacagaagtgagaaaaactcactttcatgccctagttttatttgccagcattytagccatttattttgaacccgcccaagaagcatcgcttttgttcagtttggactcaagagatcgcagcgctcacgtaacagctgaggattcttccatcttccccagtactgttgggaaatgacaccaagggagtagccttccagttcatttgatttaacacattgggattatgatgtgattaaagatacttgtattttggaatcagtagatgatcccacagggctgaggaatacaaaggatgaatgttttagtgccttagcttattttccagttaaaacaatgttttattcaaagctatcatttaatcttttgtggggggggtgctggggaaatgacagtgaaagtgggatttaaacctgttttgaaggtgtgaaggtaaatatgctaagaagcttagaactatattatcagacattttttattctgagatagactgtctgtgaatgagctgcagaaacctggctctctcagaccagtaattctgtgtacattggaaagctcagcggtaatcttttccttctttgttgtgtattgttcctggcagttttggttcagactcgaggaggaaattccaatggtgccttgtgccacttccccttcctatacaacaaccacaattacactgattgcacttctgagggcagaagagacaacatgaagtggtgtgggaccacacagaactatgatgccgaccagaagtttgggttctgccccatggctggtaagatgaagcccttgtgggttgtcttgtttgacaacaatttagggagtagagactaaagactagtgtccagtttactcccatttcattcattaacacaattttgagacaacagaaaacttcatgtgaagtgtgtttgtgtgtgtgtgtgtgtgtgtgtgtgtgtgtgatgttacatcatatacataaggattgggaagaataattagataattatttatataatttttaaacctcattgacatgatttaatgtcaaaaatataattacttatttgtaagtctggaaatatgaatttgcacaggtttgtctttgtaaagagcacacaactgagtagcttacaacatttaatatatgtatgacggctttagtcacagagctacaatattgacacatggttgtggtttgatgggcataagctctatcacttattaataagtgccaaagtgactaaaactcaatgttttctaacaggtagggaatctcactctttttttaaaggtccccagtttgtatagatggcgaacaaatggaaacgaataccttttacttgttttcagatttcaagaaccccatagattccctttaattttccagttgtagaaacaagagcctgggcggtaggcactgtcaagtgtgactatgagacaaagaaattgcttatacttttatttctttcaacaaaagaagatgctgagtttagaagaaaaaacccacttttgcttgtaattctatatccaaacccatagtttttatttgatccagaataaactggaactgggaaaagttatgaagcygtagttaaatccaggcttctagaacagcaagaaccctttgtgtggatgtgtagatattatcttagtttaacatcccctaacccttcctgtaactattttctatgacacgtttggactacgttttctgcctccagggctcaaaaattctaccccttcacctgacagcacttagatgtctytgaygcacacaaagcttcttcccaagtgagaattcttaggatgaccaaactgaactgatccttttgcacacatacatgtttagacctggtgatcatttatcaagtgcatttcttatccatttccaaacagcccacgaggaaatctgcacaaccaatgaaggggtcatgtaccgcattggagatcagtgggataagcagcatgacatgggtcacatgatgaggtgcacgtgtgttgggaatggtcgtggggaatggacatgcattgcctactcgcagcttcgaggtatgctggctgattaacaaaaatatttgagatggcaaaaggtacagaaagggacacttttttttatgaaaacttgcactatgccaaaagcaggggaagaaatatggaatgccacgtcattcattagtctactgtgcatggtaagataagcctgaaaggcttagcaggcagcctgctaagacaagcggcatagcaatgctaatgttctgaaacactcctagcatgtaagtacttaggctgagccaaaaagatggcttcaaaagtaagaatgaaacatttgatccattcagctttaggctatgccactggattcatgtctagaaaagataggataatttctgtaaagaaatgaagaccttgctattctaaaatcagatccttacagatccagatttcaggaaacaaatacataggggactaactttccttgttcagattagtttttctcctttgcacccagctatataatatgaggaagtattgactttttaaaagtgttttagttttccatttctttgatatgaaaagtaatatttcgggagaaccctgagctattaataatctatgtggctagtgcgtagatattggtctgaatttgttctccttttgtggtgtccagtgggtaacaccatccgggagtaataattacatgtggtgttgcagaactgaaagagaccttaataacacatagagacctcactctatatagatcaaggagctgagacccaaaaaggaaaaagtaattttctcaggatctctcaaagagtgagcaacagagttggcctaatttattttagcgttgtgaatactgttgacattttatttcccaaatctaagtatctcctccccttccccctattccagagaccagaccaccacatcatgctgggtgttagataaatatgtttaatcttcttcttatttatcctaacaagcagatatttaaaggaaattatcaactaagcaagaaattttcagaaagtaagacatgtatttgttcaaatactggcttctcacaggaaagtgtattttaccacattctttacttgagcatactgtaacctctgcaaaagttacacattttrggaagaaaaaaatttttttggcaaaaattgtattactgaccaaactttgaaaaaaatgttattctatgcttgtagaaaagttattttagtggaaggtgttgataattaagtggaagtagttgtatgctttgagaagcataccttttttctttcatcaatggaactttaaaaagtttctcactcacccacctgtttcctraacagatcagtgcattgttgatgacatcacttacaatgtgaacgacacattccacaagcgtcatgaagaggggcacatgctgaactgtacatgcttcggtcagggtcggggcaggtggaagtgtgatcccgtcggtgagtagccctatttccctagatgagtttgcacagggggaatggttagcaagtttcagataagaaaagctatgtgaaatcacatgactgaagttggctccagactttgatcagttgcttgcaaagaactttgcaaagtcttctctctaatactggaccaaaatatctcgatattggtagtcgtctggtttttgctgaatttggtgacaaatttaggcttattttaattgaatggaatttattcttgggtttagaatcataaagataatccatgctattaaaagtattctttccttttttttttgtttgtttttgtttttgtttttttgagagagagtttcgctcttgttgyccaggctggagtgtatggcacaatctcggctcactgcaacctctgcttcctgggttcaagcaattctgctgcctcagcctcctgagtagctgggattacaggcatgcgccaccaggcccagctaattttgtatctttagtagagatggggtttctccatgtgggtcaggctggtctcaaactcacttccttaccagctgtgtaacagcatgagcaaagggtgtaaatatcacccaccaaaacactctaggtttttttttggccgcccttcaaaatagaactaagcaaatagtgaaggctgagccttaaaagagctgtgttaccagcactacaaagtttaaggtgatccattactatttctttaccaaaagagacaggttgctcactgagaaaacaaactgataacatccgtttgtttgacgtgagattaccagaactgagagagaagcctgagaggttttcttagaagctgctcagcaggtatactcgtaaagtctagttcattcatttaaatgtcaaacagtttctttaaattttgaagaagtaaggaaaatgaaattattgcagatttttttcttgctatttaaatgttaagccagttatattaatatgggtaaaaataataactaatatttaaaattaatgtgtagattatcaatatacactgaaatctaaatctttacatttttatttagaaatattaccttttagaaaactaaatattcctcctaataggtactttggttttttttttactacaaactgtcctgtaaggtaaagaatgtgaacaaaatatttttttaactgcatatatttgtaagaacaattgcaaatttctatttaagctaaatgtatgctctagcaccctgaaattaaattcgtagttataagtcttcaaggctgtttatcttttccttccatgtattttagaccaatgccaggattcagagactgggacgttttatcaaattggagattcatgggagaagtatgtgcatggtgtcagataccagtgctactgctatggccgtggcattggggagtggcattgccaacctttacagacctatccaagtaagtwgctctattactgcaagttgagaactgccarttgggttataacaacagggcagtgattattaatgctctcatgcctaagttgggggtctcccctctttcccacccttttctcttgttattatctaataatcaattgaatttttgattaaaataatttttctctcttcctctatcaagtaaaaggtagagaaggctatgaaaatgtgcctgtttataattttacttcttaactctgtaaaatattctgttaggttaagacactctggctaatttcatcttatatccatacatggaaataaaaaccaccaagtgagttatgctgggagtaaaggtttggggctttatattatgattcttaacagagaagctgcatagagagatggcatgaaatgcagcataakgtacgtgttcattcaacatgtcatctaagctccctttgcatcaaacttttcatttgtttgatcagttgccaccaggaacacagtatgttgggccaagggttgagtaacttggtcaactctctgcccacacagttcaaacactctcaaatgtttattgctgggtttttccaggtcacaaagacatcatgcctagctgtaggtgtaattagttcatttggggggaaaattgcatttaaatattcactgagtgattataataaaacatgttaataaaacatgaaaggctaattaaaaggcatcagttatttgagcaactgctgaggtgcaaagtctccaaagtcttcactaacgtttgactgaaaatatggcctacattcagaaacaaaagagtttcagggtgtcagaatctgcatgcgacagaaattaagattaactctgtgataaaagattcrctgtgacagagaacaagctatgggaacaacttggccaaaggtagtgttagccaagcctcattcctccatttcctcatctgtaatatgggaagattgtagctgattacctttartgttccatcctaaatactraacacccagatgcaccttttctaggaacttggaagattctgcttttcccaaccctcagacactgtcagtgctggggaaggtgacttcacttttgaaggcttatagcacagattgaccaacctcctaaattgtatttcttggaggatttaggtgtaggaatcacttaattttttgtaacttaatatatatttaaatctgattgtggaagtactataagtatatgaatggtttgtttgtttatatgatgcaaatgatacttaaatggtagaaacttctaaaaaaatgctctgtggtttctatatttatgattgttattggtgttgcaatttgctgaaaatgatttccttctgaatgattgagagagatcttcgtctctctcaacataaggctgtccacatagctgcttgctggaagcatttaggtggacatgttggagataaaatctggaaaggaaggaatccttgagtattggagtattacatgttgaccttaytcctactctttaaaaaggagaacagcaagatcccactgagcatagaggtgatttcggagggaagagattggaatttgacctcagatatgctctttggtgcttatctgtatgtctggtttgctccgtggcctagcacgtagggctttaagagtgtggtgagaataagggaacagcagattaccaacagattgtctctgagtcctgccttgtttgttcctcctacagagaacttggtagagttgttcaaactagcaaaagataagaggcatttggtttgtcaataagcaactagaaaagcacagatctcagcaaaataaatagagaaaaaaaggactgagtcaaaaaatcataaatgtttaacttctccaaggacactactattggaaattattcatttagactttatttgaaactaattttaaaagtgtagacattgtactatctcctttttttggtatcatctcaactattttattgttagtttattcatattgaataagagagggagtaaagatttcacaatggcgatagctagtatatgccaattaagttaatttaaaaagttataccaactaccagtagcgaaaaaggactgtcaaaagtttaaatctaaataatgtaaaagatgtcataatttttaacttttctgtctttaaaggatacatagtataagctagagtaattatacgtagtataagctagaatataggaatttaattgatctaagaaataactgacacaaagtctctttacttcctgaacaaaaacatgctaaattccattgctgttcagtccatttcctttaaaggtgggctatgccacagggctagattttaaaacgtggaatttcasaccagtgctcgaaatcttatgaaagcaaaagggacctctgtagttgtactccactttggcttgagtaaaaaccactgctgtaccctttttctttcctttccctgcccatttttatcctcctccttgtgtccttgtggacatagaaatatgattaggcttagaggtgaacagtaaaggtcatttatgttatcttttcaaaacttaatagacatttawccatcataagcttgtcccccctcaaaatcatgattgacaagactaaataaaatgtatatcaggtgtctctttatggaggaaattgtagtaggatttatttaaaggatcaatatttaaatagccctatgccaattatcataaataattaaggacatgatattcctagctttcctgatttacatggaagtacgttaaatagtcacatctccaaaatttttcttgaatagttgtctttaaaaatgtgtttacatttgtaaggatcttcataaacagaaggggtaattcaaagatrggcatggaattgacttatgccaattgattaaaacaaacatcctgtgtgttctgtgaaatacatacaactttaaaatgaaaaactcataattttatgcatgaattttggtgttcatgtggcttggaaatatgtgcattaaatggaattaagattcaaagtatttgctaatcttcaaccaactttgaattgttactggtgtggaagtgagcatattgttttagaatttctgaatctacatggatatccaagttatatattttttctgctacagaaagctttgttttccaagagaatttaatggcttagataataaagtttgaaaatcaatgtattttttttcctagaagctttcagaaaacttaaatctgttaataatctggtgaagtgctttattacacatrcaaaattttgctctgtttgacagagtgtcagttagaaattcttgaaaaggttactataagacacaatttttatttctagtaatttaaacattgactgacatcataaagatagtgttttaagaaaagatagttttctgttctgcaagcrtaaattttctagctatttcattattatcttaaatggagttaacactacttwgaaatkgatgctacttcccttattttccttttattttaaacaaaagaaccaaaaccatactttaaattttgttgataacagtgatatacatcaaggtgtagaaatactgaatttagtatacacttcataaagtcatttctgttgacaactgattttggaaaaaaaataaatttaatcacttaataatttgatggatcaatggtgtgatttgggagtaaacttcttgaataaaaataaaacttgatgttttttccaaactgatagactgcttagactgatgagaaataaaactaggtctttaattattacctttgctatttgtctaagattctacccccatttagaaatgtgtttgttttacatcatctcatatggcctttggaatgttgtttccttcttaggtagtagattcattcttgatgaaaaccttccaaaattagaatttgctttaaaagaggctcaatacaataagtaaatgaagtctgtgttctgtattacattatttttgtaggatcgtttcacaattttctcacaattcttactttgatagtagagaaaataaaagcaagccaagagacttttttttaaaaatatattttatttgctataaacaactatgatttgcatttctcatgtgaagaataataattatcggctaaaaatggatttgctgcattgattttcaacgtaaatatttaaaagattaatgccagataattttattatactcacatttaacgacaagcaaagctgtttataatgatgactgtccatgtacacagttttaagttgaagtgagtgaatattcaagataattaaatgctacattttcattttcaggctcaagtggtcctgtcgaagtatttatcactgagactccgagtcagcccaactcccaccccatccagtggaatgcaccacagccatctcacatttccaagtacattctcaggtggagacctgtgagtatcccacccagaaaccttggatactgagtctcctaatcttatcaattctgatggtttctttttttcccagcttttgagccaacaactctgattaactattcctatagcatttactatatttgtttagtgaacaaacaatatgtggtcaattaaattgacttgtagactgaggggattttggttttggttttgggttttgtttttttgcggtgggggggctggtatttggaagaatttagctctttatgttacagaaatcttttttgcaaggacttagaaatgataatgcttaagattgttcttgcccaatgtgggaagagaatctaaggtttttatatgtcttgcaacctcatcaaaggaaaattactggcatcattttcataatttgaaaaaaaaagccaaattaatatatttcttttttgattcactttttaagtgatcatttttaaaactttacttttgacccactgwatttatttagatagaaggaaaagagatgatgggagggaagtttagataaaggatggaagttggttttatttaaacaatagccctgtgatttcctaatgagaagtgactagaaattgaagaaaccaaataaggaggatattggtcaatttagctttagtttctcttactctctcaagcctgccctgtttaactccaaagttcatggctcataatttgagaaacactgttttaaacacaggagaaaaaaatgtccattttaaatcatagctattgaattctacaattacaaagaaacaaacaaacaaaatttgaccaacccaggcggttaaatttaaactcttcaggaaaaatttaagctgttaaaattattctttttctaaatttctaaagtggagggacagaatttttcagatttaaaagggcctcctaggtgcccagaaaattagtggaaagaaccacgtctagacgcatctttgatgtgtcagagttccaaggataaaaagaaacttttaaagtcttctatactcagccaggttatcaatcaaatatgagggcaaaataatattttcagacagattttaggcagtktatcttccatatatccttttctttaagggtatttgtagatacactccagaaaaacaagagtgaaatatgaaggaagttgtggggtccagcaaacagtgcttccaaatcagacccctgatagaggtggaaaactttgcaatgcaacaactgcgtagctggcttagaggacagccaatacagatggaacagaaagatgaggatgggattgagggatcagggattgaggtctccaagaataaaaagggacttcatggaaaaagtaggcttgtggataattaatcacaggggcaaataatgcagttaaaataacaacatgacaatcaggtggaggaatgtataataaacccaaatgtggctgggtagagtggctcacacctgtaatcccagcactttgggaggccaagccgggcagattacctgaggtcaggagttcgagaccagcttggccaacatggcgaaaccccgtctctactaaaaatacaaaaattagccaggcttgggggcgcacgcctgtagtcccagctcctcaggagctgaggtaggagaatcacttgaacccaggaggcaaaggktgcagggagttgagccaagatcgcgccattgcaccctagcctgggcaacagagcgagattctgtttcaaaaaacccccaagtgtattataaggcaataattcctatacgaagcaaactaaaatgcagcaatattaaggtataaaaacaaagaggaataattccattgaaccttgattctggaaactttgatccacccagcagtcatgatgttagactcattgaaaagaatgtatttctaatgcatgatgcgatcggtctatagatgtgtcatggaaacttggttgcaacttcaagacaaaataaaaagtaaacatttacatgaaaaatggtggatatggaaggtggagaagagaggagataacagctttatctttcaaaatagagaattgagagatggtaccaaaagctgatgaagtaaaaaaaaaaaaaaaaaaaaaaagatacttaatataatactttaaattacaaatataaacacaagaagaacaaatataatgatacaaatgtcagacactgggaatgtccaagattctggaaggaaagggtggtattattgagctaaatcctcaactttgtctgggcacagtggctaaaaattagccgggcatggtagcatgcacctgtagtcccagctacttgggaggctgaggcggaaggatcgcttgagcttgagaggcggaagttgcagtgagccaagatggcactactgcactccagcctgggagacagagaaagaccctgtgtcaacataaataaatatataaataaatcatcaagtctcatattaaagasyctgtaaatatgacttattgttgacaaatgaaacaaatagaggtgtaagcatgttgtctacatggaggcaagaccagaataatagaaaatggaaacagattcccttaaagaggggaatcgtgtctttctcattggctcartgtagtctccgtagagtctagaatgcttcagcacctggcacactgcttaacaaatggtgaatgaaaaaaaaaaaagaaaagtcattctttttcttctttcaccctatgtycataatctggccatttgcagaacwtgatgtccagtgatcgaaatcaacagcatcagtgcatccaatatcttctagtctctcatcttcttattacatcattaattttatttactttaaaattaaggatatccaaagtattatgtgagaccattgcaatgggagacttaaaagtggtataaaatgtactttgggccaggcgcagtggctcacgcctgtaatcccagcactttgggaggccaaggtgggcggatcacgaggtcaagagatcgagagcatcctggccaacatggtgaaaccccgtctctattaaaaatacaaaaaaattagctgggcatggtggcgcatacctgtaatcccagctactcgggaagctgaggcaggagaatcgcttgaaaccagaaggcggaggttgcagtgagccaggatcacgccactgcactccagcctgggcaacaagagcgaaactccatctcaaaaaaaaaaaaaaaaagtacattgaattgraaagtcttcaaaaagcagcagtgatgaattttttgagatttttaacaattacaaaaattcagggttttttctaatggatgccacctgagactttattttctgttattttcttgtaataactaaccaaacaagctcatgttgaaaaatgattactaaatttgagctaattgcaatgactggtttcaaaattttccacagtgtatttgagttaaaatttcactgtgaagagtactacgatcactctcgcttattccaaaaatataaatggacacttgagtatttgaattattgaggaaatggttgactgggtaatttttaaaaatcactgggcataaaaaatatattttgacttatattagtttagagtatttacacttgaaagagtctcatcttttctgaagggtgtttctttcatacacattttattgcactgagttttgtgacccatggcatattaatgaagctgaacaggatgtgaaatataaactggaagcaaaagattaaataaaccaaaattgcattttttctgtagtcttgtccaaaattgggtaaccacttctgatggggtagctcatatccaagaatgagtcacaaaaccagacttgttgaacctggtatatgatgagtcacaaagcaacattctgcctttgttttttcaggacaagaaacttgaattgtatcccactgagttaaaagataaaatatatggcattggcatttctgtacttcagagaggaatatatctgtttgtggtaggaataaaaaataagtgagagaggcaaagcttaggttcatcatattatgttactgatataacacaattaacttggtaaaagtgaaggtgtgggtgggcgtggtggctcacgcttgtaatcccagcactttgggagtccgaggcgggtggatcacctgaggtcgggagttcgagaccagcctgaccaacatggagaaaccccatctctactaaaaatataaaattagccaggcatggtggcacacgcctctaatcccagctactcgggaggctgaggcaggagaagcgcttaaacctgggaggtggagtttgcagtgagctgagattgagccactgcactctagcctgrgcaacaagagcraaactctgtctcaaaaaaaaaaaaaaaaagtgaaggtgccyagtgtctgcaactatgtcaccccgggcatatcacatatcactctgtttttccgtctgtaaaacgggagcaacaatgccattgccttatcatcagaaggatatggagactaaatgggagaatgtaggtaaacagcacagagtatgggtatcagtaagtaaactgcagcagtttgttgatgttaacaatagttagcattatatctaactatatctaacgatataaccattgggaatccagttttccatgattttcctctagaatggagctgcctaagtcctgcttaagtcatttttctttgaagattactgaacatcatcttcaaatgttcatccttgtaaacacgtgtgtgtgtgtgtgtgtgttaatttaaattttcagaaaaattctgtaggccgttggaaggaagctaccataccaggccacttaaactcctacaccatcaaaggcctgaagcctggtgtggtatacgagggccagctcatcagcatccagcagtacggccaccaagaagtgactcgctttgacttcaccaccaccagcaccagcacacctgtgaccagtatgtacacaaccaccctcatgcctcctacccccgaggttcctagagctaggctctcctgaggcaatgctttccttctcaattcatattcttccaggaggggcaccaacgttttttaaaatgatgttggcgacgaggacggtaaattttctagatgactgaaggctgactttcccctttctgtgactctctaggcaacaccgtgacaggagagacgactcccttttctcctcttgtggccacttctgaatctgtgaccgaaatcacagccagtagctttgtggtctcctgggtctcagcttccgacaccgtgtcgggattccgggtggaatatgagctgagtgaggagggagatgagccacagtacctgggtaagctcaatatgtcgctcaagacaggttcagggcagctgctggaaaactctccttgtgggggtgggtggcctctaggcaggtggtatctgtggtttggaactggttgacagctcagactgaacaaaccaccctctggcatgaggaagggaaggactgactctttctaagaagtggccgggtttttcccaagccactgtcacatgttcctggtccctgatgccagctgcatcatgcgcctacctgtgcacaagttcctacagcaaaagctgtgttcttggtggaagtaattaccaggactgcagctgacaatgtgagcacagtacggtcactcatacttttcaaattgttatggtgaggggcctttaaaaaacttcattggcgcactgaagtgtgtgccatcgtaagcactgagttcagtgaatttgaattcttataaagtgaacacaccacaagaccagcacccagatcaagraaaagaatatctctctaccctcaccccatcatcttccgccaataatcactaccctgactcttactgcagagagctatttttaaaaatttggcattcgattacaaaaattatacgtctttagaaaaaaagttggaaaaatgaaaggaagaaggaggaggaggagaaaggagaaagacaagaagtggkgttttcccatagtacattaataatcacagattaggtgggtgcggtggctaactcctataatctcagcacttcgggaagctgaggctggtggatcacttgaggccaggagttcgagatcagcctggccaacatggtgaacctccatctctaataaaaatgcaaaaaaaatagcygggtgtggtggtgtgcacctgtaatcccagctactcgggaggccgaggcagaagaattgcttgaaccggaaaggtagaggatgcagtgagctgaaattgtgccactgcactccagcctgggcaacacagcaagactctgtgtaaaaataataataataatcactgattagctattagcacattaccttctagtcgcttttccctatgaatrtataattcttaaaatatccttcttataagctgtagagtcatttgagggactagtttgctctgattagttaccttttcttttcatttcaaagatcttccaagcacagccacttctgtgaacatccctgacctgcttcctggccgaaaatacattgtaaatgtctatcagatatctgaggatggggagcagagtttgatcctgtctacttcacaaacaacaggtacatgtgtgctacatagtgttaaaagaatctttttctgtaaaacacaggcctgtagtagcacttcctgactgttygccccactttctttctttcttagcgcctgatgccccwcctgacmcgactgtggaccaagttgatgacacctcaattgttgttcgctggagcagaccccaggctcccatcacaggtcagctaagcstccccctctttggctgctatgttaatsttaatgacatcagcagggagggcgcagattctgactgcggacctgcatatcactttaaatctccaatataatttatgggagaggggtttgtgtgtgtgtgtgtgtgtgtggtggcgggggtgggggagttattttctatggcacatttccccttgaaaccatttcaccaactcccttatacacacacaccacaacatacacacaacctgtaaagccagctcattggcttattaaagcaagtgttcccagggttgaagaggtgtaatttcctgaaaacgttgctctaagatttatccttaaggagaaagctgagctgtcgtcttagctcattaggtgattcaactgcctcatcactgaagttccaaaaagacacacacagtgctagacaactctgcttaggctggttcattaattgcttccctcgtctggagctcaaagaggaaaaatcagcttaacatgaatattttcacctaatggcatctctaattgacatttattaaggatgtcaggtcttcaaggatgacatttattattaaaaaggttcgcatgactgttcttattttatcttcgtgctgaatagtcattattagaagaagtggcaatattcaaagagtcaaaaagtatcactggctcttcactaatcaagcaagatgctaagggatattagaaaagggaggatttatggtgtttctaagcctctgtctcaaagaaaacagtgcatcttacttttgctcatgaatctgcagggtacagaatagtctattcgccatcagtagaaggtagcagcacagaactcaaccttcctgaaactgcaaactccgtcaccctcagtgacttgcaacctggtgttcagtataacatcactatctatgctgtggaagaaaatcaagaaagtacacctgttgtcattcaacaagaaaccactggcaccccacgctcaggtaacttttttaagaagacacttcctatgttatcttawcaggattgttcctgaaggagggttgttttgtctctgtcaacagtcctcwcattcaagaaatcttatatattagtttttccctaaacttctgatatttagctgaaatgtcataagtaacttatcaaagctggctactggcctttctgattaaaaactgacaccataacrtccatctacaaattttcccctagaagcttaagggtcatttcatttttgattcttaagtattataaaatgattcagtaaaacaaaaactgttacattattttctgcagttatttcaaaggctttttctaaaaaawtttttagtatcttttcttataaccctctccccccaccaccatatgacacttcatatgctggtaactcacttattacctattttagataaaaggttcaaatgtcataatttaagcactatgactggaccatgaaaatgtgatctgattaagagacaaaacttagcaaaactctcgaatgagaggctcaatgaactgcctaacatatccaagaaactggcttcttaaaagtaatcttcagcagagaatgtgaatgaccagttgactcttgtctgtcagatacagtgccctctcccagggacctgcagtttgtggaagtgacagacgtgaaggtcaccatcatgtggacaccgcctgagagtgcagtgaccggctaccgtgtggatgtgatccccgtcaacctgcctggcgagcacgggcagaggctgcccatcagcaggaacacctttgcagaagtcaccgggctgtcccctggggtcacctattacttcaaagtctttgcagtgagccatgggagggagagcaagcctctgactgctcaacagacaaccagtatgtcttctcctatctctatctcccctccaaattctccaccctcacttgcagcctgtgagaaagtgcagtaaaccattcactcagaggtgtatggcttasagagagggaaatacccagccggcaagggaatgcatagtgaacacaaagcacattaaacttgaaaacaaaactcagacaagctccatggatgctaagtggtaacccatttctaaaatacatgtaccagctgaagggtactaagaggggagaactgaagagaatctaatttgagtgcatttttcgtgtaactaaatatatctagatcaaagttaaaatgcaggatcataacacttagagtagaattcatttaacaatagcaattgtcaagtgtctagtattactagccaccagcttatctgctcagtttttacaagcattattctcatatttactctttgttttgaccttaggaaggaaggtcttattattattattttatttatttatttttttgagatggagtctcgctctgtcgccagggctggagtacagtggcaccatctcagctcactggaacctctaccacctgggttcaagcaattctcctgcctcagcctcccgagtagctgggactacaggcgtgtgccaccatgccctgctaatttttgtgtttttagtagaaatgggtttcgctgtgttggccaagctggtctgaaactcctgacctcaagtgatccacccactttggcctcccaaagtgctgggattacaggcgtgagccatcgtgcccagccggaaggtcttactagtatccktattgaatacttaaagaaactgaggctttaaaaaagttctgcaacttgtagggtcacagagataggaagggatagagctggctctataacctatgtccgaagcccatgctctcaattattatactcgactgcctcttaaagatttcctctatttgaaaggtaatttaaatttcggtgggaaaactgctggttattattctcaagaataaactccacaacttatgtgattctgatagtgcaaactcaccagtatcctaccatgaatctgaggatacgttatcattactgtaattactgtctaatctgaaccatgtgaaaataacttttatttctctagcaaagggctattcacagaatattgcttttgacccatagagagcttcttcttgctgtcattttaggaggcatatccctttttccttaatctgtttggctcagagctaactgtgaacttcagaagtgtttgttttgcctttttaaaaataccattgctttaatgtaactataatttctgagactgatgygaaagtcttgctggaaaattagacttcccaaaggatcacagtcaagcaaaatggttccacaatttctcatgactggcagagttttggcaaagttttgtgtagcactcaatctcttactggctcagtttttccagggttttgactttcacatagttacaaccttgaggagagaaaacttagacattcaatcaagtttcaggacttgagttatgatcattactgatctaaatatttcttggcatgtttcatcttttttcctagaactggatgctcccactaacctccagtttgtcaatgaaactgattctactgtcctggtgagatggactccacctcgggcccagataacaggataccgactgaccgtgggccttacccgaagaggmcagcccaggcagtacaatrtgggtccctctgtctccaagtacccmctgaggaatctgcagcctgcatctgagtacaccgtatccctcgtggccataaagggcaaccaagagagccccaaagccactggagtctttaccacacgtaagctgaaaattaartgccttttcttaactatatttacattctctattcttcatgctttaaaamaaaacaaaacammamaaaaaaaacattaaaaaattagtacataatttaaatcagtgatactaaaaatgtgctccatagactggctgctggcccgttaattgtttgctgctagtctgcaacaagaaaaacggttgtgccagaacrtaaatcacaaagcacactgcttagtacagctgagaatttttctgaagccagattttcttgatgaaggaagcagtgtgttaatttgcacacattgccaagctcgctctttcctctagggccagcactttgagtaacatgggtttaaagcagtctgttattagaaaaattaaattcgattacattaaatgaatttaccaaacactagttaacgcaagaaaaaattagcacctatgtctacattctattactttgggcattgaatagtaactataaatgcagaataaaaatatctatggattgaatgggaaccaactaattgaacatgaagccaaggaaatgatttctttatgagtgttggctgcagaagattaaagtacttttgcagacggaatcgctcttttcttaaattactcttgaaattcctcagaggagaaaaatactaacaataatttttggtyatgtctatccttttgctcaacattttaaaggaagtggtcttaaatctccyacatatctacatcacaataacaacctctattcacaaacygattcctattaaatacatttccatttacattacagagaattatgagactccttatttctagctgaacatcatttgttattttcaactcgacattttgaattatagaagcacctaacataagtactttttcagcatatattctaaccatggactagtttgcaattttctaagagctttcaacaaatgttactcttcgactaatttaaaagtatggatgttaaaaagcattcaaaaagtccatacaagcctagtttgtaaataactatggaattgatttcccaaagaaaatacaaacttttccccataagaattcatactttaagaaaaacttacttccatttaaatttactgtatgaagtttggctcatgaaggctttttcctaaataatagttaatcgtaagcaagtaaaattcacttttaatttgcaaataagcttacttgaaaatttggctaaaattttacacggttctaagatagtctaagatctactctcatgaaattaatgtctttatatttcttgtaaatattcatttcttataaatgtccttcagtgaattagaatggagatttcagtgaatgcgccctttcagtagatgtcgtcttttactaaaatgtagaattctatagttgtcttgttcattccttaacatgagacatattttatgtagtttcttttgttgaacacagtgcttataaaagaaaaagcatttttaatgatgctaacaataattaagggaaggtggtgggccaagatatttcaagtacttctgaagactgatatattggatatattattttatgctttgcataatacattcatataaaatataatgattttaactgaagtactgatagccaaaactaattttattagataaaggttaacatagtgtctggaacattgtatgctttcaaaaactatttggtgaatagataattgagaaaggaataataataaaaacagctaaatgaagcttatatttaaataaactaatgtaagcagggtattctacaactccatttgaactttaagcactccctaaggctgtaaacatccacaaggcttgcatgtttttgaaattactaaatttctgtagttttttactatcttactaagctgaattctgggagtaacttttctgagttttataacttgtgctaaattcttaagagcaaatgtgagaaaagttaggggaaaaagctgtttctggggaaaattcagcttagtcttatattgatagggcaaattttatttctttaacagctgggctgttcttccctaacaagacctgccagaacccatagctcacacttagaatcacatcctttgtttgacatcgtttgkgggtttgtggtttggtgattttcccataatggccttcccaggcagagagcatcatcttaaacttgggaagactctaggtggctggctcaagcaatagaaaatacctagtcttaaagcccaggacagttgaggcgaatataatttgtaaaaaaagttgtggttttcacagatgttcagtgaaagaaactgactgttctctgaattgttttttgtgggccattaaaaatggtcacacagggctggccatggcattttggcacagtcaccagcagycaagtggtgtataatttcagaggtactaaaaggcatcgggtcacccatcccagtcatgtccccccaccccccaccaaacaccatcaaaataataacatacatagatgaaacagcccactaaaccagtagtacctcaattcagccattagagctatcattatgaagtggcccacacatatatttggctttttctcacacartatttttaaaataaaaataaaaaatggctccttagaatccagactgaaaaaaaaatgcgagaattgcgatgttgattctaaattcccacatggcaaagaaaaaaaaattgactggagttgagttgagactggagtctgaacactttttaatccctgtttgtataactctggagactaattctttgtcttgccagccattcataatttagtataaatgcattcagaggttttttcccaatgggaacaaaatttgattgagatgtaaagagaggaagaattgtggagatgtcaaacatgtgaccagagctatkaacacacttgatacccttgaacttaaacttacccaactcaaaatatctggccttctgcgatcttacctttctacatttataataagatttgcaaggttgttggaaatctctatcttaactttatatatacatgcctctttctttctttttctttcctttcctttccctttctttctttctctttccttccttccttcctttctctctctcttttcttcctttcctttcctttccttccttccttcctttctttctttctttctttctttctttctttctttctttctttctttyctttctttctctctcactctctctctctttctttcttatttttggtgctaaaacccaaaacaaatcttttatttaaaaataagattttttttttttttggccaggtgtgatggctcatgcctgtaattccagyactttgggaggccgaggtgggtagatcacctaaggtcaggagttcgagactggcctggccaacatagtgaaaccccatctttactaaaaatacaaaaattagctggatgtggtggtgggcaactgtagtcccagctacttgggagtctgaggcaggagaatcacttgaacccaggaggctgaggttacagtgagatgagattgcgccactgcactccagcctgggtgacagagcaagagtccatctcaaaaaaaaaattgtttaagtaaaattttattttctttcttttttttttttttttttttttttgagatggagccttgctctctcaccctggctggagtgcagtggtgtgatcttggctcactgaaacctccatctcccaggttcaggtgattctcctgcctcagcttcccaagcagctaggattacaggcatccaccatcacacctggctaatttttatatttttagcagagacaaggtttcaccatgttggccaggttggtcttgaactcctggcctcaagtgattcacctacatcagcctcccaaagtgctgggattacaggcatgagccactgcgcctggccaaagtaatattttcaataagaaaaataacagtgatgtcaggatgctagaaaatgcaaaataaatttgttataattcctgattctggtgatraaatactaaatttttgcagtattattctgaaagaataatcacgtatttaaagtacaaatctttagacttcaaagtgcatccatggtggcagattttgtttaacttttatatagcatcttttattgcaaccaaaaatagctgaccattattgtggaataattcagcgtaaagctttttttttttctttttttgagacrgagtctcattctgtcacccaggctggagtgcaatggcatgatctcrgctcactgcaacttctatctccagggttcaagcgattcttgtgtctcagcctcccaagaagctgggactacaggcatgagccaccatgacagttaatttttcatatttttaatagagacagggtttcaccatgtttgccagcctggtctcgaactcctgacctcaagtgatccacccacctcggcttcccaaagtgctgggattacagtcatgagccaccgatccccgcccagcataaagctgtttttagatcaccttctataatttaccattgttcttaaattaatggttaagaaacaatatgataatcagtttgtggtggccagttttacattttataagggattttacactgacgatatagggaaatttattgtcatcaaagtcaaatcccaacaatcataaaaagacatgaattagattatataatttcaatgaaaggaccaccttagcaaacatctaaccccttgttactcaggtatcattcacgggccagcagaattggtattatctgtgtttgtcagaaatgcaaactccctagttttttgttggacctccagaaacagaatctgcattttagccagacccmagatgatgtgtgtggcacattaaagattgagaagcctgatcctctcccaattctcacccaatgaaaaaatatgttacatcctctatccactgcttggttaaactgaggttctccataaaaatacttgttatctatatgctatgcaatcatctgtgagtttgagttttgaatatgtgcattgattctctctcacagtgcagcctgggagctctattccaccttacaacaccgaggtgactgagaccaccattgtgatcacatggacgcctgctccaagaattggttttaaggtaaactgcagatgttcctaatctctgtgatacagccctgaagctgtccttgtgkttcccatgtagtggaaacagggtgctcaggagtcaggagacctgggttttgtcacctgcttctgtccatacatctttgactacattgtcagggcctaacagtccttccctgcctacctcactgaattgttggaagggtagatggaggctgcgaaagtgttttgcaaaggataaaacattagcacgaagctgctgcttattgttatcttattttctctatyctttcctgcagggaattacatttcaaaaaaacatgggaaaactttatttgatgtgttgttctaaatgagtgtgaacaagttcacaaaagccagtttagggagaccagttaaactcagagtcacttaaaaatcgcattttcatccaatcagtttcatctccaactgttcaaagcactgagggtgaatctcttaatagaagttaagattaaggtttccctgtggatatctggattcatcttctttaaagtaatgatattagggaagcggtgaatacaaatgaatatgtttaaaagaattccattctttggcatttagtgtgaagagagaaatatttgttatygctggaaatcatgactcaatccccttgatygtttaaaaaaatacaccaaagataaagtttgtaaatggccatatttatgattatgctactcaaatatagaagaactttctgaagagtgccagtataccttttaattcccttaataatgtcatgctgactttcagaagccttatgatgtgtgaaggatctctctagagttgaacactattggataacagtgttacctaagtttttgaaatagaatcttaaaaggattttaaattatgggcatagttattctaattcttctcttgtaatgtatcatcctgcagttgaagctatgtacatatctcttcaaaaggtgtgtttttgcaatacagttgctacaggggctggtgcctttaaatggcaactaaaaggttaattgaatgtgaataactcgttaaagggagagctcagacattccttctagcacacacacagaaaaatagaaatgaactaccatgtgacccacagtccctgtatacgtctggtttgtaacaagagattctttatcaagcaaaacagtatgtaatgacatttctctggaaccttccatyacaagccaccttaaygcagtttggaagatacctcccccacctgggggaatttccagctaaagtatataaaagagtccccaaatcatttcccaataaaagtacactgtgcagtttctgaagagtttacactatttaaagcataatcatagcctcacagcagtaacagkcctctggaaatatttgtccttggtgtttactttgcattccttcctctagctgggtgtacgaccaagccagggaggagaggcaccacgagaagtgacttcagactcaggaagcatcgttgtgtccggcttgactccaggagtagaatacgtctacaccatccaagtcctgagagatggacaggaaagagatgcgccaattgtaaacaaagtggtgacacgtaagaagaattttttcccttttctattagtttttaaaactgttctacttttcgaaaaaagctagtgtcaatatcactttttacttatgagaatggcacaggggagatatcttatccttacttatattattaatgctattcctgaatttggagtagcaggttcaattcatgctttatattttatggcatcagaaatgttctttccatgtcaagaatatttatgaactggcaagatgaaaataatttcaatagtattgcaaaatcattaatcataaaraagtctttgtcagagaattactgctgtccatcatattttcataatgtaacctatatttttatgggagggagggagggagggaagaagcatggaagagagggaggtagggaaggaggaaagattacacaggtcaagagctttgtgtcagctttgacttttaaaatgttctttctgcatagcattgtctccaccaacaaacttgcatctggaggcaaaccctgacactggagtgctcacagtctcctgggagaggagcaccaccccaggtaagtttgggatggatcagagggcaagtatacaccataccttcccaagacaaagattttagaaactgtgtttctttcagagaaagaagggattcaaattacaaatgcttagctctccataaaaactatagcagtacatgatgtacatcatggagcagcctgcaggatgctttaatgcacgttgacttcaatcacaggaagcagaacaaccttacactagtctagggggacaagacagatcctcacacagctgtagggctgaagaaaagcactgtggaaggtggcttttgctgagtgcattaaaaattgccaaacaaatggttgaagtcatattacgtaatttcccttttgtgagttgttacagagcctaagtttattattccctgaagttttatgaatgttttgtcatgggttgcaccacaaatatttaagggtgatgaaaggcagaaataccttcattttacagaataagaaaactgagacttagaaaaaattggcctactcatagtcacacattttaaatgttacaaaactgggattgtaacttaagtttgtagactccttctcacacccaatgtcacatatttggaatgtaatttttttttaattatattctatgcaaactgaaaattctgattaaggggtttcctgaccatttttagagctttaaatgaagcatttgtctaaattccttgttcacatatatttgaaaattatttataaaatgctaaaatgtataaagatagttgttaacaatattcaaacagcatgaygtactatagcaataacaggaaattttagatacccattacttttgccaaaaccacatggaagtctcaacaaacctatggagaaaaatcttaaacaaaaataaaagttccaattaatgttgattgcattcttacctcatatacttgttaatttaagggatatgtttaggttattatttagctatttctaattttactgtaaaattcttgtgaaatttttgtttaaaaaaaagtattatatagttcttatctttgccggggcacagagctaaggctatcatctctaaatctgattaatgtatgcaaacacacagaatgaaactagctcagaatatctcttttaatctccctctgaagtagagtgattttggtaaagttttcattatctgcggaaacattgtttaagccaaagctatacaatttccagctgagttgctctgaatttgaaactttaagttgacaatcttcgtgcttgttagcagcaggatcattaatatctcgtctcaatggcccagcccacayatatggatgaycactagcaagtgtaatgatctcaatatttatttctcattcagttgggtttccttgtatttgccacattagtgtttaccctgttcctaatggcaaaatattctgtcatctccttgccttttataaagtttaatatactttctcattttaatctgtccccacagatctctagtcatcactgtttttatttgaatgtctctcatccctctcaactcttttactgcccaatttctgtgattcctgaagacttcaacaatcaayactctctttttttgtttgttttgtttttttttttgagacagagtctcactctgtcacccaggcttggagtgcagtggcgccatctcaactcactgcaacctccgtctcctgggctcragcgattctcgtgcctcagcctccccaagtagctgggactacagacatgcgccaccaagcccagctattttttagatttttagtagagacagggttttaccgtgttggccaggctggtctcgaactcccaacctcaggtgatctgcctgcctcaacctcccaatcaatactctttctagaataagtatcascacttttgttyctcaccttttctcctttcttggttctcttcctataaatcccatagtttcagaccttttaaattaggagagctctctggggaatgtgcttaaggtggagarcgattctatactaggcaggtagaaaggaatattcctcagctgtcttcaaatgattcattaaggaaaagcagggtacagtgataggaccatgagatttggaaacaaagaaagctttggggaatcactcccctggttcaagatttcctttaaagtgaggatcttggcggaggttgaagtgagccaagatcacaccgctgcactccagcctgggtgatagagggagactgtctcaaaaaataaaaataaaaaaataaagtgaggatcttagtactgcctgaaaggattgttgcaagcattgaataacagtgacagtggagtcctcagtaaatgccaagtcctgcattccgccctgtgaatccatcattggagtctagttaaatatgctctggctcacagatyctctgtgcaataacttcccttttcttttttctccagacattactggttatagaattaccacaacccctacaaacggccagcagggaaattctttggaagaagtggtccatgctgatcagagctcctgcacttttgataacctgagtcccggcctggagtacaatgtcagtgtttacactgtcaaggatgacaaggaaagtgtccctatctctgataccatcatcccaggtaatagaaaaataagctgctatcctgagagtgacacttccaataagagtggggattagcatcttaatccccagatgcttaagggtgtcaactatatttgggatttaattccgatctcccagctgcactttcyaaaaccaagaagtcaaagcagcgatttggacaaatgcttgctgttaacactgctttactgtctgtgcttcactgggatgctgtgtgttgcagcgagtatgtaatggagtggcagccatggctttaactctgtattgtctgctcacatggaagtatgactaaaacactgtcacgtgtctgtactcagtactgataggctcaaagtaatatggtaaatgcatcccatcagtacatttctgcccgattttacaatccatatcaatttccaacagctgcctataaaatagttttgtccctgtatgtgagcactgaaacagcatttggttgacacatctagtttttcatcttgcagtttcaaatccttctttttgaaaattggattttaaaaaaaagaagtaaaagtcacaccttcagggtgttctttcttgtggcttgaaagacaacattgcaaaggcctgtctaaggataggcttgtttgtccattgggttataacataatgaaagcattggacagatcgtgtccccctttggactcttcagtagaatgcttttactaacgctaattacatgttttgattatgaatgaactaaaatagtggcaatggccttaaccttaggcctgtctttcctcagcctgaatgtgcttttgaatggcacatttcacaccatacattcataatgcattagcgttatggccatgatgttgtcatgagttttgtatgggagaaaaaaaatcaatttatcacccatttattattttttaaccttcttcatgcaagcttattttctactaaaacagttttggaattattaaaagcattgctgatacttacttcagatattatgtctaggctctaagaatggtttygacatcctaaacagccatatgatttttaggaatctgaacagttcaaattgtaccctttaaggatgttttcaaaatgtaaaawatatatatatatatatatattccctaaaagaatattcctgtttattcttctagggaagcaaactgttcatgatgcttaggaagtcttttcagagaatttaaaacagattgcatattaccatcattgctttaacattccaccaattttactactagtaacctgatatacactgctttattttttcctctttttttccctctrttttccttttgcctycccctccctttgctttgtaactcaatagaggtgccccaactcactgacctaagctttgttgatataacygattcaagcatcggcctgaggtggaccccgctaaactcttccaccattattgggtaccgcatcacagtagttgcggcaggagaaggtatccctatttttgaagattttgtggactcctcagtaggatactacacagtcacagggctggagccgggcattgactatgatatcagcgttatcactctcattaatggcggcgagagtgcccctactacactgacacaacaaacgggtgaattttgaaaacttctgcgtttgagacatagatggtgttgcatgctgccaccagttactccggttaaatatggatgtttcatgggggaagtcagcaattggccaaagattcagatagggtggattggggggataaggaatcaaatgcatctgctaaactgattggagaaaaacacatgcaagtattcttcagtacactctcatttaaaccacaagtagatataaagctagagaaatacagatgtctgctctgttaaatataaaatagcaaatgttcattcaatttgaagacctagaatttttcktcttaaataccaaacacgaataccaaattgcgtaagtaccaattaattataagaaatatatcaccaaaatgtaccatcatgmtcttccttctaccctttgataaactctaccatgctccttctttgtagctaaaaacccatcaaaatttagggtagagtggatgggcattgttttgaggtaggagaaaagtaaacttgggagcattctaggttttgttgctgtcactaggtaaagaaacacctctttaaccacagtctggggacaagcatgcaacattttaaaggttctctgctgtgcatgggaaaagaaacatgctgagaaccaatttgcatgaacatgttcacttgtaagtagaattcactgaatggaactgtagctctagatatctcacatggggggaagtttaggaccctcttgtctttttgtctgtgtgcatgtatttctttgtaaagtactgctatgtttctctttgctgtgtggcaacttaagcctcttcggcctgggataaaataatctgcagtggtattaataatgtacataaagtcaacatatttgaaagtagattaaaattttttttaaatatatcaatgatggcaaaaaggttaaagggggcctaacagtactgtgtgtagtgttttgtttttaacagtagtacactataacttaaaatagacttagattagactgtttgcatgattatgattctgtttcctttatgcatgaaatattgrttttacctttccagctacttcgttagctttaattttaaaattacattaactgagtcttccttcttgttcgaaaccagctgttcctcctcccactgacctgcgattcaccaacattggtccagacaccatgcgtgtcacctgggctccacccccatccattgatttaaccaacttcctggtgcgttactcacctgtgaaaaatgaggaagatgttgcagagttgtcaatttctccttcagacaatgcagtggtcttaacaagtaagcagttgaatgtatctgttccataaatattaacctagagcatagcaaatgaattctaaattctcaagtaggaggagctaagagcaagagagctgcaaccaagctacaaactaaactctgaattsaatgcmcagctccattaattttgaaagatgtaatgtttgttgctatcttaatatacttttgatatctacagctttwaaaaaatcatagtggaaaaacacctgcaggaaagttccatgacttcaaacaaattctgcttctaaataagcacgtaaaaataagtgaatatcaagagaaattatatgactaaatctaaatctttagagaaaaaaatgagaactgaaaatagtgtcaccatatgtgctttattctcatttttataaaaaaagtgtcagcagttgattgatttaggatttgaatacttagaaaagtgactgattgtttggtctagattagaatgttgttgtgaagagagtcagaagtttaatttgtacttcaaaaagaatctgttagaaggatttctcagaagactgagagcttagaaaaaaaactgacattaaataaataacaacaatttatggaaattgtctctttctagtcccaaccattatagaatagacatcttttgttaaagaataaaacagtaggctgcaagatggtgctgtgtttcacataaacagtgctttttattattttcactgtaatagtcaaatatataacaacagcaaaagattctacataagggaaaaatagcttacatttaggtacattaccaagtattagtctgaaaacatctacctttcaaacataatttagataatgaaacacaaagaagagcagctcagcgtgaccataatcttggtttcttactttgtggctgagggcaagaatatctttatattggcatatccaccaccccagggctgttgcttctgtmcaccctggaatcactaattacagcatcacccagtatacaagcccctgcatcacaatgtctgtcccttagccgtagacctgtcacatgytaatcatgtgttctaagaccttattataatcctaatgctacagatgacctcarggtagcccctctccctcctagcaaagtcattattatcctcttttaaagatgaagcaaaccagtgcagtggctctcgcctgtataatcccagcactttgggaggctgaggtgggccaattgcttgagcccaggagttcgagaccagcctgggcaacacagtgagaccaagtctctacaaaaaatacaaaaattagccgggcatggtggtgcacacctgtggtctcagctatgtaggaagttgaggtaggaggatcacctgagcctggggaggttgaggctgcagcaagccatgatcgtgccactgcactccagcctgggtgacagagtgagaccctgtctcaaaaaaataaacaaacaaataaacatgaagccgtcgaggtccccagcagttaagtaaattgccactggccagctagtatggtggaaatggaatccaggcatctggtcctccattctggcacttttccaaacttttgtagggggctttatagaaacgctgaagggcaaatggtgtgcaggggaatgagggtttagtgagtaggagttccaaatttagaaacctcactctctgtatcttttagatatacaaatatttaccatatattacagttgcctctagtgttcagtacagtaacatgctgcacaggctcatagcctaggagcaataggctagaccacatagcttatagcttaggtgtgtcaaaggctctaccatctaggttttttgttttgttttgttttgttttgtttttgagacggagtctccctctgttgcccaggatggagtgcagtggcacgatctgggctcactgcaacctccaccaccaaggctcaagtgattctcctgcctcagcctcccgagtagctgggattacaggcgtgagccaccacgcccagctaatttttttgtatttttagtagacgaggggtttcaccatgttggccaggctggtttcaaactcctgacctcaagtgatccaccctcctcggcctcccaaagtgctgggattacaagcccatctaggtttgtgtaggtacactctatgatgcttacacaataaaatcaccaaatcacacacttatcaaaatgtatctccaccattaagctatgcctgactgtgtatcaaaatggaagaagaagctgggcacagtggctcacgcctgtaatcccagcactttgagaggccaaggcgggtggatcacaaggtcaggatttccagtccaagcctggtyaacacggtgaagccccgtctctattaaaaatacaaaaattagccaggcatggtggcaggcacctgtaatcccagctactcaggagtctgaggcaggagaatcacttgaacccaggaggcagaggtttcagtgagccaagatcacaccactgcactccggcctgggcaacagagtaaaacctcgtcaaaaagaaaaaataataaaaataaaaaaaaatggaacaagatactcagggatgtatatttaattttttaaaaaatattctgctctcattttaatatggcagaaccgattgctttctaagtgtggcttttttccagtaaaggttaattattaagaccactagtcctgscctgggtcaatcccagtatgatcctgggcaagtaaattaaagaagataacttctctgtgcctcagtttttttttgttttgttttttgttttttcatttacaaaatggagataattgtagtaaatcaaatttttagaggtgataggtttgttcatttcttgaatgcggtgatggtctcccaagtcacacatatgtaaaaacccatcactttaaagatatgcagtacgttgtatgacaagaaattgcttttaaaaggagcaaactaccttccagggttgttgtgaggcataaatggcaatccacagcaccacagcaaggattatcatgtgccctccagagacatactctcaggtggatgcgagaaatatccagctgttgcagcaacttcatcccactcgaaatccagctgagtcacactcacaggtggaatggagggcttcgagaggccatggggcaaggtgacccttccttatcatctaattacagaccttctcaaggtctgttcactgaacacttcgctgtagtgttcacttaggtgtaagtaggctataggactggacatttggatatttcatcagttcaaatagtcctgggcgtgctttagtttctcatgcttttgagcagagttttaaaataagcccsatttgcccctacagatctcctgcctggtacagaatatgtagtgagtgtctccagtgtctacgaacaacatgagagcacacctcttagaggaagacagaaaacaggtgagtggtgttggcagtatgactatccagtagcttttgcctatcaattctgtataacaaatgaaatgctacttctaaaaatacatctccattttttgttgtcatggtgtgtgtacctttgtcatcacagtatgattttatcgctggtctcaaaaactaaaagataccttactcaacartcacctagactttcagtcactaacaaattaagaaatttgttgtctgtccttttaaaaaacattttctaagaagatctttgttatttagatttagcagacattccttttcattaggcagctctgtctaatggctgacccaacactcattgtcatctatttgtcttcctttactaagccagcaagtttacattttctttttacttaataaaatatgcatttactagaaggaagttgaattgaatctcataaatattacatacttaaatatgaatgcttttaattttttctttcaaaaggtacactttagtgtattcattaatttatttatagtccacttgcttccaaaaaggacttatgatatcttagtttggtttcttattgaaaagaactagtaaatgctgtaactgaaacagaaatttgctggaagtcccagagactaagtgatttgaatttgcaacaaactctgaatttttgtgcatttttgaaaaatgcatttttcaaaactgtcaattcacgaggaattatcagcattgtaatttgtctgggataatgtctttagtttcagaaagttttgtgtttggcatcattaccactctgttgacatataaatttcctcttgagcttaggaggcttctctgagagtcaaacatttactttgagagtgggcagatcttgctttacttggaaggatacacttacaggatagaaacacagaatacttgaacactgaagaatttgaaaatgtcaattctcagaagatcttgaacacttatctccaaatgtgacacagaaacttactgtaataacccctaaaatctgcttgaattacttagcacaagaaaaaaatgaatgcttgagctggctattttgaattgagtcaatttaagattttaaaattcatatgtagcttagaatcagtacatcttactctttggtttatggcaaatcatggtattgatgagacaggaacgaaatgttggatgtacgttaatttcccctacaccttcctcacttcctaaactggtggtgtcttttcttttttttttctcttcctccccygggtgggaaaaacaggtcttgattccccaactggcattgacttttctgatattactgccaactcttttactgtgcactggattgctcctcgagccaccatcactggctacaggatccgccatcatcccgagcacttcagtgggagacctcgagaagatcgggtgccccactctcggaattccatcaccctcaccaacctcactccaggcacagagtatgtggtcagcatcgttgctcttaatggcagagaggaaagtcccttattgattggccaacaatcaacaggtaacttttcttgtctgcaaagaaactcagaagactttcctacccagttggtagattctgtaaagtagcttgctgttgtctgtcatcagctctcaaaaaaaaaaaaaaaaaaaaaaaaatagatcattgtcatggtacatggagagggaagtgagaaaatgtggagaaacatcttccttagaatatggtaaagaagcccgggcgtggtggcagtaaagaagataatttttttcctctcaagaaatttctcacctgatttgggtatttatgcatttctaataacacaagttttgttgaaaatgtaraaaattggccggacggggtggctcacgtcagtaatctcagcactttgggaggccgaaatgggcagatcacttgaggtcagaagttcaagaccagcctggccaacatrgtgaaaccccatctctactaaatatacaaaaattagcaaggtgtggtggcatgcacctgtaatcccagctactggggaggctgaggcaggagaatctttgaacctgggaggcgaaggttgcagtgagctgagatcaggccattgcactccaacctgggtgacagagcaagaccctgtctcaaaaaaaaaaaaaaaaaaagggccaggcgcaatggctcacgcttgtaatcccagcactttgggaggccaaggcgggtggatcacgaggtcaagagatcgagaccatcctggccaacatgatgaaacctcgtctctactaaaaatacaaaaattagctgggcgtggtggcatgcacctgtagtcccagctactcaggaggctgaggcaggagaattgcttgaacccaggaggcggaggttgcagtaagccaagattgtgtcactgcactccagcctggtgacagagggagactctgtctcaaaaaaaaaaaaaaaaaaggtggaaaactgaacactgtttcaaagtacctttaaaaatataattttagggtaatagtgtcattgttcttagcagatagaggctgaagtacttacgggaacagtagcatcatgttatctgtattttagtctcaagtcgtcaagccagagacaaatacctaagggaagggtatataggtgttcattgtattacttttttttttttttttcttcctgaaatggagtcttgctctgtcacccaggctggagtgcaatggtgggatcttggctcactgcaacctctgcctcccaggctcgagcaattctcttgcctcagcctcccaagtagctgggactacaggtgcccgccaccacgcccggctaatttttgtatttttagtagagatgggattttaccatgttggccaggctggttttgaactcctgacctcaaatgatccacccgccttggcctcccaaagtgctgggattacaggcgtgagccaccacgcccggccttgtatcacttttttttttttttttttttttaacttttctgtagttttgaaatttttccaaataaaatgttgagggaaaaaaactcttccccaaatttgaaataatcattttatcacaatttgaatgggctctgtaaccccttatcttgaattcgtcataatataaaattctgctaattacacrtagtatttacatgattgtatggaagaatcattaagacaattatctggaaaatgaacaaacagtaaatctgaatattgtttgaaaattacggatgtgaaaagtttcccttttttttctagtttctgatgttccgagggacctggaagttgttgctgcgacccccaccagcctactgatcagctgggatgctcctgctgtcacagtgagatattacaggatcacttacggagaracaggtacagcagtaaaatgctattttacactctgattaaatcagattctgttgtggataacctgaaagcccaacagtgaacaaagaattaaagaaactttggcaagtccattcaacggagcccttgttttttccaagaaaatacgtaagatatagatgatataatttgttctaaaacccaaataaaaagttgtttatatactacaactagagggggaacggcagagctgaggaaataaaaggattgtaaattcacaaacatattatcagtggtggaaataagtgatttttattttttcttctctttacttttctgtattttccaaattttatttaaaaggaatgtattctgttaaaagttttaaaaaggacacaatgcatgcaatcctgggttgagggcttaccttctcccacttctaatgctactctactactcagtgacattttaaagctgaaatgttaaaacagcgctaactgtaattttctctcaatgtttatacacttaccaaggtttgctacatgcataaatacccctttctgttcaagatagcgctctttaaaagggaataagcaagaagatgtgatttacatgctgctataaatgtggtaattcaattaatcagtaatacccaagtagctctaaacccctcacactctgaactaaccctttttcatacaggaggaaatagccctgtccaggagttcactgtgcctgggagcaagtctacagctaccatcagcggccttaaacctggagttgattataccatcactgtgtatgctgtcactggccgtggagacagccccgcaagcagcaagccaatttccattaattaccgaacaggtacaaacttctactctggggtgacaccagcttttacttattcagatactgttttgcaatgttctcccaaggtatttttctaattgtagaatagattttcctttttaatgagcaacaacctgcagctagcacctgcrgcgaacagagttttgagccagataaagaaggaagcaccccaagggcaggaagttcagtcagttttgtcgatatattccgcatgtctgcaatacgacaggcatagagagtgttcagtaagtatttgtgggaaaagaatggatgagttgataaagtaggaagagacacctgcttgtggaatgtagcttctttgtgaatgaagcaaccatctcaaaaataggaaatggtattgagatgcctgccccatccctctaaaagctctctctgtattctttcgagaagaaatacctttctcatgtaagmgatcattcgaatatgtaccagacctagagaggaggacttgtccaatcttgtctccaaggactggggcttcactggtttctccctgcttttatttgtagaaattgacaaaccatcccagatgcaagtgaccgatgttcaggacaacagcattagtgtcaagtggctgccttcaagttcccctgttactggttacagagtaaccaccactcccaaaaatggaccaggaccaacaaaaactaaaactgcaggtccaggtaagaatcatctgcatctcggccaggtgcggtggctcactcctataatcccagaactttgggaggctgatgcgggcagatcacttgaggttaggagttcgagaccagcctggccaatatggcgaaaccccgtctgtactaaaaaatacaaaaaaattagctgggcatggtggcttgtgcctgtaatcccagctactcaggaggctgaggcaggagaatggcttgaagtctggaggcagaggttgcagtgagccaagatagccccactgcactccagcctgggtgacagagtgagagactccatctcagggaaaaaaaaaaaaaaagagtaatctgcatctcatatacaacaggatagatggggtaggaccacctaatattcttttttatataaatggctaccttgttgtgagtactatgtatttttttgtcctatgtcatcattgtccccattcatgagttcagggctcaagatcattatcaacccttttcacagtagaagtcttaagtgcatttctgtttttacatggatagttctatttagtgatatggacatcttaaattactagattcacccttctggttttgtttatcattcacactaagaagagataaatggcctaactgactttttcagctctttttagctatgttgtctttgtttttaaatagaatacttgtgaaattaggatcttaaggcaatttattagagtcaagttaattttcattttttctgagagcagtatcactaattgttgggggcatcatattaagttttagatcttatccttgagtgtgacttcactcccatatggtaatttgtattagcaatgaacaggtttgtccaagaggaaatcaaagtctgactctccatatttttgttacaattctgcaaataaaaattctaggccaccatatgtttactaccaaactctagacgccacttgaggactttatagtggatgacgtggatgttgcatttgcttttcactccctttgcagatcaaacagaaatgactattgaaggcttgcagcccacagtggagtatgtggttagtgtctatgctcagaatccaagcggagagagtcagcctctggttcagactgcagtaaccagtacgtaaccactkcttggtttccattttcaaagtcaaattttgttcttgggtgtctgaatgcccacgacatgtcttttgcaattacacatagggaaagtgaacttgttggttagtttatgtcttgagctgagccctttacgaacatcttttttccttctcagtgccaagcgaggaatttacagagaaagaagttgtgaaaccaccatagttagttgctgtgctttgaatttcttttgctcaaatggcctcagcgaaatcttatttgcctatagcawatctacaaaaaattttcctagaccgtcttttctacaactggatggtaaagttgattgaagtgtgcctcatgtagctttatgtttggggcatttgaagggctatggctggaccagagtgtaatataaatgcttaatagagaggggaaaagaagagtgtaagaaccattatagggctgggctcacgcctgtaatcccagcattttgggaggctgaggcaggcggatcacgaggtcaggagttcgagaccagcctgaccaacatggtgaaaccccatctctactaaaaatacaaaaattagccagtcgcggtggcacgtgcctgtaatcccagctactcaggaggctgaggcagaagaatcacttggacccaggaggcagaagttgcagtgagccaagatcatgcctctgcaccccagcctaggtgatagagtgagactccatctcaaaamaaaacaaaacaaaacaattataacaatttgaatctgacattgcaaatcagctttaccacttccaaggtatagaaaatccaggtctatgagactaacatcacattgtaaaaatcaaatcgtggtagaatayctttaaattaatataaatacatccccattgtggggacattttgcagggtatctgcttatctcacatacacctatgttttaataagtgatgcaacattgcatattttctaaaccaagaaaaattaagcaagtgtttaagtgatttttccttttgatagtgggttaattggacttcatcaaagaaaatggtatctgcaaaactgctttgcatgttataaaaatgcttatttcacaacttgcttttcacataacctcttaccattaatttgcctaacagacattgatcgccctaaaggactggcattcactgatgtggatgtcgattccatcaaaattgcttgggaaagcccacaggggcaagtttccaggtacagggtgacctactckagccctgaggatggaatccatgagctattccctgcacctgatggtgaagaagacactgcagagctgcaaggcctcagaccgggttctgagtacacagtcagtgtggttgccttgcacgatgatatggagagccagcccctgattggaacccagtccacaggtatatggttaattgcaccaccaggtgcccatgggagcagcggctttatgccctactgaatgaattatgcttcactgggctattgattcccgtgtaagggtgaaaaagaattattaggaaagatcctctttaaagaggaatrgtaagaaacaataaaacttaggtgatatttaaggaaacaagtcwgattaaaagaaattttggagtatcctggcttatacacaagaccataaagcaagacatttgaagaggatactaaagttgtggattatttcctaagctctgactccctgtgattaccctcactatgtataaagaaaagaagtttggcattacagagcttacttataaaaaggaacccaaactcgggcatttcatagcagcatgattctgagcacacgtgggtaagacctttcttctctggttagatatcatatgctggtgtataattagcttaaatgattgtgatttagacacctaggaaataatcaatagggcaattgctttccataatactttatcttcttgtgctttatttctgaagcagagtagaatgctaaagatgtatcctagtgacagcataaaccctagaggtgacagtctgtattattgcttttcgcttctcttttctgcttctgttgggagccagttttcttcttacgccgcattacagagagaacgtcaaatttagcagccatatctgccatagggtccaaataaagagacaataaaaacattattctctcttttttggatggaatactgcgtgaaatggttatccatacaaagatactttatgtagaatagaaaaaggaggccgggtgcagtggctcacacatgtaatcctagtgctttgggaggctaagccgggagcactgattgaggccaggagttcatgatcagcctgggcaatgaagtgagaccccgtctctacaaaaaaatatgaaaaaattagcgaggtgtggtgacacatgcctgtagtcccagctactcaagaggctgaggtagaggatcacttgagcctacgagttcaaggctgcagtgagctatgataactccactgcactgcygcctggatgacacagagagaccgtttctaaattaattaattaacaattttaagaaagaaaaagggccattgcttatttttccatacaaaagtaaaataaatcataatggccaataagccaatgtaacttttttttttaagggaaagcaaaacttgtaaaacctaaaatctcttagagttttggcatttacccaaatgttttcagtgattctgagaattggtggatataaaacacatttctcagcaaacactttcttcattttgcatcccttactgtactttcttgtactgaatctttgcttgaccagggaacccacctagcccaacaagaacaatccattctacttcttggaactcactttattttccttttcccccatttcctataagataacctctaaccaatgacaatctcgacagctattcctgcaccaactgacctgaagttcactcaggtcacacccacaagcctgagcgcccagtggacaccacccaatgttcagctcactggatatcgagtgcgggtgacccccaaggagaagaccggaccaatgaaagaaatcaaccttgctcctgacagctcatccgtggttgtatcaggacttatggtaagacatgaccgttgttcrttggaataaagatggagatcatctctaacacagtttctaaggtggtgaaaatataatatcataataaatctaactgttcttttcctctgcatcaaataatcttattgtaattttatatcaacggaattcctttatgttgacctaagttttccagatgactattgggacagaattttataaayagctttggattttgtgcagctcttttagatgtattgtgcttattttaaaaggttgtggggggcaatttacatatccattggttgaatgcataaatcgacttagttatgcattttctgagctctgttaccttggtaaagaatattttacagtttgtaccagtctaccttgagcctaccctcattaaaacattttaaaatccttccagacatacatgcagaaaactgctaggaacctaggggactgatgtacctcttaacataaggccaatttcaggggaaactacagaaagagggttcagagacaaaatggaacattctctttgcctctctatgataaggaaaaaattatgatttacacctgtcagatcataaaaaagaaaaatacgctaatacccacttttctcattttttttaccagcttagtttaagtatataatctatggcttacttaagcttaaccgctaagagcattttaaaattgataaatacatttatcacctgcactgtaggaatgaaattaatctaggaattttcaaggttgtgggttttgctggtttgtttattttttattttctaaccattgcatttacctaatgctgtagtgaaactccttgggtttcagttgaggacgttgctaaagctcaccatgcccttatttctctaggtggccaccaaatatgaagtgagtgtctatgctcttaaggacactttgacaagcagaccagctcagggwgttgtcaccactctggagagtaagtaacaaaatgtcttcatatggacaaaccttctgtatagacaaaaattaaagaatggtaaatcagtggggttcagtggctcatgtctaaaatccaagcactttgggaagctgaggcgggagcgtcacttgaggccaggagtttgagacctacccgggcaaatagcaaggccctgtctcttaaaaaaaataaaataaataaaataaataattttttagatttatatgttaacagtggaatgagtcctaatttgaaaatcaatttgattgcctttttgacgcatgactgtcatcttttatactccttcagaaaggggtctactgacccataaaatggaatcacttcataagcttataatgttgatattatggactatgactgacatctagtttatgctctacttgttagaatttgttttcatagagctaagcttggggagaccactggcttctgctatatcttaacaatgcatattaggccattcttgcattactataaagaaataccggagactgggtaatttctaaagaaaagaggcttaattggcccacaggccagcaggctttacaggaagcatggtgctggtatcttcttggcttctagggaggccttgggaagcttactcatggtggaaggccaagggggagcaggcacatcacatggctgtggcaaaagcaagaccgagagagagagagagttggggggggaggaccttatacatttaaatgacccagtctcttgagaactcactgtcataaagagggcaccaagccacaagggatctgcccccatgatccaaacacctctcaccaggccccacctccagcattggagattacaactcaacagagatttggacagggacaaatatccaaattatatcacagcacagtaaccattggaccaaatcaggcttagattctagtcttctgttatatcaataccttgatgtatgccttttcaaaagtcaggtaaagtgtcaaagttttatcatttataaaagagggatggcattgtacctgttgagagaaaatacaaaatacttgccgtaatattagacacacacacacacacacacacacactctcwctctctctyacacwcacatacacacacacacacaaaattgttagctggccatgttattgtaactcctaccacacatatttttacattataatacattaataattttaatatttattgaagtatttgtagatactataaagccagccctgggaaccactggtagtatctataaagcttttcagctcttcaaaataaaatgtctgagaggtagawattttcctattttctaattacagttgacctttctctctgaatrccaaaggagrtaatctacacattactagttatatatttcttgaaatggatgaatttgatatataccaaggaaacgttttaaaataccaaaactttacatrgatgagccaagcaggcactaatctctagctatgctcctgtgcagatgtcagcccaccaagaagggctcgtgtgacagatgctactgagaccaccatcaccattagctggagaaccaagactgagacgatcactggcttccaagttgatgccgttccagccaatggccagactccaatccagagaaccatcaagccagatgtcagaagctacaccatcacaggtcagggaactcattgcactaaccacatttgttaacaaatacccacaatgtaaacgggcttattaactgttctacgactgacactgataaaatttattttcagtgttatcatcataacccagttttagaacgttattttcatgctatgatcagaaatagttttgtcctttgaatgcctgattttgtgtaatatttgtcatggaaattgcgtaagtgtcaatcaacaagtttgatcttccatcattgtgccctttcttatttaaaaaattgtaacataaggtttaaaactaaaagaaataaaaaacagtgatgtatagatcttagcattaaaaagcatagttaatataaaagtaaacaataccacttaataaaggccaaaattgtaaccgaagaatattcaatatctgaggtcttttttagctttttaaaattgtgattccaaggctcaactattgaccatctgattacggtaaagagaaaacctcaataagtggctgacccccattctgcaagagggcctcttccaacatagcatttttgcattccagaatttactttaccagtgtccttgtctgtatcagtgattcactttcgagatatgtttcttgttaacagttaacatccatagcatgctctmctttactgttcaaatgtggaccactttggtagtctatataaatatgggatgatagaagaacccagaaaaattgcaggctagcttgagaattctcctagtaaaaagcaagaactgttaaaaatcatctcttctcaaatcccaggtttacaaccaggcactgactacaagatctacctgtacaccttgaatgacaatgctcggagctcccctgtggtcatcgacgcctccactggtaactataccttctactgaggaaatgccattgacttgtatgcaatcagtttcatgaactcaaaaaacaaatgtgaggcgtatatttttgtattatagattccagagaatcttgtttccggtttacagtattctcagattcttttaagtgtgtttagaacggctcgggagaaaagtgtgggagtaattttcttggttatttgccttcttagagacttaattttgttttctttcagccattgatgcaccatccaacctgcgtttcctggccaccacacccaattccttgctggtatcatggcagccgccacgtgccaggattaccggctacatcatcaagtatgagaagcctgggtctcctcccagagaagtggtccctcggccccgccctggtgtcacagaggctactattactggtattgctgcttccatgctgtcattttccttcttactacctaggacacatgaagtccttagcaaactcccacagcgtctttgatactgtgtcatgagaatgcgaaactctgttcctgataacctcaaaaagcattctctgtgtaggagtggtagagcctaatacatcccaaaaggcatgagtgaaggaaaatgcaatttcaagactgtactaatggcatgactagactcatgttttcctttcgctgcaagtttgccagatacctgtcaattcagtcctggagaaagatatttttcaaagcatactagctgattgtgattctgtcattacactcagctctctatagatatggcaatcttgcaggacttgccagtgcaccacctgccattgaccttgttgaccactatcacaggataggtcttgaggcagagcagtcccaaccacccacattggaagaatgcctggaatggggaataagagttgtctaccttggtgggaaagactataagcctctagtattatttttgcccaagagatgaaatatttaaactatctgtattagtctgttttcatactgctataaagaggtttaattgactcacagttccgcatggctggggaggcctcagaaaatgtacaatcatggtggaaggaaaagcaggcatgtcttacatggcagcaggagagagaagcacacaggaggaacttccagatacttacaaaactatcagatcttgtgagaactcactatcatgagaacagcctgggggaaccaccccatgatccaatcacctcctctcctcaatacatggggattacaattccagatgagatttggatgcagacacagagccaaaccatatcagtctgtatagagtatcacctggactttaaaattcccacagaacatacagacattagaaggagacactggctttttagaattggggggaacaggaaaatagaagcagacatgagaggaattgaactagacacttcccacagaggctgcacaaacactggccaatctctcctacccttcacttgcctttagtttcacttttcattgatctgccactgaggactgcttggttattaggcctaagtagattcatgtatataatctgcaggactctctttcaaatttatattccagtggtggtatatgatgctgatagattttcttaaattcaaaaaggcaaataagaccacgttaaaagaataccctggaaaggccaggcgcggtggctcacgcctgtaatcccagcactttgggaggccgaggcaggcagatcacaaggtcaggagatcgagaccatcctggctaacayggtgaaaccccatctctactaaaaatacaaaaacaaaattagccaggcgtggtgatgggtgcctgtagtcccagctactcgggtggctgaggcaggagaatggctgaacctgggaagcggagcttgcagtgagccgagatagcaccactgcactccagcctgggtgacagagccagactccatctcaaaaaaaaaaaaaaaaaaaaagaataccctggaaaagttagccaaaaaatgtctattcaggcgtcagatatgatagtaagataattagtttgcgaygcggactttatatgcaggatatttgggtgtttatggaggaaaagtgaagtcgattttaccttcaagaggccaacagccagctggagaggaagtgcctgctcccagtagcgtctgctggtgagaccgacttccacttgactagctgagcccattgacataatgtgatggttctattctcccttcaggcctggaaccgggaaccgaatatacaatttatgtcattgccctgaagaataatcagaagagcgagcccctgattggaaggaaaaagacaggtaagagtatcttgcaggtaacaaggagaaagataggacaaaactaataacaaatgagcaatcttgcaatatgaaaaggttctccatgttttgatgcatttcttgtgatttttttwatctaacagcatagtgtatatattgtattctttaataggagaaataatttaacatgcactgcagagtttggttttattttttttctttactacagccactcaatataaagccttgttattcaccttttaaaaattcaaacaagatgttaaaatgtaaaagaagagctatcattgctcttcttttataccttctgttgaattttaaaatgtttccttttttaaaggagggagagaaacctctcacatttatctttatttggtttctacaacttagagctaaataatgtcttacttttgcatccagtttcagttaatttcaagaaaatgtgtattcctgatataggaaaatttcaaaaatgaacatgtgtgttttatctatttttaccatttcaaaccatgaaaaactgttgagccaaacctctgtaattctcatacttatgacactgatatgattagtctggattctacttcctacaacttgcttctcaaatttaaaaaagaaagagagaaagagaaagactgcacatttcagttccattaggtctaatttgagcagaggcagcttctacggggctcagcggtttaaagctgtgtgtatgataaattcatactaacacttttttctttctaaactataaagaaacctttgagaaaaatcctaaagatttctttctggaaaaagtgttttgtgatctcagaactgctcattttctggtggcttttatcaaattgatgaacagtcattgttgcctgaatcgattattatcattgctgctacttcctggagcttaatgcgctttgcttttttggctctaacctctctcggctagacgagcttccccaactggtaacccttccacaccccaatcttcatggaccagagatcttggatgttccttccacagttcaaaagacccctttcgtcacccaccctgggtatgacactggaaatggtattcagcttcctggcacttctggtcagcaacccagtgttgggcaacaaatgatctttgaggaacatggttttaggcggaccacaccgcccacaacggccacccccataaggcataggccaagaccatacccgccgaatgtaggtgaggaaatccaaattggtcacatccccagggaagatgtagactatcacctgtacccacacggtccggkactcaatccaaatgcctctacaggacaagaagctctctctcagacaaccrtctcatgggccccattccaggacacttctgagtacatcatttcatgtcatcctgttggcactgatgaagaacccttacaggtaattaattgttctcttcacttctcatggggcagcacagaaaggaataagttaggtaactgaagtgaccagccctcgaataaaaagtggcttcatggctgggtgtgatggctcacgcctgtaatcccagcactttgggaggccgaggcaggtggatcatttgaggttaggagttcaagaccagcctggccaacatggtgaaacctcgtctcttgaaaaaaaaaaaaaaaaaaagtggctccacttttagaacctcttagaagatggcacatttaagccctgcttttttttttttttaaatcccaatatggctctactttggaggacataccagagagtcactagcttttatttcatagagaaaatgaaactatttctcttattctcacacatttgaggttcctttttgagtaagatagatgattctagaaaagaaagatattctacctgaatttccatttgtgtgcagaagtctaaaacactacctttacgatttgtccttgaagaaccccactatctacaacatatctaaagaaaaaaaaaaacaggcgaagctgtgcatagcagctgataagtgattgattctctaaaacgtatattatttaatttgtgttgacagtatccatttttttttttccccgagatggagtcttgctctatcgccctggctggagtgcagtggcgtgatctcggctcactgcaacctctgcctcccaggttcaagcaattctcctgcctcagcctcccaaatagctgggattacaggcatgtgccaccgcacccagctaatttttgtatttttagtagagacggggtttcacgatgttggccaggatggtctcgatctcctgacctcgtgatccgcccgccttggcctcccaaagtgctgggactacaagcatgagccacccactacacccggcccactgacagtatcaatttttattgtgttgttacttttagaaagtggcagaatttaaaaactgacaacactgtaggaaatttatgagcttagaaacatgagtttgaggatttgcccaactgttttaaggactccacactggggtcagatgtcacctggaggagcatgaccgtgtctcccatatagcgcagtgtccaggttttatgtgaagcaaacatggccagggcttccagagggcttatgcagacctgcgactgaagcaagatcaatggcaggccgtctctagtattgtcgagggctcctgttaactacggagcacgyaggtagattgttggcaggaaaatctggcaggaacgatggcccctatccttgttccatttctctcctcagctggttaggaccactataccctccctcttttttttttttttkttttttkttttttgtcttcctttgctttgtttaaacagtgagggttattggtaagaggagagcccgtgtcattcctcactataatgctttctctctgctttggatgtaccgataattgcagttcagggttcctggaacttctaccagtgccactctgacaggcctcaccagaggtgccacctacaacrtcatagtggaggcactgaaagaccagcagaggcataaggttcrggaagaggttgttaccgtgggcaactctggtatgtaaacacgtactatttagacacargctcccctctgctgtacaccagagatgggcttttctgttgactgtacctttgttgccattgtctttttatctttgggatttaatgcaacacatcaayatgaaataaatgagcaactttatattaaattaatctctcccccacctcctgccatatcctgttgtcttcacaaaatgcatacgtaattgacagactctcaaatggtgatatgattatagatctggaagggatttcaaatattatttagtacaacactctgagtccttacttstgagtatctgagttgatatagggcacaggtttcctgatgtcttttcccagaccctctccatytcaccatgctgctgtcctcttgagtgattaaatactgaaacgattacctataaagaaaataccccttctgcagacatggggacagttggcttttgctcctgatataaaatgctaccaacattgtgcatttctgtctgcagagaatgttattccaatgttatttccatttttttccaatgttatttccatttttttttctgactatacaggttaaaagcttctatagaggttaaaagatcattaactcttctttgtagcacctgggaaatccttttaaatcaatagcgtgccacctggctgctcaatttgcagcagctgaaaattcaccaaggcacatgagataggggataatcaaaaccgtgaatccccaatcttccaacaggagagttctctactccacaccaacagagagtgctaagtcctgtctatgccaagtgacagattttattcctaaggccagttgtttaattttagccccttccctcatctgatagaagactgtgctactttacatgtataaattcctgtgaattaagcagttgagcatttggctggagagaggttgggaggagattattttgtgtttgttgtattacatatccacagtaatgcttatctttgccttttgtggttttactagtagaatgccacgtgaacagaattttcaagagcaaaaaggtctttgtgcttttctaagtcattttttttttttttttttaaagattccatctctttaactttagttaggatggaatttgaactcctggctcttttgagtatagaaacccctagtaacaatttaagttccttccatttttcttttaaactccttattcccagcagcagtattctacattctaaccaggttctcccagctttgagacgtctcagacttaccagttctccaaaacgctattttctttaagggtgacaccttttaaaaattaggcacctcaaayatctactgcttttgagcttttgagttttgcactgtaaaaagaaaaatacacagtgggattttaagtcaaattagtttatctaatttttagggaataatttgaagcatgctttgtttgcatagatttttttaaaataagcttttccaaatcataaagagataagatcttaggtaacatgaagagactcccttacttattcctaaatmatctatattccaagggcattttcttatttggaacagttgacctcactgataaagctgtctcaccactataataacaatgtccaaaatctaggctttctgcactattatgcaaaaattacaataataaaagtgaaaattacattataatggtatattaaaatgctaagacttttgcattataagcaaaagacagcctttaataattattctttatttagtgaacattttctaagtcttggaaaagggtcaatgttttgaattcatggccttatataatcttcacaagattccccaggaggtatagatatttttattattacgctagtattgcagatgagggaagcaaggcagagtggtattaaatagctggcccaaggtcactcaggtaccaatggagaggcatcattagtctttgcatcccactaaagttctccactagcttcaattgcctcaagatctgttccatgttctatgaagtagtttcaacagaaatggcaattatcttagaagcaakggaaaaataaaagatgggcttcctgtcgggtgcctgtgacaggtgtcacatctaaccatggttttttagagcagttaatgccttgatagaacagatgaatgcctcttaatcctcctggaattcttgttttagattaagtcattgtatacagtcattcgattttcttcttatggtccaaatcgattaataagatgtctctttttgctttttcttccttttcttcatagtcaacgaaggcttgaaccaacctacggatgactcgtgctttgacccctacacagtttcccattatgccgttggagatgagtgggaacgaatgtctgaatcaggctttaaactgttgtgccagtgcttaggctttggaagtggtcatttcagatgtgattcatctagtgagtagttgctttgtccatccacttccrtgtttgtctcctcaagttccatgcatgcactcatgtgccaaggaagcatgtttggaagacacaggttcttccaaacatgaagcaaacaagagaatactgtttgactcgaagtaatattttgcatcatagaaaaatgatgggaaattttacttgttggacattgcttcatttcaagggttgtatgccaatacaactattaattacacataagattatggtgctaatttgatttttgaaattttctgtgaaaacaaatkgataaagacttttggaaccaggtctatttaagagtattagagacacagaaaaacctcaaatctcttttaatcttcagtgttgaatgagatcagaggtgaacatttagactcaaaaacagcctccttcaacataaaccaaacatgcacatatcatagtacccatgcacacacttttgcrtcacacacatagyccaggtagcttgaacgttgctagaaatatgaaagaaaaaacagataatctgcttttagatcattaaaaatcaacttgaattgataaatgtttgattttcaaattctaatacgttttaattttcaaattttttaagttaaaatgtgcctaggaaatatctattatgctttgagattaggattagaatttataaacctttcatttattctttgtgtttaggagatgtgatgattattgacaattggttcatttttataggtgttgaccgttatgcctataaataagcctcctatagacatacagaaatcatatcctgtggaattagaatataagacttggtaaaagagattttcaaagtattttacttaacttgtatacttgaaatcatttaatccagactgaagttgtaaaagccagccagtgttttcaatatagacttccatgtttgaccatctgaaaatgaaaaacactaaaaacatcacatgctgtttaggagctggaaattttaatatttgacttcaagtagatggtttttaactcctgaaatcgaactacgtttaagtttgtatgtttattacctgtttgagcacttaggtgcaattgtgggagcggggatgtcaagttcatttatgtgactctttggctcaacttacataatctttgttttgatatcacagttgtctaattattttactttgtagcttaaggcaggctgaattgttgataaaatggaaaaagtagtatattgttatataagcttctgaggtgtgttttgttgtataagccctggaggttaaaaagtcatcccttatgtatagtagttaaaggcataaaactgtgacttttagatattccacagaaccagacttatttgatgtggataataaccaatgatttagcattttgtttgcttttgttttattttatccgggttcattttttactcttcccatgtacatgaaacaggtggtggcgtgtagagatcagctgatccttgttttatggttaattgaactactttgtatccagggtttctgcaaatccaaaagtgatttttcatctaggatctattcctaacagtctactccaatcccactttagttttccacaattttaaatcttaatagtgagaattcaaatgaaagtcatttcatttgactattctgatgacatgattgtggcagaataaattgggtcttaaaatgccctagaaaatggtaaatgataaaaaataatattttaaaattcaaccaaagaaatggcccattggccaggtgtggtggctcacacctgtaatcccagcacttttggaggctgaggcgggtggatcacctgagctcacgagtttgagaccagcctacccaacatggtaaaaccccatctctacaaaaaatacaaaaaaaaaaaaaaaaaaaaaaatagcactgtggggagtgcctgtaatcccagctactcaggaggctgaggcaggataactgcatraacccaggagatggaggttacagtgagccgagattgcaccacttcactccagtctgggcgacagagaaagactttgtctcaaaaaaaaaaawaaataaaaagtaaataaataaataaaataaatggcccattataggggtttttatctttaacttgctatttttccagatcatggttctgaagaccctgtgacacgtcccagttcacctactgtcttgtgagtcagaatatacaaataactttttggtcctgactttccccacccctacaggatggtgccatgacaatggtgtgaactacaagattggagagaagtgggaccgtcagggagaaaatggccagatgatgagctgcacatgtcttgggaacggaaaaggagaattcaagtgtgaccctcgtatgtcatcasagatcatttttagtgccttattaagcattctcactttcattatcaggctgtaactctcattcacagaaatgattggagactttaggtctccttgaggagtgaacagtgggtttcttaatcttttgatttgggaargtggagacaagcttcaaaaatgagtcatgatttaatgttattacaggrcactttagcacttgtccaacctgagtattttgaccattatctgcagtaaaatgctacaaagaagctttattggtctgtagattcaacttttaaaatatgatttccatcttcccgttggaccctttccagtgtattaggtctaatttttggaagtgccaccctaagatctgtatagcagtactrctcttagggatgattcacataaatatgtggtgtttgcgctgtgatgatacaaatttaggacagaaatagaacccacccctagatcaagtctgcagtattgttctcagcttatgcgtgcatctgtcttgtgtctatatgcagatgaggcaacgtgttaygatgatgggaagacataccacgtaggagaacagtggcagaaggaatatctcggtgccatttgctcctgcacatgctttggaggccagcgggtaagactggatgtgccaggctccctacaagttagataagataaagggtgggctcctgcaaggatgtgtcgtacacacaggaggggcagagacccttcggaagtattaaaataccacatttcctgttggcatacaactgctgacatagagctctagagcagctctatgtctaccttacatgccattcattctttctattactcttagtagaaagaatgaatgaatggcatgtagagtaccaaaaacacaagtcttgagtcattcttaatagcaacacctgtcatttatatgatgttagaatcattttcctaagctccctagcatgtcagagatactatttacactgaaaaatagtgaagcagagatactattcaaattaattagtggtaaatagaatgtgtttcatttcagccggttctccccatcctgggcagcctgagaccctcccctcccctactattctcaggctgcttctatttttcagcaaagtgttaagtgcagtgtagctctaggcctccaactccattctgatggacaggtgtccccatggcaacgttgttaaatattttgaataatatctcagatgtaagaaaatgccacttcttttaacctctctcttgattcagaacagatgcttgttataggtctagcactgtgctaagtagtataggaaaaacagaggaaatgagaaatggcttggctcttaatgatatagttgaagatgttaaattagcatacatttcaaagtcaagctaattaagttctaagtgggtctgacaaatacagttctgggtaggctggaattagcaagaaagagaagcatgaactggctgaggtttacgatgactaaggtttagttgggaggggagaaagcagagagacacaccccctgggatagaaaggagctggcccaggtgggctttggtgagccaaccctctgcctgctgtcttctggtaagaaaatagatgggaagaagtggcttatggagggccttggcaacccattatttaagccagtacttctcaaccatttctaaaatatgcccagtataacaaaaaataataagcctttctctaatatgatttcaaatttcaaaatgaaattatgtgtaactcaaataaaagcaatggaatgtgacagccctttgttttcaacgaagacatgccctcccagcaactccccaaatcctggtgggtgaggggcatgcttcacactcaagggtgagactcattggttaatgccaaatgcattaaccaattacaggtatccaagatgcaaagaaacatgatggaaaatagtctttgggaaaattaatctggcagcaggggtgttcaggggcctgtcttggctccaccaggggcagcccatggaaactactatgatcttgtttcacccccagtgattacatggggagggaggtgctcccaattctgatggaggagaattggagattggaatttagattgaattcagtatctctctctgtctctctctctctctctctcccattaacacttacaacgactgtgattgtatgaccttagaactcagtcattctggtatgaaattgtgtgatggagaatgaatttgctgggaagttgattttggtctcacttcagcatcttctcattatttatgcacatgaaacctttcatgtgcgacacttattctattctcaagtgctaaatgaaacatttaagacaggagtggaaactgttcactttctcatatgaaagcaagattcagtgattctgtaaggaggtagtcactggtattgtgttaggtattaaggggcatatgtgcttaaacagagaaatatgtctaaaatatttaaattctaatataaaaaagaaagtgactgtattatttagggctgcattttagttgtaagaaaaaagtccaactcaagcaaaaatggcccacacaatggaacagtcccaggacccaccggcttcaggggctgctccagcaatggcgcccggactccctcttgctccgcgtgccttcccatgcactggcttcgtgcttcagcggggtctctgctgatggtgccattgatgactgacctccatgagcttgctttaccccctgccagcttaagaacagtagtgaaagagaacatgtgtgtcctcccatttccagtaaaaacttcaggcaggagcctcactggctcagcttggtcccgtttccatctcccatgccatctccggccaggtgacaggctaccatgtcactgcctagggaagtttaggaagagagtggcaaagtggtgcattagaaagaacatggccaggtcaccccacctcctgggcggcaggcccaactccaccagtggtccactgtgtgacttccctgctccctctaagcaagtcactcctctcctctgggtctctgtttccttacctataaaatgagaacrtttcttcatgtgatctcaagtcccttttaaaatcgctaggattctttgaaaaccttttctatcatctagtgcagagaacttgttgaggaagttgggattggaatgagcctcagcagatgggcaaggtttgaataggaagagaagagacatttcaggagaaagaaacaacatagagagmcagatgtaggtataagatatggtaataagccaaaatgtattaagagttataaatgcatgaaatcatcatcaaagcttgcttagtgattaactgcttatattttgccagtgcatatgatgtgacatttttctttaactcaaacactaaattacgatgtcctcaggttatcataaaccccatttgacttcatgcctctactctctcagggctggcgctgtgacaactgccgcagacctgggggtgaacccagtcccgaaggcactactggccagtcctacaaccagtattctcagagataccatcagagaacaaacactgtaagtgcattagcagcacaagtgtgttccctcatactagacagtctctktctacaggtatstttcttcagaatgaaccaagtgttttaattaattaaaaaaaaaaacaactcataaatgacttaagtgaaacactgtattccataatatagtttaagttataatttatgtaactcttgaacatctcctattgcccagtatgctgctaggttcttgaaactaggaagaaatattatcctatctataagcagctgtcatgagtccccacctccccgcatttttttttctgtacactttacagtatttgccactaatttttttttccttcttcctttttaacagaatgttaattgcccaattgagtgcttcatgcctttagatgtacaggctgacagagaagattcccgagagtaaatcatctttccaatccagaggaacaagcatgtctctctgccaagatccatctaaactggagtgatgttagcagacccagcttagagttcttctttctttcttaagccctttgctctggaggaagttctcyagcttcagctcaactcacagcttctccaagcatcaccctgggagtttcctgagggttttctcataaatgagggctgcacattgcctgttctgcttcgaagtattcaataccgctcagtattttaaatgaagtgattctaagatttggtttgggatcaataggaaagcatatgcagccaaccaagatgcaaatgttttgaaatgatatgaccaaaattttaagtaggaaagtcacccaaacacttctgctttcacttaagtgtctggcccgcaatactgtaggaacaagcatgatcttgttactgtgatattttaaatatccacagtactcactttttccaaatgatcctagtaattgcctagaaatatctttctcttacctgttatttatcaatttttcccagtatttttatacggaaaaarttgtattgaaaacacttagtatgcagttgataagaggaatttggtataattatggtgggtgattattttttatactgtatgtgccaaagctttactactgtggaaagacaactgttttaataaaagatttacattccacaacttgaagttcatctatttgatataagacaccttcgggggaaataattcctgtgaatattctttttcaattcagcaaacatttgaaaatctatgatgtgcaagtctaattgttgatttcagtacaagattttctaaatcagttgctacaaaaactgattggtttttgtcacttcatctcttcactaatggagatagctttacactttctgctttaatagatttaagtggaccccaatatttattaaaattgctagtttaccgttcagaagtataatagaaataatctttagttgctcttttctaaccattgtaattcttcccttcttccctccacctttccttcattgaataaacctctgttcaaagagattgcctgcaagggaaataaaaatgactaagatattaaaagtatttgaatagtataatatggaggagttttatcttagggaaaccccatggtatgataacccccatctaacatgtcttactttgggtcagctgacacttttggcatggcttgataaactcccagctaaacagtttgtttactcctgatctgtaaaggtcatttctttttcaatttaacattgaggaaacaaactttgggattaaatttgacattcaggccaggcgcagtggctcacacctctaatcccagcactttgggaggctgaggcaggtggatcacctgaggtcaggagtttgagaccagcctggccaacatggcgaaaccttgtctctattaaaaatacaaatgttaccaggcatggcagtgggcgcctttggtcccggcttctcagaaggctgaggtaggagaatggcttgaacccagaaggcggaggttgcagtgagctgagattgtgccattgaactccagcatgggggacagagcaagactccatcccaaaaaacataaataaataaatgtgacattcagaatagtaaatagtggaaatggaaataattattagtaaaaaattagtagttcataataaacaagacatgcaaagcactttttaaatatactaatgtacaatgaaagaaggtatttcaataaacacctggcaaagaatattaaaactaaatacagaaagatacttcctcatgttcatttgaaaaaaaaaaatactaactcccatttgaattgatttacagtttataaaatgctttgacatttagctatctcatttaggggaggttttagagcttaattttacagggcatgaagctcagatgaggtttccttagcgaaatacagacccagcccctggacttctatttattactgatctttaagctttatcagcccaatagtcaccaagagagctgctctgtatgttttttaaaaatcacagaaagtacaaaataaaggtgatattaaacgactgtctcacatatgtcggtcatcactgcaccctggagagagaacgtcatctcgatgccaatctacacactgtgggaagggacaaccccctgagacacatgtgctgcaaaaagtaagctgatgcttccatattcataggtgagctggtaaagcaggcccttcatctgaatcttgcttaaagccttgatatctaaaaacataaggaaagagcagctttaggttgagactgatgatgcttcaaaccacttgcctaactacaaacctaaaaatatttaccctaaaatgcagtgtaagggccgggaagggtggttcacacctgtaatcccagtactttgaggcgccgaggtgggagggttgcttgagctcgggagttcaaggccagtctgggtaacatagcgagacccctgtctctacaaaaaataaaacaattagccaggcatggtggcacatgcctgtggtccccataactcgggagactgagacaggagaatcgtttgaacccaggaggcggaggttgcagcgagtcaagattgtgctattgcactccagcatgggcgacagagtgagacttcgtctcaaaaataaaaaatttaaaaaatgcagtttaggcaaatacagttggactgtattaactaaatggatagcaagcccctttacttttatgttgaaatgtaaaaaacctcaagttccccacttaaggtcaggaaaaatgccaccttttccaaaatgtctgttggattctccaaagtgatacattaaatttatgaagtaaacgaatagcaaattaaacacatttacaaggccttttcttttagcatcacaatgcaagaatgatgaaactttcttttgtactgatcatttctcagcaaatagcatagtatagagttttgtcttggggaaaccccattgtatgataaccccaatctaatgtgtcttactttgtgtcagctgacacttttagcatggcttgataagctcccagctaaacagtttgtttactcctgatctcaaacaggagaaccaactatttccaaagatcttttgccgtttttattgattcaggttattgcttcccccgagaattgttttaagcgggcaagattgaaaaggcattactaaaagaaaaatctatatttaggcaagaaatcaacaatgcaagaaaaattaggtaaaactagtaaatgttaatcagactttaaaaagaaatatcatcgttttaaagttttacattgccttgctacacttgatttgtaataaaatgttacattttatattgttttcagctctaataatctaagtgaattatgcaaataagtctgtataataacatcactatacacctgtagggcaccctttctatggaggtgaataaagaaatgatcagggggaaattacaagtacaggaaatgacttttctatttaattatatttccattgaaacttctattccatttctagtggtatgaaactcattaaagtgattaagaaacatcacatcagcacatttaagtgctcaaattgcttcctatttagtaagttcccattactgtgatagggaatgtggcaggttacaattaaaaaatcccattttcaagggagacaattcaactcttaagaaaaaaaaaaaaagaccgctgttgggacttcccatgtttggaaacatttaaagattaccattaaggctgataaagcagaagaaacacaaagatgaccttgcagaaactaaggaagttttttcaaaatacttgaaatgcacgttgttttcattatcacatcgtctcactccatatcctcattaaaataaaagattcaacttgaattgcaaacagaaacctatataaattacaaatgaagaaaagatgtaataaaagagcaagagaaacagggcttcagccgaaagtcccaaatgggaaattccttttttaacattcctcagtagagtcaggtatgagatattaaagcatgttttacatttccttgaattcctttttacttactctttagagacatacaggttttaacaatctcaggagccaaatttatctctaaaacagctcatgtggagcccccaaaggattgaaactagcattggttgaagctgtacgaggcagccagcccagaatgatggactggggctggcgtcaagtgccctgaagctacccagcagagcaggctcccttaggcaagatacatcaaaggccaaggagtctcccattgggccctttgcaacttggtactttgtaaatggccatttcattctagaatgaagcactgcctttgccaggagactgctggacaagactttacaatgaaacatgcccatctctgtaattcagcttcagatgtaagatgctgagccaagtgctggaaagctatttttgactcaaaaatgtacggcgatggtggagcaactggaaccctcattcatcgctggtggaaatgtaaaacggtgcggctgctgtgggaaacagcctggcagctcttcaaaacgttaaacagttaccatacgacttcacagttccattcctagatatatactcgagagaacagaaaacatatgttcacacaaaaacttgcacacagatgttcatagcagcatcattcatagtagccaaacacggaaacaacccaatgtccatcgactaatgaatggatcaacagaatgtggtatatccatataatgaaatatctgaccataaaaggaatgtacatgctgcaatataaacctttaaaatattatgctaagttgaagccagacacgaaagagcacatattatgtgatccaatttaggcaaaatgtccagaatgggcaaatccatagaaacaaaaggtagatttatggttgccaggggctggggcgaaggggaaatggacagtgatggctaagagttaacttttggggtgatgaaaattttatggaactagataatggtgattgttgcacaattgtgtgaatatactgaaaactgctgaacaatacgctttaaaatggttaagatggtgaattttacgttacataaattttatcttaaaaaatgccacttcagttatagaaaatctaatttttgctccttcatgaggaagagatgtggggtaagagtagatgaaggctgaaggaactcagaaactttgtggctaccaatttggaacctgaaacaaaattatccataaatagacatcatttttcatagtaatttccataggttatcttccactagttcctatgcttccatatacacaaaagcattatgaaaagaataatcagcatctttttgaaacagtatttatcgtgactcaggtggtattttaagtgcccgcaatattttgtctcatttgctcttcagagcaactctaagacgtcagtattgttctcatctcattctacaaattgaaagtgcgggaaaggcaatgtgaatcactaaacatcacatagcttgtaagtaggagaactgggactcgaacctgatagactagcaccagaatatgtgctttcagccagaagctattcagccttttggaggagtgaatccatccccattttacagaagaatcaaactccaagagggttaagctatgtgcccaagattgcccacctactgactggcaaaacaaggtactgattatcctaagaggcacaaagacaatttcctcgagggaaagatggagccgtaatcaagcacaggaatgtgggggccttctagcaaaatctccttcttgacctggttggtggtgacacaggtgtttgcataaaaattatactttaaatggtaaaagtttcatgcacttttctatatgcctacttcattacaatttcttttaaagataaatttgtgcctggcacagtgtttggcaaaaataaggtataaaaatgtccatgaatggaaagcactgcgagcttaaagacctgcagggttctgtgctctgaggaagggacataggctgggctttagaaaggtggcctggagagaagcaggtgtcaaagggcaaggcaacgggaggaagaatggaggatccctttcatggactgttttctccctgtgcccaggggatcccccaatagaaatacactcagtattggtcaggacgttgttacattatggatcttctgtccttctgctggaaacaacagacataagatcattatgcatttcacttaaacaccagtgaaactccactcttgacgtttcgaatgattgaattatactagacatatatatgttaatggggttccagtgccagaccctcccaaagtgctcaacttccttggttactggctacctccaccaagattaacttgagtacatataaaggaaaacaccacctcacagagcaaaatatgaggaacccaggagtaagcttgcatgtgaggggtggcactttggcttaaggcaggacaccgctttttttggcataacacagggaagtgagacagtaaaatgagaaaggagctgttgacagccctaaactgagtcgttttccagagtgaagaatggttgctcttattgcttgggtgctcctccccggggttcattcaatcctgtccttcatgaaccccttggggctggcgaggagtgcatcagctgggctgtctcaagcacacgctgctgggtagccaatgttagtcagggaaaatgagctcacaggccaacataccacaacacttgagtaaagagactttaaaagaatagtaacatactagattacagatcctaacagaagtagaaatagtaaaacaaagctagaaagatgataccaacaattggaaaagaaaaccagaaatatttgaagggaaaaataaaactcctgaaataaag

SEQ ID NO: 5635 - DNA, 30151 bp, Homo sapiens
gaaccttccatttgacccattcaaattattgaaatatatacctccttgtgcccaattcagtttcaaggatattccaaatttgtcgaaaataaatgtgctgaaggcactaaaacaatctgaagtccgtttaccaagcagagtgtcagaaactttggagtgagcatggcatctccatttggctctttctaaattgaaatgttactgcaggttccatcaccaagtgtattgaccgagtgaaatgactcagcactgcttgctggacaccaaacactccctcctggccaaacggtcacttgaggacctaccacctgctctaccaactacatctgcacgacagtaaacagcaaaataaataccttctacagccacatatagattaggtcttcattaccttaaacatagataaaactgtgagtgtgatttatatagacaagagtcttttggcagctagatcaagcagaaataaatattgatattttgttttagagtcaaggagattagaagctggctctgaataaaatacagattgttttacttagcacagccattttgttgttgttataaaagaatagagatggacaaaagtacctaagaaagggcttcttgctataaccacaggttgacggctgtgcaacactctccagcccggcttccctgtattcacttgtagccacaactacaatttcatactgtttaagttttcattgacaacggcagccaaatatctgcttatttcagatattctgaatgctaagaaagtagatggtcagatgtttctttcacagcctttgctatgtttgcatcttgtacttttgaaacaagtttcagttcaggtaaaggattacttaatcctctaaaggatgaaaaagtgtagctgaggtgtctaaaattcttgattcaagtttgtccaactgagagagtttatcaggagctaatttggctcacactggacccagaatcccaccccccaacttcatttgtggtccaattatagtcttttttttttttttttttttttgagacggagtctcgctctgtcgcccaggccggactgcggactgcagtggcgcaatctcggctcactgcaagctccgcttcccgggttcacgccattctcctgcctcagcctcccgagtagctgggactacaggcgcccgccaccgcgcccggctaattttttgtattttttagtagagacggggtttcaccttgttagccaggatggtctcgatctcctgacctcatgatccacccgcctcggcctcccaaagtgctgggattacaggcgtgagccaccgcgcccggcccaattatagtcttatattaaacagtatccactgcagctcccaaatatccataagatcacctgttattagtctcttcgtgtcagtgaacctgctgcatttgtgtcagcaagtgcaaggctgcctctggacgtgttcctcacctctgcactgtactataagccccttggcttttgtttttggaatgaccctttgaaataagtaaaatcctgaaagcaatagtttaggaaatctacctgtcacttctgtagtcatacaatgccacatgtaaggttatcttgtaggtgcacttataccctggccagctggctaatctggcagcttatttttcaatatctggccaatgatacagactcatgagttctgatactttattgccctagttatttaacgttatattatctgtacagcgaggacagaaaaggctgttttaaagctgtttgtgagagacaactattattttccttattttttaaagcagactctccataatatcagcaaacaatataaagacattttggcaattaatttgaattacctgtgtatttcaaagggctaaaatgggcatgttttaaaattcaagattgtagttcatttattcattttccattattcttccattggtaagttccactttaatggaaacacatgccatatttggtgagagagcagattttttaatttttaaattttaaaaaatgacatatactgtctgcagacagatatttttaagtattgcaaagcaaaagttgaatgatgcctaaaaaatagtttatcctaagtactcctggagttccttgccagatcctgtttgctatggttccaaaggggaagtgcttttaatcactgttgagcagaatttatgaaacaaacctgaaaattgccacagatgatgttaaatgtaaacattgggacagaaggaggtagtaaatagcacttactttgtctacatttactcctctccaactttccatttttcttttcttttcttttaagagttggagtcattctttcacccaggctggagtacagtggcaggatcactgctcactacacccttgaatcctgggctcaagtgatcctcccatctcagcctcccatagctgggactacaggtcggcaccaccatgcccagctattttttttttttttttttttctgtaccaatgaggtctccctatgttgcccaggctggtctcgaactcctggactcaaatgatcttcccactttggcctcccaaggtgctggaattacaggcatgagccacctccaattttctattggcctctaattttctaagtctgatcttttctcctcttagagggagaagatcttttgtcctcttaggggagaagaggaaagagagactttttttctgcttctgaaatctcccagcatattgctttcgacttgtcaatggcaacacagcctttggatgctcacttgaccctcaacgtgtctggtcctttacaattctatgcattttcctgtagcgagatcccttctccgtcttccaccacccactgctttggctcccctcttgctgttccctgcctgcatctgggcaggaagttccamtcctgacttgaccctttttcagctgtgtggcctaggactcattgctcttttctccccatttcatcatctgaaaatggaaaaaataatacctgactagaaagtgaaagtaaaaaagagatataatggacaatgtgcctcgcacagggcctggcatggagaagtccttgatgtacgtcttttccttcccttttatgcagccgtttccctcacacccacccattgattgatttttctgaagagactacttttgtcatgtcaccctctaatccccagactttaaactgggaggtagcagagtggtctgattaagaccttagacaagggtttcttgtctgggcgcagtggctcacgcctgtaatcccagcattttgggaggccaaggtgggcagatcacttgaggtcaggagttcgtgaccagcctggccaacgtggtgaaaccccatctccactaaaaatacaaaaattagccagatgtggtagcaggctcctgtaatcccagctactcgggaagctgaggtggaagaatagcttgaacccaggaggcggacctcagcacttctgcctgggtgatgggagtaaatcctgtctaaaaacaaacaaacaaacaaaaaaaacttagacaatggtttctcagctttttttaatcactccccaacaagtccttttagatattatattcttttgtgtgtggcggggtacatagcgtgtgtatatgtttgtaggttacatgaaatgctttgatacaggcatgtaacgtgtaataatcacatcagaggaaatggggtatgcatcamctcaagcatttatcctttgtgttacacacaatccaatcatactcttttagttatttgtaaaggtaaattaaattttttttactatagtgcccctgttgtgcttgtaaatactaggtcttatttattctaagtattttttgtgcctattaaccacattatatatatatatatatataatttttttttttttttgagatggagtctcgctctttcgcccaggctggagtgcagtggcgctatctcggctcactgcaacctccaccttccggtttcaagcgattctcctgcctcagcctcccaagtagttgggattacaggcacccgccaccacgcctggctaatttttatatttttagtaaagacagggtttcaccattttggccaggctggtcttgaacccctgatctcgtgatccacccacgttggcctcccaaagtgctggaattacaggcgtgagccaccatgcctggcccacattacattcttactcacctccccctaccatggaattttattccacagatatgctattggtttagctactatatgtatatctgtgttttatacataaagcacaagaaccttccagaaccaattttcgccaccttggaagtaataccacctctactaagaatgcacagcatagaccataaaacctcaatgctaagttcaaatattggccctaccacacatgagctgtgtggtcttgtacaagttacataacttctcctccttgtctcaaactcctcacatataagatgaggataataatagtacctgcggccacacacagtggcttaaacgtgtaatcccagcactttgggaggctgcggcagaaggatcactcaaactcaggagttcaagagcagcctgggtacatggcgaaactctgtctctacaaaaaatacaaaaattagctgggtgtggtgatgtgtgcctgtagttccagctacttgggaggctgaggtgagaggatcgttcgagcccaggagatcaaggatgcagtgagctatgatcatgtggctgcactccagcctggataacagagccagaccctgtctgaaagaaacaaaaacaaaaacattagcacctgcatcatagggtcactgggggcactacatgagttcatgtacatcgaggacttaggacattgcctcaggcagacctagtgctgcacaattgcttatgtaattattcccaaatttctccagggcccacagaagaacatggaagtatcttggtttggcaattaaggtgaatcacattctcactctccttttctgcatctctaccccacattcccacaaagctttattcacaccaagtctccagtccttgcctgcattgtgtgatgggtgcctgcagtgatgggtggggacacccatcactgtccagggtgtccccaccatcctcacagcctctctgtctggcctcctgcctttgagccagcccaccacactctcatttctctgcccagcagaaaccaaactgtcctctgcatttactgtctcaactggaagagaaatgcagaatgacaaagaacttgtgaacaagggtcagctccaacagagagtgaagccaaaggggctgggcagaaagagagatgaagacggggatctaaggaataaggctgtaccagagtgagagtacgggggaggggttgaacaagagttcagggaggagagaattcccagcgctgagccagagactcctttacagaggcccaaggaggcgtggagggagggggaaggctgccaaggctctttctgtctccatgagtgtgtcaagaatgcaaagcactaatgctcttcacttggtccatcttgcagggttgagtttgcagtgagcaaccttgaaggatgagctgacatctcgctcagggccaaataaccgacttgcttactgcttgctataaaatggcacgttacccaaggtcagagttcccttcctataacctccccatccctcacacattcacaggtatctatccaagccatggcatcactctgtggggcttgggggcaaggcaactgacactggacgctggttctcatgcttgccaagcatgaagccctgtgctgctagcagctgtggaacatagccgttagctttaaaagagggtaaaatcacgtcctggacaggacagccaggtgagttgggaagggaagagagcctgccacgggcacaggcatgttgggggaagtggaagtggtgagagcacagtaggaagtgagaaggggcgggccgtgcttaccaggccgtggacttaaaccaggatgagagaacccctggaggcgtttaagttggcagacttggatttcaggaagagctctctggcttctgggtggagaatggccagtggggtaagtggtgagaggaaagacagagaacggagaaggttagatgggcttgggaaattatccaggccctggatggaggtagagatgtgtgctcatgaacacggaggggattactgatgtggggtggatgagactgtcgtcaagagtgtgggacaggaagagagggagagtcttggccagatccaagaaaggagccctcagaagaggaggggagtcagaggcaaggaaggggctgaggcagccagcccagctgagtggascccaggagaggtatcamrgggtggtgtggggtggggaggggccagtgtcaraaagtggatggggagcggcctgactctgcttttgtcctgtggccttctggccaaaggcagggaaaggtggccaaacactgagaccaagaacaaagaaagaaaactgctggtggacttcttccaccaygagcaggccaccaagcccgcagcactgcactgcagcccccagctctgtcctggggttgggggaggtgaggaggggcaaggtggggagcacacagagcacccgctgtcctcggaacaccacagcgactagaggtaagggagcaccggatgtggctgggatgtgggcagcaaggggccagaggggccttgaaggggtcacrgaccatttaatgaaggtgtattgaaggccaccatgggccaggccctagttagggatggatcagaattatatagcatatgccaggggtcaggcaggtaatgaagtgatcggaaggtgatgaggcagtggcagttgagattcacgttgcagtcgccccaagctggccaggccagggagcagaagcatggctggatgccggagcccaccaggctccccactgcagggcaagagtggcagggggagagactgtgaaaggagcataggccaggtcctgggtgaaagctgtgtcctcagccttgactgatgggtatagggagccactaaatgccttggggcagagaggtgaggaaaaaaatatttaccgagcatctacaaggtgcaaggtactcactagatgccttcagtaccaaagcttctcaaacttagtatgcatatcactcttctaagaatttcattaaaatgcagattctaattcagcagatatagggcagggcttgaggtgctgtctttaataagctcccagtgcctgggactgcactttgaggagaagagctgtgtgtgccccagtgtggtccagtgagtactctgggctccctctcrtgggcagggaagctgagggccccatgagctctcccagcttcctgaaggctccccattaatgagagctgactgtgctgtgctttgctgactgcagggcctgctccctgccccccacctccaggttggggtaagtggcacctctctccctccagctccgcagtcttccctgaggtttagatcttccaggtttataaagtcaggccctcctgttggcagctggcctccaccctggagtatctgagcttgcctgtggcagcatctaaagatagtctcccttacaggaaacaagatactattggctaactctgcaaataaaatgctcttagagggaaggaaagggaaatactcgtctctggtaaagtctgagcaggacagggtggctgactggcagatccagaggttcccttggcagtccacgccaggtaggtgcacaggactagttgggtacctgtgggtggggtggagcagtggacagctaataggttaataatgcctgtttgcttacgtgcagacaatggaaaccattttcctggggatgttgtagcctaaatatgtccaaggggatggaagagtgggaggcaaggggtgatcagatcatttataatacactcaacctggtggaatagtattagaagcattagtaattacrttttagagacatggagaaaagctcatgattttaaactaactgaaaaaagcatgaaaaattgcatctggatgctgttgaggaattattgctaattttttgagatgagaaattgtattaaagtctttttcaaaaaagagtccttaacttttagagaygcacacaagtgtttatgggtgaaattaaataattcagtagagacattaagtgggaaatagaggaaatattgaccatgggttgctaatagttgaagccaggtgttgggtataaggaggttctcgctgcttttatttgaaaagttgctttttatttgaaaatttaataataaagagtttttaaatttgtatctgtattttaatataaatataaatgcacttaatataaatataaaatatgtataacatttagatagagaaaagctaaaagattactgtggttgattctaggaaactgcattgcagatagtttcatgggtttttttttcctttttcttccactttttgtaccatctatgggtttttgtttgttttttgttttttgggttttctttcttgtttgtgttttgttttttgagacggagttttgctcttgttgcctaagctggagtgcaatggcacagtctcggctcactgcaacctctgcctcctgggttcaagtgattctcctgcctcagcctcccaagtagctgggattataggcatgtaccaccgcccggctaattttgtatttttagtagaggcggggtttctccattaataaattcctggcacaaatttagtgttcaattttgatatatgttgttataaccattgtgaggatactcaggctcaggtttgtgtgggtggaaaacatggtcttcagaaagaaattatgagtgcaagacaggaggaaatccatcagaggccccagctgaggactgaccacggcttgttatttctcttgccttgcctctggcaatcacagcctcacagagcctgcaatccttgctttgtgagtttatagctcagtccagagaatggctaagaaagtttaggattctttcaacacccactccacaaaaaaaaaaaaaaaagaaaagaaaaaaaaattaatttttgaaatacttgaggtagaaaacttgaggcagaaaaaaattgagccaaaaaaaaggaaaattgaaccaygtgaaagcaggcaagaaagcttgcattgctcagggcatcccaggcccagagggcrctttggagggagctgggtttcctgagaggaggcagggtgggtgacggacctgtgctggagagccttgaggaccactgtgggttgggaatgggggcagtggattggggttcaaaaccsctgggaatgagaaatgggctcaggaaggctagggtggattctttcatcttcctctttgcttggctttattttcacaaaggaaggcagggcaggaaatagtctcagcccaacttcagtgtggttcttcttagtgctcaggcttacctggcacttgccacacctctgggatgggagcacctactatccatcagccacgtgccagtctccacaaagtctgctcctgaaccctgctcctcagctggccccacttcacagatggggacataggcagcttggctttggaatgaaggaatgaagtcaggaatgaagtcctggctctgcacttggtgactgtgcactgggcttgctaagtctgtttcctgcttttaaaatggagattgtccatcagcctttgaagccatgtaatgggtatgtgtcaactttctgcaaggattaaaggcatggtataggaagtcccaaacacactgcctgacccatctttgatgctcaagaaacgatatatgttgttgtcatgaggaaactgagcctcagaaagtttggatacctgaaaaacactgactactattgaatgaggttgtgaagaatccagagctgtaggggcaggaaagcaaagaacgtattagagctgacccagtcaggacgatcgtctatccccttcctcaccccaccccattccaggaggaagtctgcccggccctaggcagctatggcacagtggcaatgtcaggtatggttctccctagccagagaccctagcctcaaaaaacctccttcttgggatccaggcatccaactgctcctccccagccccagcctctgacccagtatcctgagtccagagacgtttggaaccagcacctgtaatggaggagctgaacaaggaggggaacttctgctgctccacagcaggtcacggtcataggagggagtggaaccagaatggcagaatccagatcttggctgcctttcccaaggacttgttctgattcctagcagcacagcccaggcattccgagaagttgggctctctggcatcactcactctgcccagaagagccaggggaaagttggggcttctagctgaamcttgatcccacctgccctcttgaggggctcagaatctgctggctgcttcacaggtgggattctcacggcacgctggccacagctgatgcttcraccccctcatcttgtttggccaaagtgcagctttttagcttgtgagtaaggaagaaaagctgtatcatatgtctttaaacatcttcctagaccacctttgttttccccttaaagtgtgcttaaggagaaaatggaaagtctcttttcagtgtgttgtattttgtttattgcaaaatacaacacactgaaagaacaatgtctgggttagcaaagtattagatttaatttcccacattactaccatccaggctgagaaagagaaccccagaagcctctctcatgtcccttcctgaccacagcctcttcctctcccacaaagaaccacaagtctgacttctatggtgatcacttccttgcttttccctatagtttgactgaatctaaatatcatccctaaacaatatagcttagctttrcctatttttgatcttcatatttggattcatactttttggtttggctcaagactaaacttttaaaatgcatccacgttgtaggagatgtacatgcacaaaaattttcacggcaacattgtccaaactagcaacaaactgaaagccacctatgtgtgcattagcagtagaaatggcaataaaycatggactagtcacacagtggaatcctacgcagcaaggagaattagcagtctacagccaaaccaacagcatgggtgagatgcttccagaaatactgagatgaatttagagataaaggcacaattggtccatatctacagggcacttaatccagtgcatctccactagacaaaatttgtatttccatgagcaagggtcatttgcactgctatctgctataacctacggtgctgtaaaattagctcaggcaataaaagggggaggtagccccaaagagtatgccagaaaggactcccagtaatcttcagtgtgtgtctatttcaaagtctttcatcatttttccttgtagttacttagtgtggaatttcagacccctctctatgtccctcttctcccttttcagccttggctttctctgcatccttccccgaagccctgcactcagcctaaactgactttcctgaacactctgggagcatgtgggctcctcccaactccaccatcttcactgccttctgttcctatttccctctgcctggccttggccccaggaaaccttcctatgctcagaccctctgtgcctttgtcttcaaagcccacccactattcactgccacctccatcttggtcaacctggaagactttccccatccttaaaacatcagctcaaayggcagattttttttttttttttgtgatatcctcttgatcaccctcccccagtttttaaggagacagatatagaggttcaatccttgggcttcccatgacttttcttatattctgttactgagcaataataaacacttctaggaactgtatcttaaacacttttgcctctacagaatctagcacagtgcctagtattggtgaaatataattaacaaagtcttctttcaacacagagattctctccacaaaaggagtagagaaagaacagttttattatggaataagcagtaaaccaaaatatgcagagcattataggccatctactaagaggttgcaagaacagaaagaaatctcccccttttgtatagccaagtagatacaacctgttacatacatgttatcaaggcaaacaataactgttcctcaagtaagaggtcttgccagcaccgtttgccrtayatggttcactctaaatttacctggtaattagggtaaccacttgtgttagctaactggctctacccagaggaaaatcaaatttatctttaagacaaggggtaattttgcagcactgagcaaggctcttcagttaggctcataccttcccacagaaactargagatagaagcactatctcccttaggtttgtttacatttcaaagagatgacgcccaggtccttgggaaagactagcttagctcataaagctgacaaaaagcctatctagtttcaaaaggatttacacatgttcaaagagaggagaaagtatgtaaaagttttctaggtgggcacggtggctcacacctgtattcccagcactttgagaggctgaggcgggtggatcacctgaagtcaggaatttgagatcagcctggccaacatggtgaaaccttgtctctactaaaaatacaaaaattagctgggcatggtggtgggcgcctgtaatcccagctacttgggaggctgaggcaggagaatcacttgaacccaggaggtggaggtggcagtgagccaagatcgcaccattgcactccagcctgggcgatgagagtgaaactccatgtcaaaaaaaaaaaaagttttctaaagtaaatgctctgagaaaaaaacagaaggtgaggagatctctgtccttatttttaacaagaataattaaatgtttttatttttaatttctacttagactagaatatggtacagatgctcaaaaatattgacttaattaataattaaacaattaacaagtctatctctttcctaattattaaaaaaattatgaagtatttcccttcaaaatttcacagtttactttgacataaataaataaataccataaagtattttgaagaggaaagggaagggtggggcttcaaacacaaaataatggcaggttttgtaaaggggcaattcactaaacccaataggattctcctgttgctattttttttttttttttttttttttggtggtggttggagggaagggttgggtgtgcatttggcctgtgtgaaaaactggtgggtagacaatgccatgctgttctaratgggctcattgctataggaatagatagtcactgaatttacttgcataggggatggggtataaaatgkttccttatagctccttaacatggaattmagmacccctytccccatmagccttagctctctctgaatcccaagggatatgtgttataaaaatagctgccatcataaatgagaaaaccatcaggacctggtaaaacttggcttcccaaacagtcaggggtctgggcatggcagccgactgagaacctttctatctagtacaaggtaaacaagatttgccaagacttgatcaactgatccagctccctatctccaaacagaacctcatctgaatgctcacaggctgtgccccagaagtgtagaagtgtcatgttccctgggcaggctgctgggcagcctctctgttgacaatagaccacacttttgctgacctaggactcatgttgctctttaagactgcttccttggccaggcatgatggctcacacctgtaatcctggcactttgagaggcccaggcaggaggatctcttgaggccagatgttcaagaccagcctggtcaacatagtaagaccccatatctaccaaaaatagctgggcatggtggtgcacacctatactcccagctacttaggagactgaggtgggaggattgctacatcccaggagttcaaggctgtagtgagctatgatcatgccactgcactccagcctgggcaacagagcgagatcctgtctcaaacaaacagtttccttctgtttgattcttgctgaaaaattgagcatgccagagctagcaaggctcttagaggtggtctggtccaatgctttaatttcatacatcaagaaactgaagcagagcagagtgacctgcccagggtctctcagccattcatgctcagaaatgtatgggctcctgtgaaacatgtggctcttaaaagcactatcatatatttgaaggcagaaaataggctaaaccttcagccttcagacttttcctctccagagaaaatgaccccagtttcctcactatggttgctgggagctagattcctggggatctggcagtgtggaccacctagtggtggctagaggagcaaataatatcccgcattccattttccactcaccaatccctgaggggcagcctgctgggttatgagcccacagggggagaaccccaacgaattcagagatgcatcatggaccagtttctcttaaggggcctgggtctactattttcagttctacttcgagagaagtggcctgcaatatcctgcagatttcccctccagggagaaaagcattgtgcrgtgcaaggagcacaggctttgtggaaagaggcatctggggttgagatcctggctcttttgcttccttgaacaagttaaccaaatctctgggcctctgctggttaatttataccatggggatcatcatttctccagtggggttgtgaagagaatgtggtgggatcttgtgtgtggagcatgacacttagcaggcatccgggaatggcagcctcctccctttctaaactggggctttctgagggtgacttcagattccacaatgtcaacagcacaatggcatcctcataaggaaagtttgggttggggctcctcaagcaattctctactctcatttggtacaaagaaaaaaattaagcctcacaattttcttggcaccagactgaacctcaaacccagtcttcacttttactaaaaagccataaacagagaccaggagggtaaaaactaccagaagatacactggatttagaaaacagtaagctggatgtgaagccaaaagagagggagaaagcaacataaaagaatgtcagattgaagaagaaatggattctggccacctaaagaagaagggaagtatagaaaagggaagctgattggaaacaatgggtaatgatgagtgtccctcccctaaaaagttaaaaaataaatgagcaggcatgagaaaaggaagtaggccagaggaagtagaccaggatcagccacggatgtgagtggggaattttacaaatttctacttgggtgtgaaacatgtgtacactcaaagctctgtctaggttcaccgaaactctcccagctcaaggccatttagtaaaaccttggcttaactgaatagtgggtaaggaggcctgaggatggcccagagaaggtttaaattcttactggctgctgcactaagttgtaaagtgcagccttagttgatgatgcctttattagtgcaacatcccagaatgcatgcgtcttacaacccttgtggatatgaaacccagctgggtagacactgcaaagtcttctcatttgattcttccacttggtttctagtgtccctcagggacaaaggaaagccatggtccagtctaagatgaaaaccaattagacctctggcaggcctttgaccaccctgagggccacccccaaggcacggccacactcgcatctgctgccaggaggccctatcttaggctcmgctcccaaaccttgaacatcttggaggatccacaaataggaggtacactcagctcaggctcagtcttccttaaaaagygccttgctaaagctatcaagttcactggaatacttctgcgaaggacacagcttcagcgatgtcagattttttatgtaaatggtgccttcacatgctctggggcatttggctaccaagggcggtttgaactagctccagcacacagaatacaagtctcttcagaaccaggcaaaaccctatgttgcccaatgactcctgctgtttcttgagatttgcacagaagacagagctgcaattacccacgctgatatctatttcatgaccacatatgttcaaaagccacatgtgagaggtatggttgaaatgagaggttgtgtttgccaagttgtcttctgactgtggagagctggtgagcctcttctcatctcctggggctccatattatagagctgacgaatctcttttcttgctccttgaagtctttcattcacttatttattaattcatttaacacatcaggcacctactaacttctcagagttcaaggcttcctagcctatgatcagaaaggacacctgtgtgctcatgagcacccctgggatcagggtgactgatagggtgctgtcatcactactagatgaaactctttggaacaaaggtctaggatataatatttatccttctgcaaatattcatatggcattcgctgtgtaccaggccttctgttgaacattggcctgcagagctgaagaggacgtgggtcttctcttaggaactcctagtcttgggaaaaaggaatggggaagggctgtaatgtgaagttaaaaaaaagtgctgaggccgaacacatctgggccctcactgcagccctattgcacacacactgcatcacctcgaacaagttattcaccctctctgaattcatctatttgcccataaaaatagagatgatccttttatatgttggctaccacttattatgtgcagcatgcttgttattgtactaagttactcattttttagtttttcatataactcatatttttgttgatttttattttaaaattccaaacgaattaattaaactattttccaaaatacgtagtatgtgtacatggtaaaaaacatttccaaaagtttaccataaaaactgtctcctttcccatatcctcaatccttcagaatccctctccagggataattaccaccaccagtgtattccttaagagatatttaaactttatacaaaatacgcacacatcattcttttccacaaatgacagcatactatgtacatggtacctcacctagcttttttcacttaccagtatatcttagagattgttgcatgacagaatatacagatctgcctgtttttgttgtttttcccaagtttccaagagctagaaactgtttggtttttaagcagctgcttggtattccattaattggacttatcgtgctttgatctgtccctagtgatggacattggggttgtttcccttcatttatatttgaagcttgttgcagtgacagtgtacacacttgcttgagcatgtgtgtgtctacgataaatcccaataagcaatttaaagtaatttaattcttatgctctcaacaaacctaagaggttatttttttagaggaggaagctaaggctgttgttttgatgcctttttaccactggacttgggactcaactgtttgatagtcatcgagtccttgactcttctcccctgccaggatttggcccctaagcccagggcccgagtctcctccatcttcaagggagagtgggaacagcacaggccttggcctcagtcctgctccccctgcttctagctgtgggatgggccaggtgcttcacccagctgtgcctcctgtgaggcacagtgtgtgcaaaatggaaatgtgaacatgaagatcaaaaatgtccctcaatgaccagtgctgttcctcagagtcacgtgggaactcatagaaagcgatattggtactgctctttcctctgtagcatggtccagatggctcatagcagggaccatgatatgctgggtgagcacccactgcatgcacccactgtgccagcactgagagactcctgtgggagccacagcaattctagggtcttcactggggactctgagacagcagggagctaggatgagggctgcagagtgttcgtctgccctcactgagcagaccccctggatggcagggagcagtcccaagccagatggatgcccataaccagccatttggctctcaatacataatatcaccacgtatcaggcaaaaccatcctgcccagagcattatctgaatttgcatcccatctgcagaagatacattcacccacttcttccattctgtcttaatcaaagtctttatgtgaattttccccattgagaagacaagccccttcctggcttagactgtacctgactgatcttttcatgagctccttgccaagccagaccacccccagcttatatggagacttggtgcaaattagagatgcccctgtgcacgtggcagccctgagcccaagcacccagtaaggcaaagggcctgatttgggacccctctgccactccaccaggcaatcagttgcttatttctaactttcccttccttctccacatttgtcccattccttcctctcatcatgaatatccccagaggcattcagcagtgcagtgaattaaatatagaactttttttttttcagaattgcagaacggattagatcaatattaatccaaacagagcaatgagcctgacagtttagtaaaagctcaataaagggtggcttacctcccccaaaataatctgaaaagaaagcatgtcttatttcagggggaaaaaaaaataaagtgacctttaaagaccaaattcccaggatacccagggtggaggtggaacatgggagtccacaggcagcctggatgtttccaaagatccaaagggcttttgcttcctcacataatgcaggaaacaaattgaacatgtattaagtgcttgctgtatgtgacacactgtgccaggtgctccccttaaaacagttctgtgggcaggcatgagaatgaatcccgatcttacagrcaaggaatgttaggctcagaggtttcaagctcacccatcactcagccagagaggacagatgcaggattcaatctcgggagtgcccgagtccacagaagttcctgtgctgaaggaccgaccacaggcacataaagagatgcgagacaatttttactggatttggccacctctcgaggtcggctttgccagctcttctcactgggggaaggggagggagaaagtagctagctccagggtccctaacatagaaccaccaaggacttgactatttttactcatacagcagcttgtctgggaagatcatgctctgtgacaagctgcaggcactaagtagcaatttctgtttcccacatattagcttgagtcatataaaactgacatggatgtggctcaaaaatagctgtatgtcagccattttataccatttgacttaaatgttattaattaacgtcacagccagagattattctctgagaaaagggcattgtagcctgaagcagagaaagcatacacgttccctggggttgagaactcatcacagcctgagacagcttaggttgtaaagccccggcccacttatcccaggagagtctgggtgagatgcaggccccaaagcagaggctgggaagcgagaagtgacacaccctggctgggtgggccctcatcttggtgagacaccacctgggtaaaaccatcatggaaagggtgtagtggggcgtggaaactccctcggttaaagcgtgagctttgctgtaagttgtggtaaggagggaggcagtgacaaccaggaggcctgttttgagggtttctgagggacccatctgtggtatcacgaggagacscccagaggagccgtgtgaaagggctgcctcccagccggctctggagtgaatgagcagcaagtcctggctgcgaaaagaaggggagtgcagcctgcaraagtgtcttcttttttcaattcctgctcagaaggaaacaggagataagaatagtggggaagtccaaaccaaagtgaactatagggctggtaatcgtagggggaattagtcacccggagactagcccagcagactaacggagccccatcctccatcttgaatcagtcagcccctctatgactgcagagtcctgaatgatggcaacaccttctcttcacttagsgttgtaggatgaccaacagtcctgatttgcctgggactgaggggttcccaatagatgggactttcagggctaaaaccaggaaagtcctgggcagcccaaaacaaggtagtcactctagagtgtatgactctgtctgatacctgctaagaaagagaaggacttgttgattataaggagaagaggaggtgaaatggttctcaaaaaacaaagatgagggcttccgggtgctgttctgcccaaggctctgggtctgaggcttctctctccaggcctagcttcatggaaaagtaaggggccagagggtggaaaaggtggaaacaaaggaagaggatggagaattgctttggggaagtttggactggaagtgtgaattacagctgcacccccaattcaccccatctcacccccctccccctcctgctcatggttctccctttctcatccacacattggtcaaactagctagcttttggagagattttgggcagtaaaagtaaaacagatctgtctcaagcttcaaaaagcctagagctggctgggcgctgtggctcacgcctgtaatcctagcattttgggaggctgaggcggaaggataatctgaggtcaggagtttgagaccagcctggctaacatgatgaaaccccatctctactaaaaatacaaaaattagccaggcgtggtagtgcacgcctataatcccagctatttgggaggctgaggcaggagaatcgcttgaaccccaggggacagaggttgcagtgagctgagatcgcaccactgcactccagcctgggtgacacagcgagactccattwaaaaaaaaaaaaatgcctagagccaaatgctcacagagccatttactgcatggctttgggcaagtcaaaggagtccgcctctcctgtcagaagagtctgttgcagtcttcatcacaagactgttgtggggattaaacaagatggcaagtgggaagttgggaaatgtagtgtgcacccaaccaatatttgtttcttcctgcctgcctacatatgaggccacacagaattccaactttgtttctctgataactaacacagttacttgtttttctttctgatccaggccttcaccatggatcagttccctgaatcagtgacagaaaactttgagtacgatgatttggctgaggcctgttatattggggacatcgtggtctttgggactgtgttcctgtccatattctactccgtcatctttgccattggcctggtgggaaatttgttggtagtgtttgccctcaccaacagcaagaagcccaagagtgtcaccgacatttacctcctgaacctggccttgtctgatctgctgtttgtagccactttgcccttctggactcactatttgataaatgaaaagggcctccacaatgccatgtgcaaattcactaccgccttcttcttcatcggcttttttggaagcatattcttcatcaccgtcatcagcattgataggtacctggccatcgtcctggccgccaactccatgaacaaccggaccgtgcagcatggcrtcaccatcagcctaggcgtctgggcagcagccattttggtggcagcaccccagttcatgttcacaaagcagaaagaaaatgaatgccttggtgactaccccgaggtcctccaggaaatctggcccgtgctccgcaatgtggaaacaaattttcttggcttcctactccccctgctcattatgagttattgctacttcagartcatccagacgctgttytcctgcaagaaccacaagaaagccaaagccattaaactgatccttctggtggtcatcgtgtttttcctcttctggacaccctacaacrttatgattttcctggagacgcttaagctctatgacttctttcccagttgtgacatgaggaaggatctgaggctggccctcagtgtgactgagayggttgcatttagccattgttgcctgaatcctctcatctatgcatttgctggggagaagttcagaagatacctttaccacctgtatgggaaatgcctggctgtcctgtgtgggcgctcagtccacgttgatttctcctcatctgaatcacaaaggagcaggcatggaagtgttctgagcagcaattttacttaccacacgagtgatggagatgcaytgctccttctctgaagggaatcccaaagccttgtgtctacagagaacctggagttcctgaacctgatgctgactagtgaggaaagatttttgttgttatttcttacaggcacaaaatgatggacccaatgcacacaaaacaaccctagagtgttgttgagaaytgtgctcaaaatttgaagaatgaacaaattgaactctttgaatgacaaagagtagacatttctcttactgcaaatgtcatcagaactttttggtttgcagatgacaaaaattcaactcagactagtttagttaaatgagggtggtgaatattgttcatattgtggcacaagcaaaaggrtgtctgagccctcaaagtgaggggaaaccagggcctgagccaagctagaattccctctctctgactctcaaatcttttagtcattatagatcccccagactttacatgacacagctttatcaccagagagggactgacacccatgtttctctggccccaagggcaaaattcccagggaagtgctctgataggccaagtttgtatcaggtgcccatccctggaaggtgctgttatccatggggaagggatatataagatggaagcttccagtccaatctcatggagaagcagaaatacatatttccaagaagttggatgggtgggtactattctgattacacaaaacaaatgccacacatcacccttaccatgtgcctgatccagcytctcccctgattacaccagcctcgtcttcattaagccctcttccatcatgtccccaaacctgcaagggctccccactgcctactgcatcgagtcaaaactcaaatgcttggcttctcatacgtccaccatggggtcctaccaatagattccccattgcctcctccttcccaaaggactccacccatcctatcagcctgtctcttccatatgacctcatgcatctccacctgctcccaggccagtaagggaaatagaaaaaccctgcccccaaataagaagggatggattccaaccccaactccagtagcttgggacaaatcaagcttcagtttcctggtctgtagaagagggataaggtacctttcacatagagatcatcctttccagcatgaggaactagccaccaactcttgcaggtctcaacccttttgtctgcctcttagacttctgctttccacacctggcactgctgtgctgtgcccaagttgtggtgctgacaaagcttggaagagcctgcaggtgctgctgcgtggcatagcccagacacagaagaggctggttcttacgatggcacccagtgagcactcccaagtctacagagtgatagccttccgtaacccaactctcctggactgccttgaatatcccctcccagtcaccttgtggcaagcccctgcccatctgggaaaataccccatcattcatgctactgccaacctggggagccagggctatgggagcagcttttttttcccccctagaaacgtttggaacaatctaaaactttaaagctcgaaaacaattgtaataatgctaaagaaaaagtcatccaatctaaccacatcaatattgtcattcctgtattcacccgtccagaccttgttcacactctcacatgtttagagttgcaatcgtaatgtacagatggttttataatctgatttgttttcctcttaacgttagaccacaaatagtgctcgctttctatgtagtttggtaattatcattttagaagactctaccagactgtgtattcattgaagtcagatgtggtaactgttaaattgctgtgtatctgatagctctttggcagtctatatgtttgtataatgaatgagagaataagtcatgttccttcaagatcatgtaccccaatttacttgccattactcaattgataaacatttaacttgtttccaatgtttagcaaatacatattttatagaacttccatctgtgtaatcttctttctcctattcaattatttcctgtggttaaattcattgccatggggaaaactgagtcaaagggcatgggaacacattatctttgcatacacacatatgaaagtcatatattacacaacctttactgagtcgtattatatacaaaacatgaacgcagatccagagctattccaaaggcaatgagaccaagcctcttccctcaataatttaaatgcagaagagaagtgaaggaataatcacgctttgcattaggtggtagcagaggagtactacgtgacttctgacctgcgtctttaagggacaggggttctccaggtaaagaaagaggtggcattccaggctgaggaaacagcatgtataaaggaagtgtgtgagagccacaatgtgagaaaactctgtgcgaatattaaaaggcgttagaagcggagtgggtggtaggaactttctgagctgagctgttagctgtgggctgagctaaaacaaccaatggagggggtgctggttctcctcagggtgtttacggggtttcttcgttattacctgatcctcattccaactgttgaaccataagacttttaattaaagtttaacctattcctggacttctaagaaggaggaaataattattttggcttgagaaataaaagaagagaaataaacactttcatttctagaagaaaattaaatttgtaacattaggaacctatatttattcattcattttgctgaataggacagaatagggagaaaataaggaagctcattgaaaaatccaaaatagcaaggatgttggtgtctaaataaaggaaggcatttttggaaaggacagctggccctcagagcacacctgaatcagacccactcctgcttctgaggtctgggcttcccaagagcagagggatctgcctgtgatgaatcccgacatattaactctctgcttcggcaggttgcttaacatctctgaggctcaatctcctcatcagaaaaataaagataaaagtagttcccacctggtagggttggagcagaggattcagtaagattacccctgcaaagatcacagtgcagaactggcaaagcaagctcgagtgaatggtggtgattatttttatacttattatttttaatattagactgagctttccccagcaactaaacacatgctatcttgtacttgccttttgcttttcttagtagcagaatcacagactcttgggtggttggagataactgggtccaaatccacatttcgtgggtaagaaaatggaggctcagagagggccagcaggtgccccaagatgccacagtgaattactgggagaggtagatccttgattcacagtctaccatctccttcctcatcttgataaaaatacagatcaatctgacctctaagagcagagaacacagaaggaaggtctgcaggcagataatgaggcagggaaaagcagcccacaagatagctgaagagtttaacagaatcaatctgcacatggacaggtgtgtgctgtgtggcacagcctttggcaattgccttttggagacatctgtatctgcaatgatagatggtgtcaactgagactcatcagcaaaggctgcagaattcccagaggcaaatgctatcagtggcttccaagaggatctgggtgggtgggtcaagacttagacagacaggccactgtggagggacagccacacccaggggctgcccagtgcttgggtaaaatgctgaatcccttccacataattccactcacttcatgcttattctatggtcatttaatgacattctaagagaatgtctccttcccagggaccttgccatcaagaaagatggagcatataggctttcggttactaagaagagctatcaacccttgtaatccattgcacctagagtgtgtacagggtctcatggtttttccattcacctctctctgagatgctgtccctgagcatccagggagagagttcacccaacaactacacctgggagcataagagcctgattgagaggtccaccttgggtagtacccgggcccaagatgatgcccatttgtgccttcaaaattggagcagtttgtcctaactcagcagctaattttttctccacctgcaccgtactcactggcccatggggaccacttcagtttcaacatgatttgtaatattgtttgcttaacttgctgagttggcaacaaaattttgggctactcaaaagtagtgtgatctgagagcaagtgagaaaagcgagtcttagcaaatttagaaatatccagtttctcttcaatatactcttcatccacaggagggccaagggccaagtcgttttctgagggatgtgtggcatcatgcttctatttccgttacattacagcagttgttaggcaacagggagtgttcctccagacacacccggggcagcgctggcaaccgcaaaacatgctcagcaggaagattactcttttactccatatttccttatttactgagatagaaacaaaaataacattttaatttgcatttctttgaatactaggtaagattgttcatttttcaaggcgtttgttttaaattatttgtacatttttctgattctaaaagaaagatactcagtatagaaaacatgaaaaatatacaatttaaaattaaaaatgtttaattacacaatattcaacctcccagagataactgtggtttaacactgaagttattttctgctatgaccatattttaaaaaaaatacataagaatagacatttttcaaaagaagacacacgaatggccaacaggtaagtggaaaaatgttcaacatttctaattattaggaaaatgcaaattaaaatcacaatgagatatatctcagatttgtcagaatggcttttatcaaaaagacaaaagataataaatgtcagcaagaacgtggcagaaggggaactgttgtgaactgttggtagaaatatgaattagtacaaccattatggacaacattttagaggtgtctccaaaactaaaaatagaattactatatgatccagcaataccacttctgagtatttacccaaaagatgtgaaatctgtttgttaaagagatgcctgcacccccatgttcattgcagcactattcacaatagccaagttatagaatcaacctaagtgtccatcaacagaggagtgaataagggaaatatggcatatatacacaatagaatacaattcagcctttaagaagaaggaaactctgttatctgcgacaacatggatggaattggagaacatgatgctaagtgaagtaagacaggcacagaaaggcaaatactgcatgttctcacttatgtgtggaatctaaagcaatgaaactcatagaagcagagtagaatggtggttacagatggtagggggtggggagagagcagagagctgatggtcagagggtacaaaatttcagctagataggaggaatatgttgcttttttctttttcggagttttattacacagtgtggtgaatctagttaagaatagagtattgcacatttcaaaattgctaagagagtaaatttcagatggtctcaccacaaaatatgttaagtatttgagatgatgagtatgttaattagcttgatttaattatttcacattgtattcataaatcataacagtgctttttaccccatagttctatataattataaattgtccatttacaattttaaaaactgaacaaaacctaaaagcacttgaatttcatcaataagaaaatggtccaataaatttcaatttagccatacaataaaatacagtataatttaaaagaatgagtcaattctataaatatgaccctaaagggatgtccataatatatccttaagtcaaaaagacaaatttcagagttaagcacatttttatttttaaatataaactatatatatatgtttatatatataaaataagcacatttttattttttaaaaatttgagatgagaacatatatacagttttatatcttcttttttcaattagcattatagtatgatcattttcccatctattatattcaaacatgattttgaatgattgcaaaggactcaataatagactttatccatccaagccctactgacagacatgggtgttactcccatgcttttctctatgaggagtgacagtatgatgaacataaatctttgcacatatctttgattgtatgaaaggaattagtagactaagagatttcagcatttgtaaatctcttgctagctactggaaatttacttttcagagagatgacactgtgttgctggctctctaagactcccaatccctgaccttagcaccacctaccttcctagtctttgaggtcaggatattgtgggcttttgttattgggtgacaaaccagctactgactttaagaggcagaaagaaaagacttctgttcttaaaaggagatggtaaggctgccctttagaagagagaaaagaagagggatgaggggatttttaaaacaggacccataacatcccaaaacagttattttaagggaacagagaccacttagcacctgggctaaggggacacaggacaagccatcagagccatacagcatcaggcaagagcaggaggtggagagacttgttctgaggataatggggtttcctagcaggagaagaagaaatagaggtgagcagagcaaccataaagcccttgtgcagtttcaatgttcaaaatatccacttctatacaaaacttaaacaacctgcaaaaggcaacagagagaactgattcaagatttagcacagttgattggactttcaacgtatccaccgtcattctggatatacttgtacatagccatctcagcataatgtagagctcacacctgtaaaataaaagaaagaacaaaatcaaacattagcaactttatttaaatattttgtaaattatctctcggttgcatttcacaaattatctatacgttacatggaagtaaaatttattaaaagttcaaaccatagtgactttatgcatactttataccttgggctttgctggcagcagtgatgctccaatcagccagggaaatccatgagttccagctttaagaaccccttggcatatcccggtactcttgctttggggaggaggatgcccagctgccagactgggaaacctaatatcaaaaggctcatttacacttccagcactactatatgagtttccctttgaaagcgcattatttcactgaggaaatagaaccagaaaagaacttccatggcctaccccaaccacatcttcccatcttyctgcagctgtgccagtgcactctgcagtccctcctcgtatcatggaagaatcgtccctgcgcttatctaaagccaaacctgccacctgaacgatgcatcccagcccctttaaccttcccctcctgcatttatcccctctcctgcattatctgtctctcccctctgctggataattggtatgcaagcaggccagaatacttctcatttttaggagcctccccttgataccacatctcccccagctcctgtccatgcagaggcactcaaaagagttctctccagacagctccctatgagcttgccccatgtgtaacccttctatagcccgcaacccaatgtccctggcctgtctttccccttgaggtgagctcattcttgaattttcttctcaaccctcccccagacacactcttgtcaaagtcaccagcgttctctgtgttgctaaatcccatggtccataatcaggcctccccttacttgacccattagcagaattaggcaaagtttcttgaagcagcttttccattcagctttggagatgccactctctcggttctccaacaacttcactggatgctcctctgcagtctccttctctggttccttcttgcctccctaacctctgtgcatcaagggcttcaggctcagtctccagacttatctgctcctctttccttc

SEQ ID NO: 5636 - DNA, 81924 bp, Homo sapiens
  misc_feature (1)...(81924): n = A,T,C or G, or insertion/deletion polymorphism (see Tables 1-2)
gcccccaccagagtggtacatttgtgtcaactgatgaacctacattgacataacactatcacacaaagcccatagtttacactaaggttcactattggttttctctattctatgagtttggacaaatttataatgacatctattcacaactatagttatcatacagaataatttcactgccctaaaaatgctctgagctccacctattcattcctccctccctgctaacccctggcaacctctgatctttttactgtctccctagttttgacttttccagaatgccgtctagttggaatcatacagtatgtagccttttcaggttgacttctttcacttaataatatgcatgtaagtttcctacacatcttttcatggctcaatagttcatttctttttagcactgaataatattccattgcctggtatattatgactattgatgtttaatatgatgattgatacagttggattattatctaccatgtttgtggtgactatttctctttgttgtctttgttctcttttcctattttttcttccactctttttttcacttttgtggtttagttgactgttttatatgattacattttctcttctttcttagcatatcagttatacttcctctttttcttttttacatttttagcagttgccctagaggttttttgtttgtttgtttgtttttggttttctttttgagacggagtctagctctgtcgccaggctggagtgcagtggcaccgtctcggctcattgcaacctccaccttccgggttcaagtgattctccagcctcctgagtagctggattataggcatgtgccgccacgcccaggtaatttttgtatttttagtagagacggggtttcaccatgttggccaggatcgtctctaactcctgaccttgtgatttgcccacctcagcctcccaaagtgcccaggatcccagccatagagttttaaatacacatttacaatgaatccaagtccactttcaaagaacactatgcactttacaggtagtgcgagtaccttataataacaaaataatcctaattctccctcccatcccttatgtctttgctgtcattcatttttgttatacataagcatttaaaaatatacacagaaatatgcatgattgaatacattgttgctattattttgagtgaactgctattttttaggtcaattagaattaaataatttatttcaccttatttcttctccagtgctcttcctttctttatgtaaatccaaatttctgacctatatcattttccttctctcttaagcaggggtccccagcacctgggccacaaactggtactggtacaaggcctgttagggctgcacagcaggtggtgagcagcaggcttcttagctccacctcctgtcagatcagcagaggcatgtgattctcataggagtgtgagccctattgtgaagtgtgcatgtgagggatctaggttgcacacccttatgagatctaatgcctgatgatctgaggtggaacagtttcatcctgaaaccattccccacaaaattggtctctggtgccaaaaaggttggggaccactcctctataggaattcttttaacatttcttgcaaggcaggtctactggcaacaaattccctcagtctttgtttgtgtgagaatgtatttatgtatttattattattttatatatatatatagagagagagagagacagagagagagagagagagagagagagagagtgtctcactatgctgcccaggctggactcaaactcttggatcaagcaatccctccacctcagcctcctgaatagctgggactataggcacgcaccactgtgcctggcttctctttacttttaaagaataattttgtgggtacagaatgctggctgttggtggcttttttctctcaccactgtaaatatttcattccattctcttcttgcttgcatgcttgctgaggaaaagttggacataattttcatcttttctcctctacaagtaaggtctttttccccgggcttcattcagaattttttatctttgatttcctgcaacttatatatgcatgcctggttgtagggcttttgtttgtttgtttggcatttgttctacttggtgttctctcaacttctgtgatctgtgatttggtgtctgaaattagtatgagggaaattctctttcattattgcttcaaatatttattctgttcctttctctggttattctcttcctgctatttccattacacatatgttataccctttgtagttgtcccatagttcttggagattctgtttatatagtcttacttatttttgcagttttggcagttattttcaagttcaaatattctgttttcagccttgttcagtctaccaaaaagcccatcaaaggcattctttatttctattacagtgtttttgatctctagtatttatttctttttagttctttcttagaatttaaactctctgcttacatcgacccatttgttcttgtatgctgtctactttatccattagagcccttggcattgtgatcatagttgttttaaatttctggtctgataattccaacatcccagtcatatctgagtttggttctgaggcttgctctctgtctctttaaagccttttttttttttttttttttttttgccttttagtatgcctggcaatgttttcttcatagctggacaggatatacggagtaaaaggaagtgctgtaactagacctttagtagtgtggtatacagtgggggagggggagaggaagagttctatagttctgtgaagaggtctcagtcttttagtaaacctgtgtctctagactgaatttcacaagtgcttctcagttcctatctgccccgatccctgttaggtgggacgtgatggctagagtgggctgcagctgggtattttcagttttcatgtggaaggctagaagagactggagttcttatttcccttctccggcatcatttaggctcctataaatcaagagcattaggctctatttaaacagtttttcccaagggcagactttgtttagaagagaagaatagagtgtccaggtatatttcaaatggttacttttcctatcccctctgccagggacatggaagcaggaggagatttttctctaataaaaagagaacaatatttgagaacctctttgaattcctatgggtaaactcatgaaagtgtggagatcatcccctccttatggctgagtcactctggaatttttctctctcaaacttatctacactgggcctccggcaattcaattacagttcaggttttcctgccctagccctggttcctgctgagatttcttttcttttttctttttttttttttttttttttgagacagtgtctctgttgcccaggctggagtgcagtggcgtgatctcaagtcactgcaagctccgcttcccgggttcacgccattctcctgcctcagcatctccgagtagctgggactacaggcgcccggcaccacgcccggccaattttttgtatttttagtagagacagggtttcactgtggtctcgatctcctgacctcgtgatccgcccgcctcggcctcccaaagtgctgggattacaagcgtgagccaccgcgcccggcccctgctgagatttctgcgccagtaaattgtgatttttgatattctcttgtttatctcttcagtttgccctgtaaccttatctctctacagatctaagaagagttattgatttttctatttgttcagatttttagttattgttaggaaagattcatgacttcctggctccttacttgcttttctcattcaatattccctatgagtacatattttatactttaagcaacttgttttgatgaacatttagattctccaccctctctttttttgattacttagaacgtttaggccagacacgatggctcatgcctgtaatcccagcagtttgggaggccgaggcgaatggatcgcttgagcccaggagtttgaggctctacaaaaaaattaaaaaaagaaaattaggtgttaatccttgaccttatatttctcaaagttttaccaagagttcccccggactccgagtcctaccaccagtgccaagagaagtatgcagcctaaaggtgcaccctgccccaagtgagatctcttagttccacagctgacctttcctggctcttctggtgagtggtatggaaaatgatggagaaactgccatatgttttcataatggtcagaccaatttacatttccatcaacagtatactagggttcccttttctccacacccttgccagcacttatcttgttgtttttttttttttttttgtaatagccatcctaataggtatgaggtggtatctaactgtggttttgatttgtgttttccagatgacttgtgaagttgattcagttgtcatatacctgttggccatttatatgtcttctttggaaaagtgtctgttcaagtcctttgcccactttttaatttgttagtgtatgtttgctattgagttgtatgagttccttatagtatattgtggatattaactcttcatcagttatatggtctgcaaatattttctcccacactgaatgctgccttttcattttttttatgtgtatacttgacttttaaaatcagtaacaaggtccatacaattcacatttggctgatatgcctcttgattctcttgtaatttgtaagttcctttgactcctttccttcttttaatttatttattaaaaaatggaatcatttgcactatagaatctcccacattctggattttgacaattgcattccaatggagtcctttagcatgttcctgtgtttcttataatccggtagttagatctagaatttgaccagatttaaggccaattttttttagctaggatactgcatgggtggttatgttttagctaggataccgcatgggtggttcatgatatcatgaaaaaagcatgttcttaaagcaatttaagtgacagtacaaaaggttgggtcaggtggggcacggtagctcatgcctgcaatcccagccctttgggaggccaaggcaggaggattgttgaagcctggagtttgagaccagcctgggcaacatagtgagaccccgtccctacagaaaacatttttttaattagctgggcttgttggcatgtgcctgtagtcccagctactcaggaagctgaggcaggaagatcgcttgaacccatgaggtcaaggctgcaatgaatcatgatggcaacactgcactctagctcaggcaacagaccaagaccctgtctcaaaaaacaaaaaacaataacaaaaaaagaaaaggttgggtcgatgacagtttctagcgactgatgccaccactctgtttacagaatcacccctctcctctggccctgatgttttatcatgatatcatatttacaatgcctggcaaaggcttcattcccatttggcatactacctctcaggcaaatagaacttttgaaagcctgtattatgtatataacatataggctcacactggataagctattttataacctgacttcttcaaagaaagtttacatcatgtttaaaccatgttttagattctatatttttaattaaaaatctaaggaagaaggatatttcacatttctataaactctaagatcttgcagcagaagcgaaactgcacatttaggggtgcctgcccctctactgatgctgccctttgtgggtcatatgtccttaggaaaatgaaagactgtgcactcttgatttgttggccagctctgttgacatctttcagtggttccttttatgtatggccactcctacagaggcctcttgtactttgggaactggtgagtctccctgtccctagggctttttagtcacatgtccatccactgtttcaatgtaacatgcatctaggcaaggttaacgattaaatggttgggatgaaaggtcatcctttacggagaacatcagaatggtagataattcctgttccactttctttgatgaaacaagtaaagaagaaacaacacaatcatattaatagaagagtcttygttccagacgcagtccaggaatcatgctggagaagttctgcaactctactttttgggtgagaaattacatttatcttcatattgactcttctcagactcagaacaagtggtagttagttaacttagggtggtcaccaacaagaaccagaaatgttagatgtgcaattggtctaaagctcaggctttttagaaagcataattcataatatctccagaggatataagatctgggaaatgtaatgcaaattattctctgtcatatgtttttttatatcagactcttgtactagctagtcgcaaaattgccttctctaaagagaaacaggtaaaaaccttccaatttaatccgtgtgaggaaggagaattgttgttgcatactttgctrgtagaaggaagagaagatccgtgactgagtcttgctgagacatgttgatgttgaaatgataatgataagttctagaactggcamctaatgatatggactagaagttgagtctagggatgcaactttgggcatcatgagcattgaaataatttttgaacaactagagttgggtaatattgtttttaaggaaaagaagagacaccacttagagggtgaacaagaacagtgtaacattacggagtcatagatagcaaaaaatttcaagataggggccaatcaacagtatcaaaggtctagtggaatagaaaacaaaaaaggaccttagatttagtgattttagtaagggtttggtgagaaagtatcatctgcaaactcctagcctcagcatcagaatcacctggggcaataaatgtagtttaagtatcttaagtgattcttctgaattctaacatttgataaccttatatagaggtgagaggggcagggatgagatagcagagcacctgggcagcacctcgtgtcttagaaaggacctgggtcccaagaccctcgaggccaggagtgtataccacggcaaggtggatcttcatgggctatagtatctagacaggccatctcttgagaattctttctgagaactacctgacaaactttcttggtcagggcatcgcaagcaattctttaaagagtctgtataaataatcatataaaacaatttttaactatttataggaaaagaaaaatccacactcatgtgactcagatacaagaattggtgcccaccccccaccccccaacttccacttcacaagacacttccatttatcgcagaatgcaaagactgcacaaaacttgctggttggaagccttctgtccaacaatgctgttgtcactgctgtgctgaaactggccaggtttttaatgtaagcgctttgggccatcagagagcaaatgttacagtatgactaagcattctccctgcatggcgcctgcatgtttgaatatctgccagtgagttcagttagtgctagaaacttgaataattttttatatcccagggaaytattctgtcctttaaactggggaacagtccttcttcatcctataatttggcaaatgcagtggtgaggtttactcagaatagctggtacaaaattcacttagaatcacaagaagacacgtttttggagggtgggttggccagaaagtgactacatttgtcattaaatggtgaatttgtatccatgtgcacaaataggaaaatacrgatagttaaagggtaaggctggatatggatatggagttgaatttaaattgtgtgaaagcagtgggatgtgctgcagggtggttttctgtcttcacaatgcatgtatgcaacaatccttcccctttgrtctccagaattcctcattcctggacagtccggaggcagacctgccactttgttttgagcaaactgttctggtgtggattcccttgggctwcctatggctcctggccccctggcagcttctccacgtgtataartccaggaccaagagatcctctaccaccaaactctatcttgctaagcaggtaaagttaacaccactgtttctgaactctaattccttggtgcacagtagagacattttcttggtggttagtgttctcttccttgtctttaagcagctgtcccaggtgccattgtctcaggtagagccaggctcaaggtttccctcacgggtcccttgctgcatttcttaaatcaaagtggctttgatttttgcataagaatggtgactcttaattcttgtggatattgggttccctaaacacaaagggcatataatcaatcaaattatctttatagcatttgagaaatgaacactggatcacctgtctttaaacagctctaataaatcagtggactgtaattcagttggcatctacctcgtgaaaatgagctagataatggatctcctgccccactgaggcaatccaactatcactcatcttcaaaaacttgggtccgaaataaggtttccattttccccgcatatttgatgagtcaggatgatcactcacagtagaaggaggaggggtaagtgtgcacagtgacaagcacgagtagggaaataatggaaaggacaggtctgcgggagaggcccaggaggggccaggaggggaggagccctcagccagctgcaccaactcactcagggaagggtcttgtgggaacccaagaccctcattcgaggttgtaaaattatctcataaaatcttccatctgcttcttttcactatttttttttctatctctccttattatcattattactaccattttaaatggagtctcactctgttgcccaggctggagtgcagtggcactrtctcggctcactgcaacctccacctcctgggttcaagcaattcttatgcctcaacccctcccgagtagctgggattacaggagcacgccaccatgtccagctaatttttgtatttttagtagggcgggatttcgccatgttggccagactggtctcgaactcctgacctcaagtgatccctcctgccttggcctcccaaagtgctgcgattacaagcctsagccacctgcacagcctctgtcagtccttatctttcaacaggtttttagaaaggcaaactagattccattgttctactagcatacctaacaatgactcaggttacctggaatcttaaaggaggaaagagcttggccaaaggaagtggatttcaccttgacactttgaggttggggttgatcgtgggttttattagattctgattcaaaaaagaacagtctcagagcttgggacagtgtcactgtctcccttgttgacctgagtgcccatcacaggacctagcatgtttcaaacactcccactggaatacaacatttgttgaatgttggtgttaaatgcattctgggaatagtggttgattcaagagtaggttagagctgacctcagtggtacatacctgtaatcccagttcctctggaagctagaagtggtaggatcactagaggccagcctggcaacatagtgagtccccatctcttaaaaaaataaaataaaataaaaataaaaaggaaagaaacatatgttagactttgaacattctgaacattaaacaactctgaacatttaataacattctcagtacccttggaattgagtcattgttcgaggttagaagcaatcaagttgggaggcttcttctactttctggagcttccaagaagaagctggttaatgagcaaaccaatatcccatcctaataaaagctattagttaactcttttacaaaatactttattgagatataatgtacataccatacagttctctcatttaatacaattcaggccggatgctgtggctcacgcctgtaatcccaacactttgggaggccgaggtgggtggatcacttgaggtcaagagtttgagaccagcttggccaacacagtgaaaccccatctytactaaaaatacaaaaacattcggctgggcatggtggctcacgcttgtaatcccagcactttgggaggccgaggtgggtggatcacgaggtcaggagttcgagacgagcctggccaacatggtgaaaccccgtctctactaaaaatacaaaaattagccaggcatggtggcggatgcctgtaatcccagctactcaggagactgaggcagagaattgcttgaacctgggaggtggaggttgcagtgagctgagatcatgccactgcactccagcctgggtgacagagcaagactccgtctcaaaaaaaaaaaaaaaaattagcctggtgcagtggcacacacctgtaacgccagctactcaggtggctgaggcataaggatcacttgaacccgggaggtggaggttacagtgagccaagatcgtgccactgcactccagcttcagactctgtctcaaaaaaaaaaaaaaatgcaattcagtttttttcagtatattaacacatatgtgcaaccatcaccacagtcaattttagaacatttcattatctttaaccccgtctcctccttccccttatccttagcaacygctaaatctcttttctgtctttatagatttccctgttctagacatttcatatgaatggaattatataatatggttcttttttgattggcttctttcacttagcacaatgtgttcaaggtttatctatgctgtaccattgctataccatgtattgatattttacccctttttttggggggacggagtctcgttctgtcgcccaggcaggctgccagcatagattcctgccaacagtgtgttaaagtgcatgtccttgcaccattgtcagcattgagttattttcaacttttatgtgtaaacatgacatctcactgagttgctttgcatttttatgaatactaacgcaattgtttttttaatttgttaagtgtatttcatttgcgaattgtctgttcatatcacttccttattttttaatgggggtgtgagtgtatttaacttatcttttgaacggataattctcagaggatcacaaagttcaaaaagtacaaaaggagctgggcatagtagctcatgcctgtaatcccaacactttgggaagctgaagtgggagaattgcttgagcccagcatttcgagaccagcctggccaacttggtgagaccgatctctacaaaaaattaaaaaaattcaccaggcatggtggcatgtgcctgtggtcccagctactcgggaggctgaggtgggaagatcacttgacaagttcaaggaggtcaaggctgcagtgagccatgttcacactactgcacttcagcctgggcgacagaggtagaccctgtctcaaaaaaaaagaaaaaaaaggacaaaagggtacccagtactctagtcactcattcatgtcttagttggcaaccattgataccagttcctcatatctccttccagaaatagcctgtgcttttacaaacagctacgtacatatattttttcacacaaatgctagcgtcccatatgtgcttttctgtgtcttagagctccttccattttagcacataaaaatctgcatttttctctctttttgtggatattttattcatttgtacctaagcagccaaactcgtactgataccaccatgcagccaaggttactgaaacctctttgattagacttcagtcatatcccacccccaaatmgacccaataggtacaatgaaaaccagtatatcaaggcagaatacagagctgtaaaacaagaaaaatcctatgagggagggagggaaaaaggaagaattccgccactacccagactaaaatcgagttaatatattcatctccacacgttttcaggctgcatgttcatggagtaatttaggaataaacctatgatttgtgaagcactgaaatacttagtggtttgctgtattacatcatagctttccccagcagtttccaagacagcttccaaaaactggcaggagaatttcrctggagctgcatgcaggactaccaagattcctccccacagttatgaaaccgatttttccgggactggttgttctagtcttctgggtgccaagtctgacttttctgggaatggttgatccacactggaaggtttccagatgtgttcccyaggcattcctggtggtaggaagagtagaggcctgggtattctgtagatgctgagccctgagtcatattgttgcttattctttggtcagttggytttctaccacctcttagctttcattctctgtaactagcttgtatgctgtttgtagctaagattcagggtattggaaagttcttgcrgctgctggaggctgcggtgtttctgtctctgaaatccatcattaattacacacagctgggccggagagaacatgattctggtcttctgtttcttctcctggatcttatcttcattcttcactgtgctcttctctgcagaaatgtgtagttttactctgggactagtggaagaattagasctttcctgaataaatagatccacggaggaaggaagatgagagagcctctgagtgggacacctcctcatatgtcatttgcaaggatggataactttcatcagggccacgagtcacaggcattggtgaaagagtccctagaattggatgctttagaataaggcaggctttggagacaagctggactcacactcatgttattgaaaaggagcggggaggggcgggtgcagtggctcacgtctgtaatcccagcactttgggaggctgaggtgggtggatcacctgaggtcasaagttcaagatcagtctgggcaacatggtgaaaccccatctctactaaaaatacaaaaattagccgggcataatggttcacacctgtaatcccatctccttgggaggctgaggcaggagaatcacttgaacctgggaggcggaggttgcagtgagatagcaccactacactccagcctgggtgacagagcgaaactccgtctcaaaaaaaaaaaaaaaaagaaaaaggaaaagaaaaagaaagaaaagraaaggtggaggaaaattaaagagctggactgtaaaaatggctaaggctttaagatttaagtatctaggtagaakatcttagagaaatatgtaaaatttctccaaatgtaaaagtatcaaaaagccaggatgaagtcagtcccctccacattactgggagacaaccagctcaatcccacaaaaggtctgcttctttctttgtaatgattccttgagatgctgttatttgaatgtaccataatttatgtgtcctrtatgacatgaatttcattggtttctaatattttgcatcatgagcaatgctgccatacacagctttgtatatacttgtgtatacaagtgtgtctataggataaattcccaaaaatgaaatgactgagttaaggatatgtgaactcaraatttttatacacagtgcaaactgccctcaaagaggctttccttggtctcatcaactttgtatcacattttttgatgtttgctaattggttaggcaaaaatgttatgtttcaaattatatatactttcaaattgtattctcatattaatgaggttaagcacatgktcatatgtttaaaagccttttgtgtttttttaaatccatttaatttatatactcatttttttacattgagttattagggtatttttaaaaattactttgtagaagttctttataaagttaactggtcttttttgatatgaactgctcagtgtatttcaaatccattatatgagtttaatatatataatcttatggcaagaccccctccttttccctggcctggggaataggctgctggttagtaccctctagtcatctccaagggcaggtgccttacctctagcttgctctattttacctcctaatttacctaaaggcaaccatagcttaccgcctatgaagctacatttttttcccaaaacctcatagtctcttgtgaggaaaacaccctatagtgtattatatacttgaaaaaatgcatttcagttattaacatgtctttgactctactccttactaaataatagcactgatcctattagttaaagtaaaggtgcattcatctcctttcttggctggttttcattacaaagggcccattatctctgcctgtgccattctggataaattagacttaaaagaatgaataagggtagatggataggggcataaaagcatgaggggaggggagatggtgccacataaatatcttcattttgatggctaagatgatggtatactcagtggaggcagtaattttccccctgataggtggggatgtgggcctttaaaacagtgtaatgtgtatcatgtcttctgagctcataggacaaatactgattggcattgtctgggatcaagactggggctgagtgtggtggcttatgcttgtaatcgcagcagtttgggaggccgaggcaggcagatcacctgagatcaggagcttgagaccagcctggccaacrtggtaaaatcctgtctctactaaaaatacaaaaattagccaggtgtggtggcgcacacttgtaatcccagctactcgggaggctgaggcaggagaatcacttgaacccagaaggtggaggttgcagtgagccgagactgcgcctctgcactccagcctgggcaacagagtgagactccgtctcaaaacaaaaacaaaaaacctatggcctaagaaagggaatagtgccttttaaacctagtactttctgttgctatataacaaaataccccaaaacttagcagctaaaagagaattctttaaatcttaacagtttctgtggatcaagaatttgggagcagcttacccaggttctgcttcaaggtctctcaggaggttgaagttcatatgagctgtctggggttactggcatgtgaagtcttgactggggctaaaagatctgcttctaagacgactgtcacatggctggtggcaggaagcctcagtttctcactggctgttggcggaaggtctcagttccttaccaagtggacttctccaaagagctattggagtgtcctcatgactggactggtagctttctccagagtgagcaatcggagacagagaacaaggagaaataatccacattgcttttttatgccctagccttggaagtcacacgctgtcacttctgccattttctattcaccagaagtacatccctaagtccccagcccacactcaagggagagggaattaagctctgctctttgaagagaggaatatcaaaaaatctgcagacatattttaaaacttcacactcagcattcctcaaaaacaatgatcatggcatactttgaacattattctatcacttgaactgtatgtatccattctttccagaaatatttattgtgttatctgaatcactgcataccgyttttcctatccatcaccggaaaccattctgttctaagagccttataaagaatgatatcctcttaacagtggtctttttcccttctcaggtattcgttggttttcttcttattctagcagccatagagctggcccttgtactcacagaagactctggacaagccacagtccctgctgttcgatataccaatccaagcctctacctaggcacatgggtaagacctataccacttctgccctgtttaccttttcattacccataggcatctaggtgaaatgtactctttggggatgaaattaattccaaggtcatctgtctttttcgcgggatccatagtgaggcaaagcttggttggaatggggtgaaacaaattttagcttttcatcttcatttgagcattaatgtatagaggcttcttcctaggttaagtattagctttcatgactaagatgtatatcttatgtccgcacatcttgccatctaagggtcacagaagagagctaagtttcttgatgtaaaacaatattttaaatctgtaaatattgtttttaaattgattgatgactttaaacaatggatcagtgagcttagagtttatataaacttgatatcaaaaaactaatgtctctcttgcaggcattttttcagggggtggggcctagacagtgtttaaatagcaattgaattaattgccatcaattcagtggcaactaatgacacataattatttgaactttcaaactttattgaaaaatcaaaatgtctggcaatcgcaaacctacgttcaggcagagcaatgtcagctgggcctcagtagcagtggctcctttagaccatgtgctcggcacaatccttcctgggcaaatgttataaatcatggctctttccccaccagaatgctgttttaggagcacagcactaggtctaggaaatcaacatttaatttattatatctaatgtgagatggtataaggcaagattttttwaaaaaattaattgcttaatcttatattagaaaatcaagctacagacaccttgcacctaattaattagaacctgccttccgaccttactactgcaatgtctgaatttaattttcatgggtcctggaaaggtttttctagctctcaaagtaactccactaaaatgcagatagtgaccttctacattcttggctaacatcccactcaagtgtggtccatggagatgaggcactaaaagaaaaagctggatggcatgggggtgacatgttcaacctggcatctgtgtgctctctacctggccagattagtcacgacagtctcctccctcagccctcctttcttcccatgttctctgacatccttctcccctcagtcytcggttagtggcagtattcttcagaacatcatgtgaatttctctccagctcctggttttgctgatccaatacagcagacaatggtgtgtacagaaaaactcctggttcctgtccctattctggattctctcgatactctgtggcactttccaatttcagactctgatccggacactcttacaggtaaggaaaaaaagagtggatgacatgaggaggtaccatggggcaacctctaactcatagtaaatggcatcaagttgagctccaggatcgaattgtattagagggatttgatcataggctttaatcacaagcattgatatatacgggccatgtagacttcctttggacaaaaggctcatttttcctctttgtttttttcctcatagggtgacaattctaatctagcctactcctgcctgttcttcatctcctacggattccagatcctgatcctgatcttttcagcattttcagaaaataatgagtcatcaaatgtgagattctaaatatgcccatctcatatattacttaattggatgatatcttaatgaatataactttaagatgtctgggtctcacggaggcgccacaagcccagaataaggtagtacagaccattttatgacaaggaaacagatagtgatgagagtagtaaaatactgacttttactttcacctaccaattgtcagtgtaattaattcattcatatatctatgccagaaaatctgattatcrttctactagtggctttagggtctccaaataaacacatgttgataagctgactttaacatcatatctagtttctagcacaacattatatcattaaaaaatcagtttctgattttagagtcccatgaagttcctgtctccaattggtttacatttcgatttttttgtgtctttcagaatccatcatccatagcttcattcctgagtagcattacctacagctggtatgacaggtaggaaagcctggagtatggattggctgtatccttactctctcactcctctgaaagtgtcagaaagattttttattttattattttttttttgagatggagttttgctcttgttgcccaggctggagtgcaatggtgtgatcttggctcactgcaacctccacctcctgggttcaagtgattatcctgcctcagcctcgcaagtagctgggattacaggtgtgagctaccatgcccagctaatttttgtatttttagtagagacggggtttcaccatgttggccaagctggtcttgaactcaagctcatgttccacctgccttggcctctctacgtgctgggattacaggcatgagctacagcgctcagccgaaagattaattttttaaaaatgcctcctgtgacctccatttctcttctacttagagtcagagagtgttaaaacttacagaccaacttaatccaagccctccattgggcagattgggatgctgaggagaagatggagggggatttgtttttggtagcctaggggtcccacaggagaaaagaaaggaggcagtaggacaggaaaggaaaaatttggaggcaggtttggagggtaaggggtgaaatagctggcttgggctaccagaggatctggagcaggcacccttggcctttatagttgcagggacccatttggcaggctggtgaagtctatgaatcccttctcaggaagtgttttaaatgcatgaaataaaatgaaagacattggattctaaagaaaaccaaatatattgaaatatagttaccaaaatattttaaaaacaaatgtgtgatttagtaatacaagtacttctttattaatgcattaaataacaagatctagtgatgagtctaataattaccataattttaaagtagttatgagcataagtgagctatgagaacatgtgggatttctcagcctggcacggtagctcatgcctgtaatcccagcactttgggaggctgaggcgggtggatcacctgaggtcaggagtttgagaccagcctggccaacatggtgaaaccctgtctccactaaaaatacaaaaattagcctggcatggtggcatgtgcctgtaatcccagctccttgggaggctgagacagaagaattgcttgaacctgggaggcagaggttgctgtgagccaagatcgcaccattrcactccagtctgggcgacaagagcaaaattccatcaaaagaaagagagagagagagagaagaaagaaagaaagaaggaaagaaagaaagaaagaaagaaagaaagaaagaaagaaagaaagaaagaaagaaagrtagagagatttctaaatgctagatttcagttagatgctattacaaataacaatataatttaggccaggtatggtggtttacaactgtaatcctagcactttgggaagccaaggcaggaagatcacttgagcccagaagtttgaggctgcagtcagctatggctstgtcactgaactccagcctgggcagagaaagaccatgtctctaaacatatatataatttattttccatccatattctcaaactcctggctaagagccctgatcaagagagatggcacagtggctggacatagtggctcacacctgtaatcccagcaccttgggaggctgagatgtgcagatcacttgaggtcaggagttggagaacagcctggctaacacggtgaaaccccatctctactaaaaatacaaaaattagctgggggcctggtgcagtggttcacgcctgtaatctcagcactttgggaggcagaggcaggtggatcacctgaggtcaggaatttgagaccagcctggccaacatggtgaaaccctgtctctactaaaaatacaaaattagccaggcgtggtggtgtgtgcctgtaattccagctacttgggaggctgaggcaggagaatcgcttgaacctgggaggcagatcttgcagtaagccgaggtcgcgccactgcactccagcctatcgacaagatcgcaactccgtctcaacagaaacaaaaaaagaagaagaagaacaagaagccgtgtgcagtggtgcaaacctgtaatcccagctacttgggaagcttaagcaggagaatcactttgaagccgggagatggaggttgcggtgagccaagattgcgctactgcactccagcctgggcaacagagtaagactctgtctcaaaaaaaacacaaaaaacaaacaacaacaacaacaaaaaaccacacacaccaaaaacaaagatgccacaggggctgctttatttcttgagggcatcaaggaggcccccaaggagatgccagagtggcagagaggcagccagtgtttgaggaggaaggagcaagagcagggtaaggtgatgctcttttagctgtcttccccttctcttgtcttctaacacattcttttgcccccacccattccttttgctgctctccccactcctctgtcaagttcaaagggccaggagatggggatagtcccattcttctgtccctctatcccagaacctggaggtaggttctgatagaagtggtggagatagcctctgacccagcctggggktctcagcctgtggttcgctcttgttccagcatcattctgaaaggctacaagcgtcctctgacactcgaggatgtctgggaagttgatgaagagatgaaaaccaagacattagtgagcaagtttgaaacgcacatgaagagagagctgcagaaagccaggcgggcactccagagacggcaggagaagagctcccagcagaactctggagccaggctgcctggcttgaacaagaatcagartcaaagccaagatgcccttgtcctggtaactttcccttgagtgtctgtgtgagcgcrctgcatgtttcaggcaagggtacatcagcatcatggcgattctgtccttacatttttatagcacttcatacttctcagtgcacttcatattattaatggtattcacaatactgatactaccttagtgatggatacatggcgtgtaatgtactgttctctttcctttggggtacttttgaaattttccagaatgaaacgtggttttgaamaaaataataccttagcatttctagattttgcaccttggtacaaattagcataagcaggcaatttgttgattcattcacttgaaaatatttattgagcacaactgtgtgtcagtgaccattctgggcactaaaagattgctcatcttttgtgagctagaaaatatgtagtaagcccatacataggttactctttgaaagtaataatagctattaagaaaataaaacaatagtgtatttggagtgaagtgcgacttgagacagggtaacaggggaagcttctcagaggagatgacatctgaacagacactcaaatgatgagatcaggccctctgagggacagtcagagggaagtgtgttccagtcagaaggagcaggcatgcgaggctgagaggggaacacatttggcttgctcagggaatggcaagaagatccaggacagggtgcgcatggggtgagatgggctcaaggaagtggacagggattaagctatgtggacccctgtgggccacaataaggaatctggactttgtctgaagtctgattgccagcggaagattttgagcagaggagtaatgagactggattcatgctgtgaaaagcttacttgggcggctccccagaggatggatcgttgtgggcaagaatggaagctagaagggaggccagggcagttgtcctggcaagggagacccatcagatgggacctcagtgaaagacattgtgagagagtatcactggtaggctgagaagctggaatttggggcaagatgagactcaggaggacataatgaggaggccaaagcatagacagaggctggtgactgagtcgtaatgccccatgtattagtttcctagggctgccatgatagagtaccacaactggatagcttaaaacagaaatgtactgtccccagctcaggaggccagaaggctgaagtcaagatatcagactcgctcccgctgaaacctggaggggaaaatcctctcttccaccttctagtgttccccagcaatgcttggcattccttaacttctggatgcatcactctgacctctgcctccaccatcacaggaccatcttctctctgtgtctgtctcttctcttcttgtaaagatatcaatcatactgcattagggccccagtgacctcatcttaatttggttacatctgcaaagaccttctttcgaaataaggcacattttaaggtattgggggttagggcttcaacatagcttttgggggtggggatacaattcaacccataacatctcacagcaaccatgaaaagaacaagcatgaaaagwacagaaaggacctctcagcatcatgcccaggcccttcactctcaggactgcccctcaggcccccacgcagatgggtctctctttttacatgggactcttaccagcttagttkcctggttttctaatctaaaatagattacaagtatcagttaggagcgggagagtggaacagtgaaggcagctagaagggcagaagcaactaggccagggagagatgatcaaaacctgtacagagaaggccacggggctcacaggctgaccaccctggagctgctcaggccagtaacagacataactctgtggacactgttgtttggttttgtacctaggaagatgttgaaaagaaaaaaaagaagtctgggaccaaaaaagatgttccaaaatcctggttgatgaaggctctgttcaaaactttctacatggtgctcctgaaatcattcctactgaagctagtgaatgrcatcttcacgtttgtgagtcctcagctgctgaagtgagtctccaggcctcagatggtcctttcmgggcctcctctgccaccctcctttttgccactgtgtatgcaagcaggagcttttcttaaattcccattttttaaaaatgctcgtaattttcttccaccttaaccttacagcattgtgttcatgaagaccgcaggcagttttcaagatgtatgatgatatgtactttagcctctctcttttccatgtctgtctcctcatagggggccgggtaattgttaggggctgtttcttgttaaactgctaagggctgagccagrtccaagtggcgggtagcatacccctggagagtaactgacttcatctctccatcgcagccttccacgggaggttcaggttaatcttgacaagacttcacaatctgtcatgacctgtggagtgaaccacctgcagggaaagacagggccaaagcattgcagtgacagctaggtggagcatttctgtcattatccattctcacagccatgggttatcaaccctaagctcttgctgctcatctccaagtaaaagccagaacgccaggctggacatggtggctcatgactgtaatctcagcagtttgggagattgaggcaggaagattgtttcaggccaggagttagaaaccaggctggtcaacataacgagaccccatctctacaaaagaaaatagttagctagatgcgatggcgtatgcctgtagacccagctatttaggaggctgaggtgggaggatcacctaagcccaggagttcgaggcttaatgaactatgatcctgccactgcactccagcctgggcaacagagtgagaccctgtatcaaaaacaaaacaaaacagaaaggacactggtaaaactgtagacttaggtctttcaaaggctttggacaattctggtcacttttgttacctacagtgtaaagatagtgtagtctagctggctgtgcatgaggagagaggcatccttggaggmcttatgggtataactaacttggcttttctctggcagattgctgatctcctttgcaagtgaccrtgacacatatttgtggattggatatctctgtgcaatcctcttattcactgcggctctcattcagtctttctgccttcagtgttatttccaactgtgcttcaagctgggtgtaaaagtacggacagctatcatggcttctgtatataagaaggtaagcagaatacggcaggtatcaccaaagaaaatcccctcagtaaatatgagcattgattccaaggttgaggaaaatgtgatggaaatggtaacttatctcaacacttaatgttgactggccatacagcctcctttagatgtttctttggaaattagattttgagaagtgtgttcacagacaatgggtggagaggccaggagggaaaacgtactccccagggagaagcctgcaagctgttctggtgctcaggatccaccttgcagccctgaaggcttggctacccatccatctcttcctgcctctcttgacaaggtgaaatgccttggaaaagaatataaggtcagaaaagaagctggtgaagggtcaaactcttaaaaccaccaacatttaactcaaatacttaatgaaatccagctcagagacctggtgtatccatctcaaattgcagtcttgccggagctccacctccccagaccaaatttcacctagcaacttctttttctaacctttagtgctaacctaaacctcctctgtctgacttcttttttcagtttgtaaatacattcatgctgattactgagttctgcagacctggaagctttttcatttccttaagatgattttgctcatcttccctctgatacattgtttgttgttgttgttgttttgttttgttttggttgtttttgagatggagtctcgctctatcaccgaggctggagtgcagtggtgcaatcttggctcactgcaacctccatctcctgggttcaagcggttctcctgcctcagcctcccaagcagctgggactacaggcacgtgccaccacgcccggctaattttttgtatttttagtagagatggggtttcaccatgttagccaggatggtctcgatctcctgacgtcatgatctgcccacctcagcctcccaaagtgctgggattataggcatgagccaacgcgcctggccgatacattgtttttaatggttaactttctcaaggaaactgtatgttcctcatgtcctccataccaagatgaagtcccattttgttccttaagaaatgaaaatacagtagttatgatcagtgactacaggcttgaggagaaaattcatccaggaggagataggttccaatctttttataagttggaacactagttgactttcttcctttttttcttccatcactggaaagttccatcatagtaacttctctattacagttcctacttttctcctttgctttcctctctagaaacaccactgtgtctttgtcttccctgagtagatgttggttcgttgagagacagtggcagataatccaagtgtctttaaatcagaagtctagtcaagtcctttgaactcccagataccccccaactggaatttgccttcctccagttgatttttaaaatctccttatttcttctggagatactgagtttctgctggtttacaagttatgaggtcactaaccagcctgtctcagccattgctagtaaagtacacttctacaattttttcataattgtgattattcattcgcactattttggttcttaatattccaggttttgcaactattacaattaataaagagatttataaaatagaaccctcaatgacacttttattcaaataaatatcgctattagaagagtggaagaaaattactaatttatatgtttagacaatgcttcactacttatgaaacattttttacattcattatcaattcacagggctattgccctgtgaaataagtacattatacctattttacagagaaaaatcaggcttagataatttcaatgcctgcaaacacatagccaggagttgtccccagacaagggctactgggactgtatttattgaaaatagaaatatatagtgattaccttgaagggcaattagatgttgttagttgttgtttttttttttycccctcttccataccaaagggaaggcatagcagtgggttgattcctctagaaccttggtggtctaacattttagaaaactttcttctttttactgtacagccaagaatcctaatatgttccaaagaatgtattggtggattaagatgacagtaatgcttctaggaggagatggaagtagtatgggccacttgtagcctgtacactgtctttgtgggaattacaaggtggctctccttcttctggaaagatgcagtctactccagatggtgccttggtggcatagtgcaagttggtttcagtgctgtggtacatttgtgcaaggcattgttgtaagtgacagacctgtggctatcagcctcctgacctctctaacatgagaacaggaagcccatactacaagatcaggcatctagatagtgcctgaaaaatcctgacacgaaagtcttttattttattttatttatttatttttcaagacggagtctcactctgtagcccaggctggagtgtagtggcatgatctcggctcactgcaacctccgccttccaggttctagcagttctcctgccttagcctcccgascagctgggattacaggttcctgccaccatgcccgtctaatttgtgtacttttagtagagatggggtttcgccatattggccaggctggtcttgaactcctgacctcaggtgatctgcctgcctcgtccttccaaagtgctaggattacaggcgtgagccactgcacacagcctacaaaagtgattttacttcaaagtttgaagtctgaagttttcctcttcattctaaattctctgtccttcttgggaatgattgcaacctcttcataagagtatgactccaaataacattgccacatcaaaagcctctgaggtcaaaatcaatacatgctggttccctccttcccttctccctttcctccttcccttcctccctctctccttccatccatccatccctccttttcttccatccctcagtatttgattctctactatgtgccacataatatagtagtgaaatagacagatgttgccctcatcctcacagagtttacatctagtggagaaacagaaaaaaacaaagtaattatggttcattgtgatgaatgtaatgacaaaggtaagctcaggatattatgagagtacacaggacgaatatctaaccccaacttggtagtcacggtggttttcttataagaagttacatctcagctgacaccaaaggataaataggagttttctgggcaaagaagtgtgtggatgggtagagttggaggaaggtgggaataagaggaaagagtggtcaagaatgagagaataccatgtgtaagatttggaggcaagaagtcacagtgccttggagaagctgtgtccatatggagcacatccttccattgtaatctcacttcctgagcttcctcttctactccctagtatccttggctttgtccatgggtcctaatttcaatccttatctttaggcattgaccytatccaacttggccaggaaggagtacaccrttggagaaacagtgaacctgatgtctgtggatgcccagaagctcatggatgtgaccaacttcatgcacatgctgtggtcaagtgttctacagattgtcttatctatcttcttcctatggagagagttgggaccctcagtcttagcaggtgttggggtgatggtgcttgtaatcccaattaatgcdatactgtccaccaagagtaagaccattcaggtaaagaaaaagtcacccagaagaatataagctttctttaaagtgtaaaccctttttcttactctactctaattcttaatgggagtttgggcaaggcaaagctggtggaagactttctaccatctcaattgtacttagctgtctctgagttcccttttcatcttctgatgactcttagggtttatatatactcctctgcattcatgttagagggaagagcctgactggggaaggaagggctaccccagagatgctgcacataattcttccatcttgctctgctgggctgccctaagaacagggatttggggccctgcttctccattatggcaatctaaaccaaccacagagagcagtcgcatgagtgatccaaatttcagcctgagccttggcaatcaccccgctaccaccaggtgggagggctccgtgtggacagtgtcctcagtcctgccagaagtcacaggttgggtgggtggacttgacagtgtatatgatttattcactcatttgttttgcattcaagttacaaataattgttttgaaaatatttcttacatatcttacttctctgagaacacagcagtgagttagggctcctgttctcatggatcttacattctacctggtagggtggtggagagacaggcaatacacaaagaagaaaaatatcagatcatgataagtattatacagagaattcaacagggtgatgagatagtgagtgagtgggtggttattttcaatgagttcagggaaggcctcttggggagtggacatttaagctgaactctgaatgatacaagcctgactgtaaaggagaaagccttgggaagggcagggaaagaacagcctgggaggtgggtacagtcaggcaagggctatgggacagaaacaagcttggaacaagcaaggatcagaaagaagatgggtgcggcaggagcagagtgggcaaagaggagagtggagggaggtgaatcccatcactgggcacctcaagttcttactaagtgacagccacaaagtagcagtgaggcctgatgtctgcagcaaacctgagccctctctcatggaagcgtatattgtttttcttttgcttttttcctggcaggtcaaaaatatgaagaataaagacaaacgtttaaagatcatgaatgagattcttagtggaatcaaggtgagaatctgagcgtaggtggctctctgtgggtaaggacagaagcagtggctctcttggcctttgcaaaccctggtagaggtgatggattcctgcttctgggccggttgtgtcacatgacttttgtttcatgtcctcctgtccctctcaggtcctccgttgaaccccaatttctatttattcaccctaaatagcttgttttgttttgacactttactgtagaagtgtttaaacatgtagaaaagtagagactatcatgaacccctacaaacttttcacccagctccaggaattatcagcatgacctaactagtttcatctataaacccacacccctcacacttgctagattattttaaagcaaatctcagagatcttgtcatttcattcataaatgctgtgtatgtagctctaaaagaaggatttattttaaaaatatagccacaataccagtatcatacctacaaaaaaaattaacattctttgataccatcaaagttctccagttgcctcatatgtgccttttgtttgttttgctgttggttagattgaataaggacccaaaaaatgtccatgcatgatatttaattgatagtgattttaatctactacagtctctctctctctgtctstgtgtgtgtgtgtgtgtgtgtgtgtgtgtgtgtgtgtgtgtcttggtcattccaaaaaaactaggttatttgtcctatttcctgtatttcctgtaaattgatagttagatctaaaggtttgattgatttatatttgatttgggggygggagtacaaggttgctttcaagtggtgctgtgtgcttcccaaactgcagcgatggtaacttgagcgggcccaggtgctgtcagcctgatccatcccttacaaggtttcctgctagtctttcactagagcagtggtttgtgatgctggcagcacattagaatcacctgagaaatttgaagtttgtaaaacccactgaggctgggrgcctacttcaaaccattgaaattggactctgggagtgaggcccagacatgtgtatttttttaagttccctagatgattctaatatgccaccaaggtgaaaaacactattgtaagaattttatgatcattgcctaggtctgttatttcattaggaattgcaaaagagtgaaatttttaaattctgttattcccttgacattgattagctggaattttatgaagaagaattatctttcatcaacttgttggttaccctaaaatgaagtttgtatgggatagacagaaaaaatgcttgcttctttccctctatttgccagctttcatgataatgcatttcatcctccagaggtgaccaataagttcttttaactaaatattgttttgaattaatacatcttaacattatcctaaacttcttaaaaatgaaacagagcccccttttaactccttgttaattctccacacagagctctgacatgtccttctgtgaatgtggcaaaactaaaagagagagctggttttgaatctcagctctaccactgggtagcttaacttgccaaaagtttggcaaggttcccttgcctctctcaacttgtttccttatagtttaaatgaagataataactctacaaatgtaaggtgactaactcaactcaatttgcccagaactttttaagtcttaagacwggaaggcctgtgtcctaggcagccctttagtcccaggcaaactggaacagttagtcatactaaggttgttataaagtgagataatgtatttaaaatgctttgtacatagtaggttgtcaacaaatacaagctacctttctgtaatcatactttataatctggatttctattccccacattttggggactatatcttaaaacatgggtggatcagatacacctggtgccctttcaggggcaatcatgtgagctgtattttttttcaacttattagatcctgaaatattttgcctgggaaccttcattcagagaccaagtacaaaacctccggaagaaagagctcaagaacctgctggcctttagtcaactacagtgtgtagtaatattcgtcttccagttaactccagtcctggtgagtagcagaggggtccatgggctgcgtattcacctggacctgcatcagcttcctgaagaggaagttcacttttgatagactagctggcatctctaggcctgaccgcaagatccaggggacttgtccctctcaccgccccatgccrcttttcctcctttgtaccatacccccagctctagtttcaccttcgtgtactgtacgatggtctggctcccagagcaacttttcaggatgcacagcaagaatgtggtatcaggaaggattggcttaggaggctttcttgtcttctttgggaggtggtgtaggtctatagtggaaggaacactgatataggatccaggagacctgagctctggtcctagtaatccattaattgactttgtgaccttgragaagatatttcctcctctcctgggctcagttttctcatctgtaacatggggaggctggatgatccttaaggcgccttcaactctgatatatggtgttcctgaaacttagcacwatgctgcttggtcccttttaggaataaattgctcatgaccttgccctttccaggtatctgtggtcacattttctgtttatgtcctggtggatagcaacaatattttggatgcacaaaaggccttcacctccattaccctcttcaatatcctgcgctttcccctgagcatgcttcccatgatgatctcctccatgctccaggtaggtcggcattctcactgctaactscctgtctctggttaaaagccttggagtccagaatgactggctatcacatcccatgtctaacttttgctggtaaactttcaagagagagatctgtttggtctctggagaccaatggtttgaccttaataaaatcatgagttttctgagccccagtttatctaactataaaatgaggataatcataccaatctcatctacctcacagggagacaatcttgtgaaagcatttagtgagattattatgtttagtcctagtactgggaacatttcccagcccagtttctctcatatttctccaaggctcttgaggtgttgagatagcattaggcaaatatggcccaaagggagaagagagaccctccctttgcataaacccatgtgttggtcaaaccaaatgcaaattgagagcctcaagctatcagaaaatgagtctggagttcaggaaaccttggatggaccagagggaatacctgggttctgaaaaactgagcatagtcactgatatgcgacaagtaccagatctgcagaggaaggtcaccggacaggcagcagactgatgagaaggcctgaatgacaggagtgtggtgacttgcatttatcccctaagtgtctggcttcagagagctcagaccatgggaaagagaaggcytccctgtcctggagggtgtaaagaaaagctggcagatttggcaggtaaagaagcaacaggatctttttagatacaatttattgcataaatagcaaaagcaagatcagcaaaggtatcagctccctgcattcctggtcctcaggatgacactgaatcaaaaagggtcagatggtggctgggctcacacctgtaatcccaacactttggaaggctgaggcaggcatatcacctgaggttaggagtttgagaccagcctggccaacatggtgaaaccccatctctactaaagaaacaaaaattagccaggcatggtggcacacacctgtagtcccagctactcgagaggctgaggcacgagaatcacttgaacctgggaggtggaggttgcagtgagccaagattgcacccttacactccagcctgggcgacagagtgagactccatctcaaaacaaaacaaaacgaatcaaaacaaaagggtcagatggcgatgcaatgtgagcagtggggtactctgtttttgaggagctgatccatgcagcagttaagtggttctatagcctgcttctgtaccctaaggagggaacaggcagaaagcctaagacttcatcagagcctgggtggcaatgaaaaaccatctcatgacagcctctttggaagagagggaagtaggtgagaaacatccttgtagaagtgcctcgaaatcttcycaagttctcaagttccagggactgcagggtattctgccaacacttacctcacctgccatttaagcttcggctatctggcctatgtggaagtgtgcagggtccccctgatgcyatagccagttcctctttagaggctcccaggagtggcttagttaggatgctgggtgggcatcagggcatagacttagttaaataagagaaagccaggggcctagttaccagaaccagatagaagttaattttttgtcttagaaggcaggaggtagtttctggaattagggccgaagactggagagagacagcagaagagttgaactccatgagtttgctcaaggactgaaatagagcatccacttccatctgtctatggtgggatagcttccggggctgagttcggtggagattaggagatgccagctgtggcaaatagaaaatcatggactaacgacaaagtcaaaatctctctgcttgtgctcgttactgactttaattcttgagatcctttgtgtccttctctaggccagtgtttccacagagcggctagagaagtacttgggaggggatgacttggacacatctgccattcgacatgactgcaattttggtaaataaatttggaagttgcttcccaaacttattcgcagtactggtgccagaattttgataatacaagagcttagtagcagcaaactgagagagagtgtggagatttgtcttgagcctatgcttgcataagatacaaactgttcttacttgaattatgtttacacttagagcagattgctcaactagattgctaagtaaagctgggccagctcttctgaggataagcagggaatcctgcaaaagatccagaaagcagaagtcaggatagagccaagtgtgtgggattgggaaggtagcctggagtgaaagaatactcagattctgaaggtttaaagattgggggccagccatggccagagtgggcataggactggaatccatagtggggaggatttatatatggaggtggaattcatacaaggggactgggcaacagagggcctgagagtatacccagagtatccataggtcaggaatctgggctaccagtaggcttgggagttctgaataaaaaaggactttagccgggtgcggtggctcatgcctgtaatcccagcattttggaaggccgaggtgggtggatcacctgaggtcaggagttcgagacaagcctgaccaacatggagaaaccctgtctctactaaaaacacaaaattagctgagtgtggtggtgcatgcctgtaatcccagctactcaggaggctgaggcaggagaatcacttgaacctgggaggcagaggttgtggtgagctgagattgcgccattgcactccagcctaggcaacaagagtgaaactccatctcaaaaaaaaaaagaaaaggactttaggctggatgcagtgtctcatacctgtaatcctcaccctttgggaggctgagatgggcagattgcttgagtccaagagttcgagactagcctgggtgacatggtgaaaccctgtctctactaaaaatacaaaaattagcggggcatggtggtgcatgcctgtagtcccagctacctggaggctgaggtmggagaatctcttgagcccggaaagtcaaggcggcagtcagccaagattgcaccactgcactccatcctgggtgacaaagtgagaccatgactcaaaaaaaaaaaaaggacttcatatgcaggccacttctggtctcatggtctcattctaggagatttcattcacctcctgttagcgtaggagccagcacttagcagaaacaatcctaggagctgatggagaaagcggagagagacacgtgagggcagacagtcacgtggggacctacattggactaaaagagggctttttctcaacagacaaagccatgcagttttctgaggcctcctttacctgggaacatgattcggaagccacagtccgagagtgagttgccttctttccatcctaatgttctttagcattctcactgcctggcctattctcagaaaattccatgtaatagaatrcatggggaaatgagctatgtgcatgtcttcggttagatactagtgcaggataaacccctggagagatgagctgaaagcaaaggttytcagccccttcccctgataactgcatttgccatgctgctttcctactatggggccatgaatatccagctgtgatcccatgaagacatttgtgtgtgcagattgtggatggaggtagtgcagcgttggcaggtggccggcgtctctgggtatggtagaagacaaacccaagaacctgaattcagtataagttcattcattcaagaatagcaatcaggaacattggaatctggcttctcagtgtgtatcttctgcacatagtgtgtctcttaagcaccatgtgtaatagcacacccaattcatccactgagcacagcacacagagtacaccaggaggctgaataggccatatctttgtttcttcacaactgagcacatcttactgtctccttactatactcctgacttcccactcctctatcttgttcctacagcctttaacatggactccagagctagccccaggatgagttggggcaggagcacatgctctgaaccttcctaacccagcagtttccctttccagagaggaaactgggcagggcttccacttcactgttataggtctggaagaaattcacctcaatgcgcagattcagaaagactgtgaacaagttcctaatgttcctaatgttctagaaactcaaataacagggctggcacacacagtttccgggaacctatcccattgtgggcccctactcagccagatacagtcaaatatttaggagaagggccagggaatctactttcagcaaatgttccaggtgacacatttagtacctaatttgggaaatgttaatctagtccaatcccmttagtaagaaaggaggggtccttagtccaaaggaagtgaccttccaagataacatagaccagcagtgtcagggttgggacttgaaccaagccaggtctccaggcccccactagggtcttgttcaatgggtaaccatgttagttctaggagaattttatcattggaaatgcacatttgtcacaaacagcttatagatgagttggataaattagggctcattagggctcattctctagccttttagagctaagaaaagaaaaagaaaaagtattaaagaagcactttggggtcttgtatatccaaggcaaattttccaatcttgaggggaaatctcctgataccagacttcatggagactcagagaagtgacttgaactactcttcaatacccaacccctgctatctccttcaaagacattcctgtctttcagtgtgaacctggacattatggcaggccaacttgtggctgtgataggccctgtcggctctgggaaatcctccttgatatcagccatgctgggagaaatggaaaatgtccacgggcacatcaccatcaaggtgagagggaatgccaatgcaaaagcctctgactcccgaatgtcagcagcttcgtgcttttgcctcactggggagaaggcactgagggctagtaggtgaggtcttggagacatccgatagatttgtggactgtgattctccttcccatttcagctttatataatcagttgctgggggtaagatttgggaatctgcatttttaatgagctctaaaggtgattctcatacgcatactacagtgtgaaaactgctgattagagaggtcttccttcaaaatataggcatttctggccaggcacggtggctcacgcctataatcccagcactttgagaggccgaggcaggcagatcacctgaggtcaggagttcgagaccagcctggtcaacatggtgaaactctgtctctactaaaaatacaaaattagccgggtgtggtggcatgtgcctgttatcccagctacttgggaggctgaggcatgagaatcacttgggcccaggagggctgcagtgagccaagatcatgccactgcactccagcctgagtgacagagagagactctgtctcaaaaaaaaaaaagtataggcatttctgctttatctatgtatttgtttctgaaaaatcatgcatcctgcaaaactgtacaataaaaataacaggacctaggggaaaagaattgtaatagatcactaaaaacttatataactttgtaaccaaactaccaacagaaacaataccaaccataacagtaatatcaagagcaataaaaacagtagattgtacaatcatcactggcatttgcacccaacattgcaattactcttgggcctttctcttcctcctttgagagctaaatctttgatggcatttgcttccaaaataaaaatctggtgtagggtgttgtcttcttcatcaattttgtatatatatatgtgtatgtgtatatacacatatatatacacacatatgtgtatatacacacatatgtgtgtatatatacacacatgtatgtatacacacgtatatatacacacatgtatgtatacacacatgtgtatatatacacacatgtgtatatatacacacatgtgtatatatgcacacacgtatgtatacacacgtatgtatacacacgtatgtatacacacacgtatgtatacacacatgtatatacacacgtatgtatacacacatgtatatatacacacgtatgtatacacacatgtatatatacacatatatacatatatgggtatatatacacacgtgtatatatgtgtgcatatatgtgtatacacacatatgtgtgtatatacatacacacatatgtgtgtatatacatacacacaaacatatatgtgtgtgtatgtgtatatatacatatatatacacatatacacacacatatgtgtatatacacatatacacacacatatgtgtatatacacatatacacacacatatgtgtatatacacatatacacacatatgtgtatatacacatatacacacacatatgtgtatatacacatatacacacacgtgtatatacacatatatgtgtatacatgtatatacacatatgtgtgtgtatgtgtatatgtatgtatatacacacacatatatgtgtgtgtatgtatatacacacacacatatgtgtgtgtgtatatatatattttgagacagagtctcactctgtcactcaggctggagtgcaatagcacaatttcagctcactgcaacctccacctcctgggttcaagcaattctcctgcctcagcctcccaaatagctgggattacaggtgtgtgccaccatgccccactaacttttttttttttttactttaagttccaggatacatttgcagaacgtgtaggtttgttacataggtgtacatgtgccatggtggtttgctgcacctattgacctgtcatctaggttccctcccctcgcccctcactccccaacaggccctggtgtgtgttgttcccttccctgtatccatgtgttctccctgttcaactcccacttataagtgagaacaagcagtgtttggttttctgttcctgtgttagtttgctgaggatgatgcttctagcttcatccatgtccctacaaaggacatgatctcgttcctttttatggctgcatagtattccatggtatatatgtaccacattttctttatccagtctatcattgatgatgcccggctaatttttgtacttttagtagaggcggggttttgccatgttggccaggctggtctcaaactcctggcctcaagtgatccatctgcctcagtctcccaaagtgctgggattatatgggtaagccactgggactggctaattatgmttttttttttaacggaggaaaatgttttcatggcatcttcatcagtactctgaacttttccagagagctaaatttagggaaaattatagttatttttgaattgttatcactacttgtaccaaacagaggagtatctatagattttcagctttttttcttaagatcttcatatatatattgctaagggtttctttttaagtatgagaatgcttcctccaattgatttatattgacctgcttgacaaaaaaatgtaagaaccagctgttctaccatatactgacatcatttcctgatttagcaatcactaatgaactaatctgcaatttaaaaaacatgcgctatagcagagcaggctacagatttaagtctgtcttctaactccttttgggaagcttttttcttgctaactcataactgggttcttcctcaaacacaggcctttgttggtctccatttctggtcttgtttttttttttttttttgagacggagtctcagtctgtcacccaggctggagtgcagtggcgtgatctcggctcactgcaacctccacctcctgggttcaagcaattctctgcctcagcctcccaagtagctgggattacaggcacatgccaccatgcccggctaatttttgtatttttagtagagacagggtttcaccatcttggccaggctggtcttgaactcctgacctcgtaatccacctgcctcagcctcccagtgtgctggaattacaggcgtgagccaccgcgcccggcctccatctctgttttttgtttgtttgtttgtttgtttgagatggagcctcactctgtctcccaggctggagtgcagtggcccaatctcagctcactgcagcctctgcctcctgggttcaagcgattctcctgcctcagcctcccgagtagctgggattacagacttgtgccaccaagcccagctactttttgtgtttttagcagagatggggttttgccatgttggccaggttggtcactcccgatctcaggtgatccgcccacttcggcctcccaaagtgctgggattacaagcgtgagccaccgcgcccagtttccatctctctttggttataatcttgcttcttaagatgtcatctataccatgggtccccaaccccgtgggcctcagactggtactgttccatggcctgttgggaaccaggctacacaggagaaggtgagcggcgagcgagcattatcacctgagctccacctcctgtcagatcagcagcagcattagattctcataggaccatgaaccctattgtgaactgcacatgccagggatctaggttgcatctactgcctgatgatctgaggtggaacagtttcatcccgaaaccatctcccaccaccaccccatctatggaaaaattgtcttccacaaaaccggtccctggtgccaaaaagttgaggaccgctgatctataccattcccttgtcagtgttagcctttcgttggtcctagtaaactcaattgggtttgactaaaaccctcttctagaagcatcacacacatttatcatctaattttcaggatcatggctgaaaaacgatagtccaacaaaagtggatggggcttttaatggtgaagaggatattgagtcctgagagtggaataactacaagcacgtgaatacatatcagatcctcagtcatcctgatgcacagttattyaaatttaagctccatttgtttcttcccctctccagccaccccgtccttcaaccctgcrtttctggaggtgcagctgtaacatgatctgatcctttttcatctagggcaccactgcctatgtcccacagcagtcctggattcagaatggcaccataaaggacarcatcctttttggaacagagtttaatgaaaagaggtaccagcaagtactggaggcctgtgctctcctcccagacttggaaatgctgcctggaggagatttggctgagattggagagaaggtacttgggataacaagggatcttcaagggtgaaggcatattgaagagaaaaagtgaggatggtggtgaagaactacacaggggtaatctagttgattaatttaggtagtcatatttggaataaacaccagaaatcatgtgtttgtactaagtggccacaatattccatgtaaataactcagaatttcaaactttctgcttggaaacagatacaggaattatgtaatttaaatcaaagatgatgaggcaaaggccatgagaagttaacagtgactggcccaaggttgatctcacaggtggtggggcagaagtgggaccagagcctaggtgtcctgattctacttctgtatcagtgaggccagaggaagattctactaatctgctttgaacacttagatgtttattgtgaattatcttttgatgttattaaaggcctttcctaaaaatagacttttagggttgggcacagtggctcacgcctataatcctagcactttgggaggccaaggtgggtggatcacctgaggtcaggagttcaagaccagctgaccaacaaggtgaaaccccatctcaactaaaaatacaaaaattagccgggtgtggtagcaggcgcctgtagtcccagctactcgggaggctgagacaggagaattgcttgaaccagggaggcagaagttgcagtgagctgagattgcgccactgcactccagcctaggagatggagcaagactccatctcaaaaaaaaaaaagatttttaatgactgtattgtatttattatatagatctagcataatttattttgaaacctctaaataaagaccctgcatatttaggatgttttcatcctccctccccattactagaaataaatgtagcaatcttggggaacaaaaatcttgagatgttagaagattaatgaagatacagctctggagtaattttgttcattaattagcatacgcttattgagcacctactatgtgccaaacagtgttttaagttctggaattacatccatgaacaaaatagaaaaaacctctgctctacattgtcacagggtgacaagcaacaaaactattaaataagtaaattatctgataaaaagtggtaagttggccatatctaattattaggactaaagttatttatttgaatcagttctttatttgtataaaggaacttgtaagatttttaaccccttgacaccttattgagacaaatttcttccttttacccctccctattagattctgtgaaggtggatctagggagtagtgcttaatatgaattattttcttcttcagggtataaatcttagtgggggtcagaagcagcggatcagcctggccagagctacctaccaaaatttagacatctatcttctagatgaccccctgtctgcagtggatgctcatgtaggaaaacatatttttaataaggtcttgggccccaatggcctgttgaaaggcaaggtgagaaatcattgaacatgatgaagatataaaggtggggtgggagggagaggggaggacatgtctggcaagtaagacagggaagatggtggacatatggtaatcaacacaacttcatattatttttatagactcgactcttggttacacatagcatgcactttcttcctcaagtggatgagattgtagttctggggaatggaacaattgtagagaaaggatcctacagtgctctcctggccaaaaaaggagagtttgctaagaatctgaagacatttctaagacatacaggccctgaagaggaagccacaggtatgtaagaaggattgggacaagatagaacttgggccatgggtggaatggtaaatcaatatctaattcctgaactgctcagtatccagtgaactagatttggaagcaaactacccagagattcaaactctgctttctgggttctgtgtctctttgaggaaacatagaaattgaaactctatgcctgggccaaactggtgacttatcctgctcatctgatgtctgacacacaatcaaaggacactctttagaagggtacaactgaaagtctgagtgagtaacccttgtggaagaaacaccagtggcacaacggtccctcttttagggatgccatgttcctattgactctagtcacacatgtcatcccatctaccccaaatccattaaaaccacttcctcgacagcttcatgggctggcactattagtgtactgctaaattcttggtagatcctaacaaagggattttgattaatataccaaaaccactgggtgtttgaaccagaaaaaaattatggcagttgcgtagtctcagagtataccatagcaacagcctctaatatcaccaccattgggttcaccagttagccccagtcagcagtggagctctgtttactgtgacccttcccaaggacctgccaacagcagtcctgtgcattggtctggttatcaccctcaggtggttgtcaccagcaggagttcaggtcgagaaagccagggcagaaggctgtagaggcattccagaaatcagtcagatgagggagtagctacacagcctacaagtgacagcatgttctgaccatgaggtgaggacaagtaatggtttaaaaccaccctgggagggccaggcacgatggctcacgcctgtaatcccagcactttgggaggctgaggcgggtggatcacctgaggtcaggagttcgaggccagcctgaccaacatggagaaaccccgtctctactaaaaatacaaaattagctgggcatggtggcacatgcctgtaatcccagctgcttgggaggctgaggcaggagaattgcttgaacccaggaggcagaggttgcggtgagctgagatcgtgccattgcactccagcctgggcaacaagagtgaaactccatctcacacacacacacacacacaaaacacaacaacaacaagaaaaccaccctgagaagcccaagagtttgaaagaaaaatctaagccagggctggatgtggtggttcacacctgtaatcccagccctttggaggccaaggcggaaggatcactggagcccaggagtttgagaccaccctgggctatatagtgaaaccccatctctgctcaaaaaagacagaagaaaaatctaaatcaggaagtctgtagctttggaaggagaaggcgggaacaaagaacaggatggtgtaggtgacaggaattgggagccaggccaggagagtggggcaggagtatcagggaccagcagaaaggagcaattgaaagctttgcatcagcctttatgtgctccaggtagtagcgtggagaaaacaaaaagcacctgtgaaggggtgggttgcccctccacacctgtgggtgtttctcgtaaggtggaatgagagacttggaaaagaaaaagacacagagacaaagtatagagraagaaataaggggacccggggaaccagcgtttagcatatggaggatcccgccagcctctgagttcccttagtatttattgatcattcgtgggtgtttctcgaagagggggatgtgtcagggtcacaagacaattgtggggagagggtcacaagacaattgtggggagagggtcagcagacaaacaygtgaacaaagttctttgcatcatagacaaggtaaaggattaagtgctgtgcttttagatatgcatacacataaacatctcaatgctttacaaagcagtattgctgcctgcttgtcccacctccagccctaaggcggtttttccctatctcagtagatggaacatacaatcgggttttataccgagacattccattgcccaggaacgggcaggagatagatgccttcctcttgtctcaactgcaagaggcatgccttcctctcatactaatcctcctcagcacagaccctttacgggtgtcgggctgggggacggtcaggtctttcccttcccacgaggccatatttcagactatcacatggggagaaaccttggacaatacctggctttcctaggcagaggtccctgcggccttccgcagtttttgtgtccctgggtacttgagattagggagtggtgatgactcttaacgagcatgctgccttcaagcatctgtttaacaaagcacatcttgcaccacccttaatccatttaaccctgagtttgacacagcacatgtttcagagagcacggggttgggggtaaggtcacagaatcttaaggcagaagaatttttcttagtacataacaaaatggagtctcccatgtctacttctttctacacagacacagtgacaatctgatctctcttgcttttccccacatttcccccttttcttttcgacaaaaccgccatcgtcatcatggcccgttctcgatggtcgctgtctcttcggagctgttgggtacacctgcagacatgtgataagtgaatctactgatgggactgacagtaggtacttctaccaaccaattttggackgcaggcattaaacatcctggtgctctccctaggcaaataggaggataacgatacccaatggaaatatttatcatcatcccttcttcctcaggtttggcagggcagcgatcatctgtggggccaggtacccatacgctatcattaacatatacttctataggattatccatccatgtgactgcccgaattaagggcgggaaaggcacataggcccagtaggtatagttagctgcagctgctcctgcaggcatagggagacttaccaccgttgatacaatcatcaaggctgcaagcagcatactctctggggtttgtgtcacctttgtgttctctagatattttgtagctaactgcgtcagcttctttagttgtgcccaagttggcggctctgccttcttggtggatggcaacttcatctgttcttctgacgtcaccattttgttcatcttgtgagtcaacggtgctcgactgtggtgtctccgtctccgcggaggtgcttttctttgcatctccgatgggttcattgtagaacttcaaatgtctagtgcgtatccaaacaggaagctgattttctcctggtgaaacacaagcaaaacctctcccccacgttatcaccttccctatttcccatgtcttatttttattatctttccaccaaattagttttccttcatgtgggctgttctttttaccagtaagatgttgttctgcagaagtagtagtctgatttctataaatgtttaaaaaatttaaagtatagagtgctagattaagttgcatctgaggagtggtacactccttactgtctcctgcttctttttgtttaactaattgagttttgagtgttctattagttctttcaactatggcctgtccttgggaattataaggcattcctgttgtatgtgaaattttccactgacttaagaatttttggaaagctttactacaatatcctggtccattgtcagttttgattttttccggaactcccattacagcaaaacaagacaataaatgtttttttaacatgggaagtactttctcctgtttggcaagttgcccatatgaaatgtgaataagtatcaactattacatgaacatatgataattttccaaatgaaggtacatgcgtgacatccatttgccataatgcattaggacacagacctctgggattaactcctgcctcttgagtgggcaggtgtaagacttgacactgggtgcaatgttgtacgatatcttttgcctgtttccatgtgacatcaaatttgttttttaatcctgctgcatttacatgagtcaaagcatgaagttcttgtgcttttatgaatgcagatgataccagtaagtcagcttgttcatttgctttagtcaaaggccctggtaaattactgtgtgctcgaatatgagtaatataaaatgggaaatttctttttcttacagtttattgtaataaattgaatagctggtttaactgatcatccatgctatatttaattagagctgtctcaacatcccttgtagcctgtactacatatgcagaatctgatataatattgataggttggtcaaaatcttgtaacactgtaatgactgcaaccaactctgctctttgagccgattgatgtggagttttgattactcgttccttcggccctgtgtaagctgcttttccattgctggaaccatcagtaaatactgttagagcattttctaaaggttcacgtctggtaattttaggtagaatccaagtagtcaattttaagaactggaagatctttgtttttgggtaatgattatcaataattcccacaaaattagcaagaccaatctgccatgcaccagaattgataaaggcttgtctaacttgttccttggttaaagggacaactattttgtctgggtcatttccacataattttattattcgtaatcttgtctgaccaattaatgtagctatttgatccaagtacaatgtaaaagtcttaactgtactgtgaggaaggaatgaccactccacaagatcagtattttgaataatgatgcctgttggagaatgtgcagtggcaaaaatcaaaagttggagtggggctaagggatctattctatttatttgcgctgactgaattttttcttccactaatttaatttcttttgttgcctctggggttaacattcttttactatttacgtctgagtctcctcttaagatagagaacaaatttgacatggcataagtaggaatgcctagagttggccgaatccaattaatatctcccagcaatttttgaaaataatttagtgtttttaatgtgtcttttcttatttttattttttgtggcttaatttttctattttctatctgcatccctaaataatgaaaaggagtagaggtttggatcttatcagatgctattgccagtcctgcattggcaacctctgcttgcagaaatgtataacagtcaattaatttatcttttgtttctgcagcacataaaatatcatcaatataatgaataatataacagtctgaaaacttgtctctaactggttgaagagctcgacctacaaaagtctgacaaatagttggactattaagcattccctgaggtaacactttccactgaaacctggtggctggttctttattatttatggctggtatagtaaaggcaaatttttcgcaatcctgctccgccagagggatggtaaaaaagcaatcctttagatcaattataattaaaggccagtcttttgggatcatggccagagagggcaacccgggttggagaggccccatgggttgaattacggcgtttacggcccttaagtcagttaacatacgccatttgcctgatttcttctgaattacaaacacaggagaattccaaggcgagaacgaaggctcaatgtgacccttttctaactgttcatttgctaataaatgtaaagcctccagtttttgttttggtagcggccactgatttacccacaccggtttttctgttttccaagttaatggtatgggtttaggaggctctacagtggctgcccctaacaaggataccctattccttctctttcttgatttattttagcctcaactggaactttaatgccatcttcattttttcctagtccctttcctggtatatatcccatcttggtcatgattttttgactcgtggggctatataatggagcgggcatgatttccgcaccccattgttgtaataaatctcgaccccacagattaagaggaattgaagtaatcattggctgaacagtactttcttgattatctggccctaagcaatgtaaaatctcagtactttgatacacttctgaggctgtgcctatgccgacaaatcctgtaacagccttttgtttaggccaattttttggccaccgatttaaagcaatgatagagacatctgctccagtgtctaccaacccttcaaactgttttccttgaataatggccttacacacaggtctgttctctgagacctgacttgcccaatatgcagcctttcctgtcggatcagtgcttccaaaccctcctgttctttttatttcactatttccacccttaatatatggcaggagtaataattcagcaatcctgtctcctggactggcactccaaggaattgaagagctaataaccaactgaatttcgcctttatagtctgaatcaaccacaccagtatgaatttgaactccttttagatttagacttgatcttcccaagattagtcctacagtcctctcaggcagtgggccatataccyctgtggggattttttgtgggggctcccctggaagcagagagactgcttgtatagtacataaatctactgctgcactgccgctygtggcgggggacaattgttgtatcgtggtaactggcttattccctgaaacacttgggacagtgggtttgttgtccctgaaaaccctgaggaacaaatggctgaattgggaatgccccagtttgttgtggggcctgaggctggcccctttggtcgtttcccgacaatggttgcccatttttatcaaatttagaacgacattgactagcccaatgttttccttttttacatcttggacataagtcaggtggctctctacctgttgtagttgcttgaatagttatattctgtttatttgagactgggcaattcttttttaagtgaccaatttgaccacaattgtaacattttcctccaaatgttctaacttgtcctcctaaaacaactcctgttattgcttgagccataagcatagctttatgcatagctcctctgattccatcacaggcttttacatattctgagattacatctgatcctgcgggaacctttccttttaatggcttaatggctgattgacactcaggattggcgttttcatatgccatcaactccactatgaccttacgggctttttcatcggcaattgacttttgagcaacatcttggagccttgccacaaaatcagggtagggctctttcgaaccttgtcttactgtattaaatgaggggcaggcgcttcctgggtcttggattttttcccaggctctaaggcagatagctctaacttgctcaatggcctcattttgcattaatgcttgttgactaatagtactccaattttgacttattcctaatagttgatctgcatctatgttaactggaggattggcagccctatttcttcggacctgttcttgtaccccatcaatccaccaagtcttaaattgtaaaaattgagagggtgagagagacgattttgccagaatctcccaatcataaggaatgagtctatgtccatgagcaatggaatctaataatgtcctcatataaggggagttgggtccatactgttttactccctctttcatatcttttagcatttttatcgaaaaagacttgtatctggcctcaactgtgagaggctctccctcttgggctccttctccaggtggcatcggttctaacgttactgggaattgccacgcctcagtatctccttcctttcttgatttatcaataatttcatgtaattcactaccctgtctactaggtggtgccrtaggattaagtctcctagtgggcggctgagggtatggcgccctgccctgtggtgctgggggcattcctggatatccatactgactttctgggggtggccgatactgaagttcggctggcggccagtattgataagctactggcggttgggtcttattttctttaacctgcgtttgaggttgtagtgttaygggcacctgacctgctggaagaggacttggccctcgtggcttagactctgatggccccactaattctggaccttttccttctaattttaacgtttcaggatatatcacctcctgtaattgattatagtcaacattttgcgttgactgagccattaccggctctgctacatattcgcaatgtaaactttccatttctttctgggattttttccttgtcttttcattacaatctactatacagcttctaggggcgtcaggaactgaaacgctatcttcttctgtttgaaatggttctaaagctgctttaataatggcccaatcattccatactataagtggaatgatattacccttcctacctgcttgttttagttccttaccaattcttttccagtcttttagatctaaagttccttgttctggaaaccatgggcaaaattgttctattatttgaaatagcttgattagatttttttgtagatactttaactccccctctttttaaaagaattttaataaagctgagataagaggcatatttacttttaattttacttttagtttgccccattattaccctagcttcttccgagctcacaagcttaccgtacggctgactgtatatgtactcgggatctctcgtcgacttgtgctcaatgaccacgctcgagcgtaccttcaccctagagaaaagcctccacgttgggcaccagatgaaggggtgggttgcccctycacacctgcctggaatggagggtgaagttcccaaggaaagaacagtgtctaatgctagagttctctgagttattgctcagtcaaccacatcaccatggttaccgtaagaaaattgggcagttttcccatactaatggtaaacatttttttctgattagcctggatctgagtttctggattctgttataaaccayttctcctttgaagaatcctgtctttaatgtacaaagaacagtttgcaaaacatccccgtaagccctttttctggtgaacactgagagaacatttctgagcagttttgtaagctccagagcctaggatgctgctgtgttggccctgggatctgggacttggtggaatgaagagaagggcaggagggcaaggtgagctgcactgagattggttctgtgtatgagtttcctaattagctgccttaacaacacatcacaaactgaatggccacacatttctggaggctagaagggcaaaatcaaggtgtcagcaggattagttctttcttaaggtgttaggcaataatctgttcaaggcctctcgcctagtttccggtggtttggtgatctttgttgttgctgtttgttgtggttgttcttcctatatgtttgtttcatttcctgaactaattctgttaagtctgtattctttgtcattgtcatgtgtgaccaytgaagtctgtttggttggcttagtggtcagctagtgattagacagatactcccttaattgctttgaaacaataagtgtctcagcctttgctgagaggttctgtgtgtgtgttgtgggtggtggggagcatgtcttcagcactccagcaatttacatctctgccttagccttcacttcctgcttatacagagccacatagtcagccggaagtgaaagattagagccctcttccatctttcctggacatgtgcacagctctgcatgtgtaggtggcattctagattgctgggaatatatcagagagatcagagaccctgtgagcatcttattccccagcttttccttttaagtttttggtcagcttcttatttgccccaagtgttatcaccacctcaggcagctgctgtgatgttaaataattgctgctggttttttgagctagctcagtgttaggtcaaataggccctataaatgggggttttcagagaattccagataggtgagataatgtcagttctccagggatggggtttttgggagcattctgaacccactctgccccctccagtggctgctaggctgctggttttcatggctgctatgattgtatggctgttagttttctaggttatagcagccaaggagaggggggacagaaatagggtaagttaaactgccacaaaacttactgttcttactaagtttcagctcttcaaaaacacaaatgctcctgggattgttgcaagcctttggttaatttcagagctctgaaaaagttgactttgaccatttttaatcattattctaattgcttttatggaggagtagatatctggaggttcctattctaccatccccactgatgcccacactgtgtcttatattttattttatttwttccggrtatgtcttttaagtgatttaaattaatataagtttgttaaattatttgaatttcaagatgagcattttcttttctgttttgagagagtctcactctgttgcccaggctggagtacattggcacaatcatggctcaccttcaacctcctgtgttcaagtgatcctctcacctcagcctcccaagtagctgggaccacaggcatgcaccatcacaccctgctaatttttaaatttttgtagacatagagtttgcctatgttgcccaaggtggtctcaaactcctgggctgaagtgatcctcccaccttggcctcccaaagggctgggattacaggtgtgagccaccacgcctggccaagatgagcattttcaatttacaatcacttctttagtcaattctgagaatgtgactcttctatttgtctaccataatccttaaaagctctttcctcctccaaaggaacctgggcatttctaggaattttcttctccattttgaccattttctcttccagtggaatattaattcatctctcctttatcctgatatttcttaataacaagatgtactaataactatgtatggagtatttatggartaaagtattccatgctgtatgtacatctgggatcccttgctgaaaccagcaagatcagaggaggcttctctctccttgttcataggactgacagrgatctatgcagctctttccctaacctctactgtgtctccctagtccatgatggcagtgaagaagaagacgatgactatgggctgatatccagtgtggaasagatccccgaagatgcagcctccataaccatgagaagagagaacagctttcgtcgaacacttagccgcaggttggctatctattcagctggcagccctcgtcagctctatatttccacttgatctttttctttttcttcctgggcttttcctgtgagggttaacaccatggacactccaagctcttcctttgtttctttgttgtggggayggggaaagatcggggttgtgtcagtttcccctggtcatctgccctgaaatgcgctttgatgccagctgagtgactgtgacatctgcttgcaagaagacccttgggaattgcctgcatgctcagggaagcttccctctctcagttctaggtccaatggcaggcatctgaagtccctgagaaactccttgaaaactcggaatgtgaatagcctgaaggaagacgaagaactagtgaaaggacaaaaactaattaagaaggaattcatagaaactggaaaggtgaacaccayacagaaaagtagcatttgaggtgttataaggtttagaacccaaaatttttaacgttcagtgaaaattgaacgcatacttacaggagcaatatgtcctctgtcctttgcaaatcttcagactcattattaacctgttagcagaggctgtgggctttctaccaagtcatatttccataaagaatgctatgtttcctgtgaatgtcctcatcctacacttcatgagtgtttgattccattctgatgtgtggaggaacaggaaaactcagacctagagcacataattcaaattaatgaaatttaaccacaaatttcaaggtcggcagtagaaccccatcatctgttccactctgattttttgtttgtgtgtttattttagatacagggtctcactatgttgcccaggctggactaaaacctcagggctcaagagatcctcccacaccagccttctgagtagctgggactacaggggcatgctatcatgtctggcttgtcccaatctgtttttatatcttctcctcttaaatgcctttagctttgatgattatttaccctgcattgtatttcagcattgttctattatccttcctggcacagtgcagaaatggtgaccacagactaccaaattttgctacctgctacccatgctcccaggggactccacttctccttgtggttggcattctaggtgattccttatcaaaagccattagggagttctactaatattgaggtggggactttgcaggtgaagttctccatctamctggagtacctacaagcaataggattgttttcratattcttcatcatccttgcgtttgtgatgaattctgtggcttttattggatccaacctctggctcagtgcttggaccagtgactctaaaatcttcaatagcaccgactatccagcatctcagagggacatgagagttggagtctacggagctctgggattagcccaaggtatgtctgatggctatgacatcttacagaatctgtctggaccctgtacttttcctggactcaggaatgcatttgccattatgtcctgggcacaagtcttcagggattcctgtgcatggtgctgacaaaactgcttccatctctaggtatatttgtgttcatagcacatttctggagtgcctttggtttcgtccatgcatcaaatatcttgcacaagcaactgctgaacaatatccttygagcacctatgagattttttgacacaacacccacaggccggattgtgaacaggtttgccggcgtaagtatctcaagaactgtcaggtggtgtgtttatatactgaggatctttctgayagggaggaattattatgtccccctagacaacactgttcagttccagttcttttgtcactcaacatgcaagtgtttcttgagtacctgctgtgagctcccaagaatcctggagattgagggatgaacatctctgacccttcaagtagctcagcatctagtgaagaagacaaccaaagaagtgaaggattataatagaatatagtaaaaccagtaryagcagtgtgtagaaaggtggtctgggagtacaaaggaaaaaaaggcactagcccagcctgcgtgataaaggtgggaaatgtcagaaaaggtgaaacttaagtcatagaagcaagccagggagatggcaagggttgggggatggcagtagagcagggtgagraggattattctgcagaggaaggaacataaataaaagcactgtcacagcctgggacaggaaatacaagagatagtaggataaccctttgcttggcctctgcctccattcctgaaacttctatcttgaatgctttaagaatgagtaaatttggtctggactatggaatagagccatcagtgattttaaaaagttctcaaatattgtttccatctaccacagatcctggaccccttggcattcactcattcattcattcaacaaccgttattgagcactttctatgagccaactactgtactagacactggggcactcaatgaatgtgaagatcatagatgtctctcttccatgggccagacccaactcactgattttttagtgtatctgagatgggaattcaggaacagaggcagagatcaggcaattctgaatgataagtaactatcaccagcacagtttttagccctgtgcttatggagcagctctggactcttgtttgttggtcttggggcagacatagaaagtatagctcacagtccacagccaggttctggggacacagtaactgcttcaaaagtgggccattaactggtccccctgtgtcatcttcctctggggcagaaacagtgggcatgatgtcactagagacaacttcaatggcctttctgctctttactagaacctaaaagaacactcaattttgggtgagaaatttctcatagtaattttgtaaagatcacagttttccccatgttgtaatatatataatcttctgggaaagagaacacagaggttttctgtgagttacttaggcaacagtcatagtttgaagactgcttttgcatgagaaaggaaactgtcattaattatatagtatgtttcgttggggaggtggctcagacctattaaggggagtttgatcaaggggcctctgggatcaatggctgagttaagaggagatggagtggaggaaggaaagatggagactctgtgccaggtaaggatcaaaagtaatctgcatagaactgataactggtagggatttcttttctctgccaactgtgggtatagttatttgcattctgataggactttgggaaaggtaggttagactcaggagtcatccatgattcagagctttcctggaagaccattatccctgatacagtttgagaaattccagagataacttaaactcactttggtactcacatattaccaatcatagaatcaatataatccccacaaatttaggcaagggcaacccaaaatataaaccaagcttcttgagtgttctccaaaccatccatccattcattcatttttcttatttgttcatttatttcacatgacacgaaggcaacatggcagtaagacacatctgttcccgctgggttccttggttagaacactgtccaggcaggctcacattcaaccccagctcccttccccttggtcctctatgcttagcagaggaagcaacttcctgagtatttttagtagagatgggatttcaccatgttggtcaggctggtcttgaactcccgatctcaggtgatccacccgcctcggccttgcaaagtgctgggattacagrtgtgaccaccacgccaggcctaaatgaagaaattatggaaatgaaattggttattggggcaagcaatgcagcctattgcaaatgaacacaatgaaatgattacatgaaggagtactgggaacacacagaatccaacagattccttgctagaactaggaagatgtaaactatcttaggaagacctcagtgatggtgtatctctcctaatcgttttcctaggatatttccacagtggatgacaccctgcctcagtccttgcgcagctggattacatgcttcctggggataatcagcacccttgtcatgatctgcatggccactcctgtcttcaccatcatcgtcattcctcttggcattatttatgtatctgttcaggtaggtttggaaatggctaagtcayccttccttcctctctatctataaaagcccagcctctttcctgagaatcttctctctgattcattgctagtcactcactcctcycctcagcakctttgccatttagtcatatgttgacayacccaggagcccacaggccactgtctgaagctgaagtgagagcatcaatgggtgcaccatttatggcaaatgtcaccctaactgctgcccacccttcactccctggaagcttaggtcggacagatttacgtttggatccaagactactttgagattggctctggacacagtcttgcagctccataagaacccccatgacgattaggtcggttccagaagagccatgctatggtgcttccttggttgactttggacaggcatagctgcttggagatgtctctcagcagcagctgggtctttctttttacttcggcaaagttctagtttcactggggtgtctgtgggtggtttaggctcaattccagtgtattcttcgagggaatgtgcagcttgaaagcaaaacagggaaactggaacgagtggaaggaaccctattcccacaataaaatggatgagggaaggggaggctgtggaggaactctggtcccaccagctgcttttgtggtgaattgtttgcctggggaaacaattctgaagacactgatcaggggctcgtggccttgtggcctgcgattggcggctcgcccccatgtccgtgtacagttcctcaggcacattgtcaccatagcggccttttaactattaataacaagccaacaaacaagaagcagggttattggagggaacatctgtatgtccatgtataacattttgcatcccgtctctccaacgccccactcttcccaggtttcaacaaatcctcacagaatctagtagcagcacggacccattccactcccccttgccctcaggccacagggttcttccctgcattggattctaccctgttccagttcttaccccctcagcactctgcatacctccagaattctctgtaccttcacacaccaccgaggcacagttttggtcacttaattgaacagattcttccctttttacccaaacctaggcatgcctttttctggccatttcctgcccatccccactttacacaccccacgggccccactgcctttacaaaatccttttggggaccttttctctaatgagtacagaaactgtcacatggatgatagccgtagatctgggggatatgggttaggctgacggaactccttaggaggtttggagactcaaagctctgaggctgcagtgtgctctcctcacgttcaccccactctgttccccaccaaccccagtcttctcattggtctcctcctcggagcctctcatcattctgctcccagacatggcactgcaggcttttgtcttgttcagacgtaagctgtgcccatcaaggggaagaatgctgggttgtggccagaaaggaggaagatggtggatgcctcatgactgcgggactggctgattctttactttttgtgtccagatgttttatgtgtctacctcccgccagctgaggcgtctggactctgtcaccaggtccccaatctactctcacttcagcgagaccgtatcaggtttgccagttwtccgtgcctttgagcaccagcagckatttctgaaacacaatgaggwgaggattgacaccaaccagaaatgtgtcttttcctggatcacctccaacaggtgaggcttcccctgggtatttacccatgtgtgtactttggggttctatatgtttgatattagcggtgggagggcaggcatggctagtggtgtgaaattcactctggccacacacactgtcatgctatgtaagtggagagaagaaagcatgagctttggagtcagagactgggtccccatgacagctctgccgtttaccaagctgggtgaattgccttgacttctctaaggagaatctccatttctttgtttttgtaatggccagaacacaccctatctcacagggttccacctgtctcatggtggaagtcaaatgacatttgtgagcattttgtaacccagtaccaaataagtgctgggtgaactgaacatcctctgtttacttttctgagaacggatgtgagattctccatagtcatgacactctttctgggtagtgaaggcagtggaggttggagagaggagagttgggaatttttaggtaagaccattgatgacagaaagggaagcttccgtcttgtgaacagggtgagcattattctccagtatccttaagccctggcaagcagtatgtcctggaaagaggaagatctttttcaggaagaaaaattcttgagtggcttccaaagtgtcttgaggcgctaaagatgctcagcattatttggaatgtggacaggtcaggagtttgattgtaaagatattttatttcttagagactttctaagaaggaaaaggcatataagtaaatcttattagaccttcactgtaaaggacatatcatatttattcatacacatgctggaattattggtgcagacatttaaatacattttctttgagaaagtccttttttttttttttttttgatggagtttccctcttgttgcccaggctggagtgcaatggtgcaatctcagctcacaacaacctctgcctcctgggttcaagcaattctcctgcctcagcctcccaagtagctgggattacaggcatgcaccaccacgcccagctaattttttttatttttagtagagacggggtttctccgtgttggtcaggctggtcttgaactcctgatctcaggtgatctgcccaccttggcctgccacagtgctgggattacagtcnnnnnnnnnnnnnnnnnnnnnnnnnnnnnnnnnnnnnnnnnnnnnnnnnnnnnnnnnnnnnnnnnnnnnnnnnnnnnnnnnnnnnnnnnnnnnnnnnnnnnnnnnnnnnnnnnnnnnnnnnnnnnnnnnnnnnnnnnnnnnnnnnnnnnnnnnnnnnnnnnnnnnnnnnnnnnnnnnnnnnnnnnnnnnnnnnnnnnnnnnnnnnnnnnnnnnnnnnnnnnnnnnnnnnnnnnnnnnnnnnnnnnnnnnnnnnnnnnnnnnnnnnnnnnnnnnnnnnnnnnnnnnnnnnnnnnnnnnnnnnnnnnnnnnnnnnnnnnnnnnnnnnnnnnnnnnnnnnnnnnnnnnnnnnnnnnnnnnnnnnnnnnnnnnnnnnnnnnnnnnnnnnnnnnnnnnnnnnnnnnnnnnnnnnnnnnnnnnnnnnnnnnnnnnnnnnnnnnnnnnnnnnnnnnnnnnnnnnnnnnnnnnnnnnnnnnnnnnnnnnnnnnnnnnnnnnnnnnnnnnnnnnnnnnnnnnnnnnnnnnnnnnnnnnnnnnnnnnnnnnnnnnnnnnnnnnnnnnnnnnnnnnnnnnnnnnnnnnnnnnnnnnnnnnnnnnnnnnnnnnnnnnnnnnnnnnnnnnnnnnnnnnnnnnnnnnnnnnnnnnnnnnnnnnnnnnnnnnnnnnnnnnnnnnnnnnnnnnnnnnnnnnnnnnnnnnnnnnnnnnnnnnnnnnnnnnnnnnnnnnnnnnnnnnnnnnnnnnnnnnnnnnnnnnnnnnnnnnnnnnnnnnnnnnnnnnnnnnnnnnnnnnnnnnnnnnnnnnnnnnnnnnnnnnnnnnnnnnnnnnnnnnnnnnnnnnnnnnnnnnnnnnnnnnnnnnnnnnnnnnnnnnnnnnnnnnnnnnnnnnnnnnnnnnnnnnnnnnnnnnnnnnnnnnnnnnnnnnnnnnnnnnnnnnnnnnnnnnnnnnnnnnnnnnnnnnnnnnnnnnnnnnnnnnnnnnnnnnnnnnnnnnnnnnnnnnnnnnnnnnnnnnnnnnnnnnnnnnnnnnnnnnnnnnnnnnnnnnnnnnnnnnnnnnnnnnnnnnnnnnnnnnnnnnnnnnnnnnnnnnnnnnnnnnnnnnnnnnnnnnnnnnnnnnnnnnnnnnnnnnnnnnnnnnnnnnnnnnnnnnnnnnnnnnnnnnnnnnnnnnnnnnnnnnnnnnnnnnnnnnnnnnnnnnnnnnnnnnnnnnnnnnnnnnnnnnnnnnnnnnnnnnnnnnnnnnnnnnnnnnnnnnnnnnnnnnnnnnnnnnnnnnnnnnnnnnnnnnnnnnnnnnnnnnnnnnnnnnnnnnnnnnnnnnnnnnnnnnnnnnnnnnnnnnnnnnnnnnnnnnnnnnnnnnnnnnnnnnnnnnnnnnnnnnnnnnnnnnnnnnnnnnnnnnnnnnnnnnnnnnnnnnnnnnnnnnnnnnnnnnnnnnnnnnnnnnnnnnnnnnnnnnnnnnnnnnnnnnnnnnnnnnnnnnnnnnnnnnnnnnnnnnnnnnnnnnnnnnnnnnnnnnnnnnnnnnnnnnnnnnnnnnnnnnnnnnnnnnnnnnnnnnnnnnnnnnnnnnnnnnnnnnnnnnnnnnnnnnnnnnnnnnnnnnnnnnnnnnnnnnnnnnnnnnnnnnnnnnnnnnnnnnnnnnnnnnnnnnnnnnnnnnnnnnnnnnnnnnnnnnnnnnnnnnnnnnnnnnnnnnnnnnnnnnnnnnnnnnnnnnnnnnnnnnnnnnnnnnnnnnnnnnnnnnnnnnnnnnnnnnnnnnnnnnnnnnnnnnnnnnnnnnnnnnnnnnnnnnnnnnnnnnnnnnnnnnnnnnnnnnnnnnnnnnnnnnnnnnnnnnnnnnnnnnnnnnnnnnnnnnnnnnnnnnnnnnnnnnnnnnnnnnnnnnnnnnnnnnnnnnnnnnnnnnnnnnnnnnnnnnnnnnnnnnnnnnnnnnnnnnnnnnnnnnnnnnnnnnnnnnnnnnnnnnnnnnnnnnnnnnnnnnnnnnnnnnnnnnnnnnnnnnnnnnnnnnnnnnnnnnnnnnnnnnnnnnnnnnnnnnnnnnnnnnnnnnnnnnnnnnnnnnnnnnnnnnnnnnnnnnnnnnnnnnnnnnnnnnnnnnnnnnnnnnnnnnnnnnnnnnnnnnnnnnnnnnnnnnnnnnnnnnnnnnnnnnnnnnnnnnnnnnnnnnnnnnnnnnnnnnnnnnnnnnnnnnnnnnnnnnnnnnnnnnnnnnnnnnnnnnnnnnnnnnnnnnnnnnnnnnnnnnnnnnnnnnnnnnnnnnnnnnnnnnnnnnnnnnnnnnnnnnnnnnnnnnnnnnnnnnnnnnnnnnnnnnnnnnnnnnnnnnnnnnnnnnnnnnnnnnnnnnnnnnnnnnnnnnnnnnnnnnnnnnnnnnnnnnnnnnnnnnnnnnnnnnnnnnnnnnnnnnnnnnnnnnnnnnnnnnnnnnnnnnnnnnnnnnnnnnnnnnnnnnnnnnnnnnnnnnnnnnnnnnnnnnnnnnnnnnnnnnnnnnnnnnnnnnnnnnnnnnnnnnnnnnnnnnnnnnnnnnnnnnnnnnnnnnnnnnnnnnnnnnnnnnnnnnnnnnnnnnnnnnnnnnnnnnnnnnnnnnnnnnnnnnnnnnnnnnnnnnnnnnnnnnnnnnnnnnnnnnnnnnnnnnnnnnnnnnnnnnnnnnnnnnnnnnnnnnnnnnnnnnnnnnnnnnnnnnnnnnnnnnnnnnnnnnnnnnnnnnnnnnnnnnnnnnnnnnnnnnnnnnnnnnnnnnnnnnnnnnnnnnnnnnnnnnnnnnnnnnnnnnnnnnnnnnnnnnnnnnnnnnnnnnnnnnnnnnnnnnnnnnnnnnnnnnnnnnnnnnnnnnnnnnnnnnnnnnnnnnnnnnnnnnnnnnnnnnnnnnnnnnnnnnnnnnnnnnnnnnnnnnnnnnnnnnnnnnnnnnnnnnnnnnnnnnnnnnnnnnnnnnnnnnnnnnnnnnnnnnnnnnnnnnnnnnnnnnnnnnnnnnnnnnnnnnnnnnnnnnnnnnnnnnnnnnnnnnnnnnnnnnnnnnnnnnnnnnnnnnnnnnnnnnnnnnnnnnnnnnnnnnnnnnnnnnnnnnnnnnnnnnnnnnnnnnnnnnnnnnnnnnnnnnnnnnnnnnnnnnnnnnnnnnnnnnnnnnnnnnnnnnnnnnnnnnnnnnnnnnnnnnnnnnnnnnnnnnnnnnnnnnnnnnnnnnnnnnnnnnnnnnnnnnnnnnnnnnnnnnnnnnnnnnnnnnnnnnnnnnnnnnnnnnnnnnnnnnnnnnnnnnnnnnnnnnnnnnnnnnnnnnnnnnnnnnnnnnnnnnnnnnnnnnnnnnnnnnnnnnnnnnnnnnnnnnnnnnnnnnnnnnnnnnnnnnnnnnnnnnnnnnnnnnnnnnnnnnnnnnnnnnnnnnnnnnnnnnnnnnnnnnnnnnnnnnnnnnnnnnnnnnnnnnnnnnnnnnnnnnnnnnnnnnnnnnnnnnnnnnnnnnnnnnnnnnnnnnnnnnnnnnnnnnnnnnnnnnnnnnnnnnnnnnnnnnnnnnnnnnnnnnnnnnnnnnnnnnnnnnnnnnnnnnnnnnnnnnnnnnnnnnnnnnnnnnnnnnnnnnnnnnnnnnnnnnnnnnnnnnnnnnnnnnnnnnnnnnnnnnnnnnnnnnnnnnnnnnnnnnnnnnnnnnnnnnnnnnnnnnnnnnnnnnnnnnnnnnnnnnnnnnnnnnnnnnnnnnnnnnnnnnnnnnnnnnnnnnnnnnnnnnnnnnnnnnnnnnnnnttttcttttccttttattttattttattttttgagacggagtcttgctctgttgtctgggtggagtgcagtggtgcaatctcggctcactgcaacctctgcctcccaggttgaagcgattttcctgcctcagcctcagcctcctgagtagctgggactacaggtgtgcaccaccacgcccagctatttttgtttgtttgtttttagtagagaaggggtttcaccatgttggccaggatcatctcaatctcttgacctcatgatccgcccgcctcagcctcccaaagcgctgggattataggtgtgagccactgcgcccagccacctgtgagctttcttttcctcctccatctctggtcctgacccctcatcctcttaagcaaccctctcctagttccagaagctttcctgccagtgaggatggagataggaaatcagaaaacctaggggctccaggcatcctgaggtgtgaaccagagccctccagaccccctaggcctgtcacagtaaaagtccattcttataaactgtgtctatacacatgtattcttcagttctctatgaaaccccagtatatctccctgtggccaacttgcacctaacttcctttcaccctcagcttcttcttccccttttacaaatactgaaatcaaacagggcacgttgacccttcctatggtgcttactttttaatcttacacatggattcactatggcattgcttccccagcctgatcaaaagaagtcatttggagcgttcatttaaaatgcagatttttggccaggagcaatggctcatgcctgtaattccagcactttgggagactgaggcaagcagaacacgtgagcccaggagttcaagaccagcttgggcaacatgatgaaatcctggctctacaaaaaatacaaaaaaattagctgggtgtagtggtgtgcacctatagttccagctacttgggaggttgaggtaggaggatggcttgagccygggaggtcgaggctgcagtgagccatgatcacgccactgcactctagccttggtgacagagcaagaccttgtctcataaaacaaaaacaaaaaaaaatgcagattcttgaatcccatcctaggccccctgaaatcagaatcttaaaggaaagggtccaggaattttccacatgaatttgtaacattgtatattaacagttgccctaggtgattcttatgatttggcgagtttggtagacattgcactgtaggattcccttagttcagcaaagacctctaggatctttaaaatgcaatttattttcttaaaaaatatatcaataggcttttaggaatacatggtgtttctaagtcaaattgaggcattgcctaagagtgcggcccgatcaagtcaaaccctctgagaatgttctgtgaacgccaaggyygctggttaagatgaggacgtgatcagtgacacgcactctctggttctgttgccccacaggtggcttgcaattcgcctggagctggttgggaacctgactgtcttcttttcagccttgatgatggttatttatagagataccctaagtggggacactgttggctttgttctgtccaatgcactcaatgtgagtttgaaggttgggagtttggtttcgttagtgtgcttattcttaaattaagcctgatgtatactgtggagtctgtgctcttgattccttcttaaacccagagggactaaagaagactgaggttcaaaccctggctccatcttttacccayggacgtattccttactcttcctaagtagacatgaatgccatctagaaaactggacataaatattgaccttagggcttaagaaggcaatttcatatgtttcaatctaattgttccctgtctgcctctttgcttggttctagtgagagaataaataactttcttctctagaacgtagcagtaatcagaaaggctttttgaacaaataattcctcctgtgtttatttttcttagatcgtagaataattggaggtaattctaataaagaacatagagtctgataaaactatagaatgtgtctcactgcagcatccccagcatgactagaggatacatggcaggcatgattcttttctagcacctaagacagtggctggcactaccgtaattattcaatcaatatttgttataaatgagtcatttgaccatctttttgaactaatttttttagttcaaagagatttgcatagttacatgtgggcattatataatagtgctgtcttcattagaagttaataaggcctgtggagcacagtggctgacacctgtaatcccagcactttgggaggccraagtgggtggatcacctgaggtcaggagtttgagaccagcctggccaacatggtgaaaccccatctctactaaaaatacaaaaaaaattagccaggcatggtgatgagtgtctgtaatcccagctactggggaggctgaggcaggagaatcacttgaacccaggaggcagaggttgtartgagccaagatcgtgccattgcactccagcctgggcaacagagcaagattccatctcaaaaaaaaaaaaaaagaagttaataaggcccaatgtgttcctgccagggcacctaaaaggactttgttattcactagagtcacttagttccttgtgtcactgccctttcatacccccatttctaggctttttagcccaggacagacaaggcaaatagtcaggaaactattagattgaaccaaaacaaaatgactcaaacaccggcaattacatatgcttcaatctacacaaagtggatactctgagtccccatgattccgtcctctgctttctgtggctccctttctttaaccaccatttgctcaacaagaactctctgtgcatatatgcaaactcctgagtctttttctgaaagaagtttgcatctgagtaatctacagattccctggcctggatcatgcctttccctgattcacaaagaacactaggcatccaggcaggaggcctgagctctgctcccactccacccattgccagactctcaaattccagctttagtcccaaaccactagacactcacattgcccttcgcgtgagcacctaattagtctgcagccattcaatgcactgctcttaattccttccccaaggaggcaaggattgtctttcttacacttttccttactcccttgtagagtccagcacagtgctgggtacaaagtcggcactggattgtccttgtggtttgagtggttgagttggtttctgtgccyatgatgattttcagtcttctggtttttctgtagatcacacaaaccctgaactggctggtgaggatgacatcagaaatagagaccaacattgtggctgttgagcgaataactgagtacacaaaagtggaaaatgaggtaaggaggaactggaaaaatccaggaacaaggcaaaaacaacatgcaactccttcgagagtgcatctttagaatttctccatattttacatgggcccataatgggtccctaaagtttcctttsctctaactcaaaggacctaatttcttcaaacttagaataggaaatggtttaggggatgtcgggtcttgcaacataccgaggagatctacagcacaagctcatggtgtatttttctttaactgaataaggtaggaactttccaaaagtgcaagtctagttcagcctattaaatgcagaggccattaggtagctgggacactgctacccttctcctgttctatgacacgagtcctgggtggactgttcggctgagttgccaccttataaaacttacttctcatcttgtctccttgccaggcaccctgggtgactgataagaggcctcygccagattggcccagcaaaggcaagatccagtttaacaactaccaagtgcggtacygacctgagctggatctggtcctcagagggatcacttgtgacatyggtagcatggagaaggtaggtggagtgaaggaaggcctggatgggaggccttgtgatcaaacaacaattggacagagtggagagcagctgggccctaagccttcatcatttggatggagggaaagggtcagggcacttcctctgccctggggaggtgtggggacacagtatcagagggaaggatagcagccagggatcacacagacttaccgyagctgtcggggccttctgctcarctcctccctgcctcctagccagctgaccagggcccctttcctataaggtccacagtatgcagagaggaagtcaggaaggaaacaagggggcggccaggcctggtgaaggaactgttgagaatagcagtgtggaggttgtccctgaaggaagaatggcccagttctcctcccagtcttcaaagtcaggcaccctccttaggtgctgttgttctccgaggacttggggtctgatgagcaaggacgctgaggtccagatcagagtctggctctcagctggtggcagacctaatctttcccttcttcacttctaaacaagcatttttcttttttctttatttttatttatttatttatttattttcagatggagtctcactctatcacccaggctggagtgcagtggcacaatcttggctcactgcaacctctgcttcctgggttcaagtgatttttctgactcagactcccaagtagctgggactacaggtgcacgccaccatgtctggctaattttttttgtatttttagtagagacggggttttgccatattgaccaggctggtcttgaactcctgaactcaggtgatctgcctgccttggcctcccgaagtgctgggattataggcatgagccaccacgcctggcctaaacaaggattttgtttttatctataatttccaataataattataacaacagctgccaagagagtccatttcaaacagtgactatagttctcagcaaacaatgatttttggcatctttttctgacatctgggtacttttttcctcaccaaaaccaaaatcagtttaatatcttagagatggagtagccagtcactgcctcttacctcctgtgactgtgaatgcccaggctaaataacttttccccaagaattatttgtggaactaatgtgtaagggaactatattcgcagattggtgtggtgggcaggacaggagctggaaagtcatccctcacaaactgcctcttcagaatcttagaggctgccggtggtcagattatcattgatggagtagatattgcttccattgggctycacgacctccgagagaagctgaccatcatcccccaggtgagctctasaacttactcgggcacatgccgtggggagcagcttgttttacaggaaacatatgcagcttcttcttgatgtmtgttcagtcagcactgtcaattccacggtctactcgggatacttgagctagttccctaggatggacacgtcrtttccagaactttgaaatgtttggtaatatgcatttgtggctgcctgtatctgaccactaggtggcagcaacacaacagaagtcaagtacagcagacgattctttagcgttgctatagcccatcacggtttgcaagacttttgcaatcagcattagcagttttgccgctgaagcttgaagccattaagctttatactccccatttgctatggttaaaagatagaggagggaatttgctgcaggtttctgccagcaagcggaacgcttcgtgcatcagcaagaaagatttcccttcggcttcctctctggatcctgccagataaggactgccgcgaggcctctccgttccccgcagcggctcctcaggagaacctttcctcctccgcccactgcagcccagttcctctgggggtagttytggtctgtctggtgtttgctcagttcgatagtcttttctccagcctcttcaaaagcgtgacaccttcttctcatgcagctgtactattctttcctctaccctcctctgatccctctaccttgaaatcacgattatgggtttgggaggccgaggcaggtgaatcactggagcccaggagttcaagatcagcctaggcaacatggcaagaacccatctctacaaaaaatttaaaaaatcagccaggcatcgtggtgcgtgcctctggtcccagctactcgggaggctgaggtggaagcatcacttgagctaaggatgtcaaggctgcagtgagcggtgtttgtgccactgcactccagtctgggcaacagagtgaaagcctcaaaaacaaaaaataaaccgaggacttctaaccctgtgcctagcccctggctggtagccactccgagccttaggagggaaaaccttgcggaagctcaaccacaaaccagcttcctgcctcaggaatccatctcaggccagtcctatccaccatctcccagtcctgaggaactccgaggtccttttctggcatragccccaacagcccccttgtcctttcacttgcaggaccccatcctgttctctggaagcctgaggatgaatctcgaccctttcaacaactactcagatgaggagatttggaaggccttggagctggctcayctcaagtcttttgtggccagcctgcaacttgggttatcccacgaagtkacagaggctggtggcaacctgaggtaatgttccatagcctgctacccctgcaggcaatgagaggatgtgagggggccactcctcgtgttcctcgtgttaggtgatgcctggcatagaattttcatccaggtctgattcctaaagtgtaaaatgaacctgttgtaaagttcacaagataaaatagatgtgaaagtgctttaaaactcttgaaaactggtcgagcacagtggctcacgcctgtgatcccagcactctgggaggctgaggcaggtagatcacctgaggtcaggagttcgtgaccagcctggtcaacatggtgaaaccctgtctctactaaaaatacaaaaagtagcctagcatggttgtgggcacctgtagtcccaagctactcaggaggctgaggcaggagaatcgcttaaacccaggaggtggaggttgcagtgagccgagattgcaccactgcactccagcctgggcaacagagcaagactccgtctaaaaaaaaaaaatcaactcttgaaaacctttgttattggccgggtgcagtggctcacgcctgtaatcccagcactttgggaggctgaggccggtggatcacgaggtcaggagttcaagaccagcctggccaagatggtgaaaccccgtctcactaaaaatacaaaaaattaactgggtgtggtggcaggcgcctgtaatctcagctactcaggaggctgaggcagagaattgcttgaacccgggaggcggaggttgtagtgagctgagatcacaccactgcactccagcctgggagacagagcaagactccatctcaaaacaaacaaacaaacaaacaaaaaacctttgttattaagtgtactcctcatatgacattacacaatgtgagcttacacatcccacagaaagcagaggctcccagctgtgcacaatcaggatgaaaatagtctggctgcctggtccaatcctagagtctgatttaattgtttgaggctagactggacatagggagttttaaaggatccccacgaggctgttaagggcatcgcagttaaagaaccactgatctaaagagcatgcggatgacagggaacgtgacatctgtaaaatccgtaggcactgttgaaacacctgaaatcaacaaaagactctcttggctttcacagttatttttaacctttccaaaacatttttatataattgacagttcacttctggccttcagtgtatgtttgcctgtccattaataagttgatctggcatttttcctgtaacatttttgtttttccttccacacactgaagttctgccctcagccaaagcccactgctcatggacaggtcttgctcctgccccaggggcctcagtggtggtaggcagggaataggccgttggcaagttgaagctcaggaaggaagggagggctcagtaactgattcaggggccagccactctggcttcacctgggagcttgttacatgtgcagaatctcagggcgtagacctactcatcagaatccgcactttagcaagattcccaggtgatttgtgtgcacattacacttgagaagcactgcctagagtgttgtgattaactaggctgcaagctaaaatcacccaggaagctttaaagctcccaacgcctaaactgtagcccagaccaastgaatcggggacccaggtgattttagtgtgtagccccagggaacaagccctggtagagaacatcgtcagtttactttccctccacaacagatctagcaactagcaggactcaagtaggtctttaggccagtgtaaaagatcattcaaacattcagtcagcaaaaatgtaataacaccggccgggcgcagtggctcatgcctgtaatcccagcactttgggaggccgaggcagccggatcacctgaggtcgggagctcgagaccagcctgaccaacgtggagacaccccatctctactaaacatacaaaattagtggggcatggtggcacaggcctgtaatcccagcagtaatccctcaggaggctgaggcaggagaatcgcttgaacccgggtggcggaggttgtggtgagctgagattgcgccattgcactccagcctgggagacaagagcgaaactccgtctcgaaaatatatgtacacctactgtgtgccaggtactgaaaatacagaggcaaacagagacacaaccctgacttcctagcatttacagcataatgaagacagacctctgtcagtaaatgccagtacagtctgtgctacagagggtacatttgggatgctatggtagggtacaatgggaggccttgacatttctggtttgtaaaaacaaaaatcatgccatctttctcctgtccaagctgagagatgcttaaatggtattaccaatgccttgatttcagacctgagtttcaaacctggcctgggggactaaaacttacatttctctgttgaatgatgggtaagttcagcttggagagagcagctgaaagacaaagtggcgcctcagcaacagtctgttactctaaagtccaaagtctacgttacactttgggccaggcaggagtttggtacaagctaagtaaatagtttttcagtgtctctgatcttacattacaggggaaaactggaagttcatcttgggtgacttctcatctcctgcagaaattttcttacagagaattacagcactttggccaccccctgtttaatatgttccctaatggccacagcaggaaagagcaattagcaaattcctgaatatttccttcacatcatttcccaaagcttctttatgttaggtaagaggtccagccttcattacaggcttttagcaaattaaagctatttgcattttagaagcatatttgaattccacatacattgcatctcacaccaagacatcacgttcattagacagcttcatctctaatcaaagcagaaggccttgaacaaataattagccttgaggctagaattacacattaaaataataaattgatttgctaaggccacaaagaaatgccactggggcattctagtgttgctccaccctatattaatggcttcaggtcaaatgctgctaacgtaaacttggtgacactcatgttgttttggaaatgttgatgtcacggcaaccaaatacaaagcatggttcctgggccattgttatccaaacttgtttaagcataaaaatggcctggggtgcttagtaaaaaggcaccttcctaggctcctgcccgctctgattgagcaaagcaagggcccagaaatatgactttttaattaagtacttggggtgggtcttcaattgggaaagtttgaaaaacgatgctcacagcagcaaggtacagctagttgaagaggcccaaacattccaggggaattttggagggggggttttgaaagtctgatctggaacatgaaaatggtccccctgccctgcgtctttccttggtctttaggagctaacacatggttgcttctattggctgcagcataggccagaggcagctgctgtgcctgggcagggctctgcttcggaaatccaagatcctggtcctggatgaggccactgctgcggtggatctagaracagacaacctcattcagacgaccatccaaaacgagttcgcccactgcacagtgatcaccatcgcccacaggctgcayaccatcatggacagtgacaagtgagtgtaggrggacagggcttgacacggatggcttaacccttgctcaacagtaacagtgtcagccgggaaacacctgatggcagaaggtttaaccaccaccacattactgatgaagaaactgagacttagagatgtcaagtaatctggccaaaattttacatcacgcraatgaaaacgaacaaggttaagggaactattcatatcttgagggcaaaataggaaactgtgtgttgtaacaattaactgggtatggggaggtggaagctcaagccgtgagaggcagatgttgaccatagaccttcctaactgtcctgagcctcagctgctgctctgtaaaacagccagaagctttctattccttccagctgtgtcatattacaatcaaaagtcagtaatcttagaaagctgtttggagatgataggcaccctttgtaaaccaatctatccttaaacaatgtgcacttcttttaaaaactcatgtaaatggactcatactgcctgtattcttctattacttgattcttttgttcaatattatttgcagaattcatccatgttgatgtgtgtagctgtggctcattgattttcactgctttgtagccttgtctgactataccacaacttagtcctggttattcttataaatgcctagacttgagatgctgctttctaagacttttatttctttcttccttgtttcagggtaatggtcctagacaaygggaagattatagagtrcggcagccctgaagaactgctacaaatccctggacccttttactttatggctaaggaagctggcattgagaatgtgaacagcacaaaattctagcagaaggccccatgggttagaaaaggactataagaataatttcttatttaattttattttttataaaatacagaatacatacaaaagtgtgtataaaatgtacgttttaaaaaaggataagtgaacacccatgaacctactacccaggttaagaaaataaatgtcaccaggtacttgagaaacccctcgattgtctacctcgatcgtacttccttgctacccacccctcccagggacaaccactgtcctgaatttcacgataattattcctttgcctttcatttctgttttatcacctttgtatgtatctttaaacaacatatacccttttttacttatgtaaatggactgactcatactgcatacatcttctatgacttgattcttttgttcaatattatatctgagattcatccatggtgatgcaaataggtgcattattttttttcactgctctgtagtctggcattgtatgaatacagcacaatgtatcagttttaatattggggatcattagcattattctcaggtttttaaaaattataagcagtactactatggacattctggtctacatctcctggcacatatgtaagagtttctctagggtataacctaggaatggagggtatgaacatgtttacatgcacaaactagctgatgccaaactggtaatgccaactgaaaacattgctgtcaatctgatgaatatgaattgatgtatcaatgagaatttcatttgcatttccctagtatctattggggatgaatatattttcatgtttctggggcatttgcatttccacttgttttttaaatattgtgtctgataattccaatgtctggattctttgtttatctgttgtttctgttggtttttactcatggtattttatttccttgtatgtcttgtgaatttttattataagctcgttctccttaaaactttatctgtggacattctttgaggcctaagttgaccgtgaattcttcctaagggaattgggaatgctttagcctgctgcctggggcattacccagaacctctttgaatgaaattcttcactaaggggtttcaaaccacagtgcaacttcagaccacaatcctgtacaagagccagcttgtgatttacaaattctccagggaaagtgacaggttggagataggcatggggttttgttgttgttcttgttgactcctgcattctgcatggcaggacctaggcctctttacctgtacattgcaggtataaccctttcatgacacaggttcatcagagggttttagtctgcactgtggcagaccttggctttatctcttgccttgacctcctacattatcaacaaagtgagagtttaagatctcctgggcaggagatttcagaagccagcctaagttttgggccttcctcacctcctagggcctttgtgtcaggttcttttgggttcttcatattccttacctccctttcagtgatgttatgataaagattttgatttattcagcatttcacggtctgtttagtgaggtgcttaacattgaacttctgaaatgaagggcatatagctagtgtaagcatacctctggtttgccctgaatagttatgggttacatctgttttcccaaaacaataatagctccccctttcacacacgcacaaaaattgtctcatttgtatgataaacttgtgtgcctcctacacatagccctgtgaattcgattttgaatcacagcatggatggagatcaacaaagttgtatagatattgaagtgttggctgggggggcgctattcatggagaatcccctccttaattctgcaaaccagatctagtacattgtgaatattctataatcattggctattttttacagctagcttttcagatctatacctgcttatgtacatgaaatgtagctcctgtaaattgcagattagtgtatattaatctaagatgccatcaactgtaaaatacctgttattttctataccacgaagaaaggatactgccaattaaactttggtatgcattgttggtaaaatgcatcctatttgtggaaaaaaattagcattttaagattaatacaatacaatacctgtaaagctctataagagctaagtcatgtcctttatttctgctattgatccttgttcttttttcctgattgttccagtctgtattgctcttttaatccaatatcatcgtcatcatcatcagcatcatcatcatcatcatcacttcccttatctctttttctcaactatttcactgctaggtagctaactactgtttttaccatctattctttctaatcattagaatttcaaaaaactgctttttccttttttttagtggtgtttttaaaatttatttatttattttttagtgtttattttgaaagcacattccatacacgcgtactttccaacttgcttcttaaatgagtttttagatatagagcatttagaggggcaggaggaactttggaaaacaaaggaactatttacgctgactgcagaagccagagaaatgcaagctaggtaaagcaccaacagtaaaagtgaaactaaaggagaagcctgatattttctcaatttgtttctcaaacaaaatggtccaggctgatgtcgatatagttatcaccagagaactttgaagattatcagccatcacttatttatttagcttccagtaaatgtctgacactgtgccaaaaattttttaaaagctatctagggcgggtgctgtggctcacacctgtaatcccagcactttgggaggctgaggtgggtggatcacctgaggtcaggagttcgagaccagcctggccaacatgatgaaaccccgtctctactaaaaatacaaaaattagccaagcatggtggcacatgcctgtaatcacagctactctggaggctgaggcaggaaaatcacttgaacccgggaggcggaggttgtagtgagccgggatcacgccattgcactccagcctgagcaacagagcaagactccatctcaaaaaaaaaaaacaaaaacaaaagctacctaatataaactaaataaagattactttccattgtggcctaattaataaccctttcacaagctttatttcacttaccgatttcagggacaattttagataactacctaaaacctatacattcccaaattccaccatatcttcactgtttttcactgatcttttgggcactttctgtgcccttcccaattcttctgggtgcatggaatcatagtgttcagaagtaaaggtgcctatgcccatcgttaggctactatctctcagtttcaaacctacccttttagattttgctctgtgatgctgggacttataagtctcatttctgctttgccaactattcctattaagttctgacaataggaggtgctggagggacactggacgcagcctggatgaggaagaaaacgtgctccttctcgttggctctgttgctattagcatcactctaacagtttctctgcagcagcagttctcacaagtagccacattgattttagtttgcagtttttcaacattcacagaaagtgtcgtcaggcccaaaaccaacaccagctgagcagcgtcccctttttcagaagcaataaacagactgaaagaaaacaaactaattttacattgatacattggcacaaacaggaagaataagtctataaaaatataaagaataaacctataagaataaaccatcaggcctacatttctggcagaataattttgcataagcacttttggaaacatcctcagaataaatttgtcctgtttatataatagaatgagaatacatttaaccacaaatgcataccgatcatgaatttattttagaattagcaaacaatattgtacaaacattggtatttaaatctctaagctcctgcaacttagatttagttagcaaagactatattctactctgagtttggtcttccacatggactagacactagactggttttttgaaaggtttcatattgttcgaaaataccataagtaggccaggcacagtgactcacacctgcaatcccagcactttgggaggcctaggcaggccggaatgcttgagcgcaggagttcgagaccagcctgagcaacaaagtaagaccccgtttctataaataaataaaaaaaaatacagaaagttagccaggtgtagtagtgcatgcctgtagtcccagctactcaggaggctgaagtggaaggatcgcttgagcccaggaagtcgaggttgcagtgagctgagatcacaccactccattccagcctgggtgacagagtgggactctgtctccaaaaaaaaaaaaagaaaacatcataagtaaaagattgtaaaaatgcataaaacaattggctgtaaaaagcactccattgtcatagccctccttttaatttcatatgcaagtagttagttatgctgtagaatttaactgttacaatataaaaagcaactatttatggaaaaagtagaaaaaaggagaaaatggccaggtgcagtggctcacacctgtaatcccaacactttgggaggctaggcaggaggatcatttgagctcaggagttcaagaccagactgggaatatatgtatggcagtgtttctttaaggtaaatgaacataaaaatagagtttcaggaagagaagaaaaactaggctagtttggttcttactgaattttgaaaatgaactacaatagagctccttcttcaattctaacaatcaaggccttggtcaccatattggtaatctcttgattaatcctcttgattctcacttgatttccatctggcgattatgcctgacaaacactatcacggatttcggatccatctgccctgttccttggcagccatctttgggacaattacttgctgctcaagcctggagaccagggttgtccaatcttttggcctccctgggccacactggaagaagaattgtcttgggccacatataaaatacactaacactaatgatagctgataagctaaaaaaaaaaaaatcgcaaaaaaaatctgattatgttttaagaaagtttacaaatttgtggtgggccacattgaaagccatgggccacatgcggcccacaggccatgggctggacaagcttgctatagacactcgttcttctctgggaaacaacttggttgtcagaagattgtggatagcactggttgtactattagctctggtcacaggtattgctcttgatacctggtgctaaacaatagctttgcctggctgcttcttttttagtgctcatctgcggacacctgtggtctggtttgtcagggtttgcattctggtaatataaaggtagcttctggtataataaatatttgcctggttgacacaattattaggtccaatctgtaaaccaattactctttggccagcttttcattgtccttaatccaacagtctaatttctctgcaaacttgactccaatgttaatggttgaacagaattcttttattttagttggacctagagtaggggtatggctctagggccaaatttgccctgctacctgtttttgcacataaagttttactggaacacatccatgctcctttgtttctttgccatctgtgcctgctttcatgttacaatacagagttgaggaattggcccacaaagcctaaaatatttactatctggccctttaagaacaggtttgctgaccactgctctagagccaccaatgtagcctggactgggtcacgattccatgctcaaaaagactatttgctggccgggtgcggtggctgacgcctgtaatcccagcactttgggaggctgaggtgggcggatcacctgaggtcaggagttcgagatcagcctgaccaacatggagaaaccccgcctctactaaaaatacaaaaaattagtcgggcatggtggtgcatgcctgtaactccagctactcgggaggctgaggcaggagaatcacttgaacccgggaggcggaggttgccgtgagctgagattgtgccattgcactccagcctgggcaacaagagcaaaatctgtctcaaaaaaaaaacaaaacaaaactatttgcctttaaaatgtcatgtggcttcacacctgtgatagaataatggtcctcaaaaatgtccacatcctaatcctcaaagcctgtgaatatgccaccttccctggaaaaaaggactttcactgatgtgattaagttaagggtcttcagatggggagagcaccgtggattggccaggtgggctcaatgtaaacacagcgttcttataaaagaggcaggacagtcggagtgagagcgtgctgcgatgacggatggagtgagacagttgaaggtgccacgctgctggcttty

SEQ ID NO: 5637 - DNA, 84105 bp, Homo sapiens
ttatcttctttgatcttgaccttgaacattcttactttaaccccctcagagctagatttttcattttttaattttctattttaatttctgaaatacatgtgcagaacttgcaggtttgttacataggtatacatgtgccatggtggtttgctgcacctatcaacctgtcatctaggttttaagccccgcatgcattaggtatttgtcctaattctctccctccccttgtccgccccctactcccgacagaccctggtatgtgatgttcccctcccggtgtccatgcgttctcagagctagatttttaatatatatgcatgagcacaagcatcaacccaacacaccctactcgtctggcattcgtttcacatgatttcaatagactcaggtcaaatcatcttgcccttctattcttgaattcttgaaaagtctgatacatactgtagtttgtactgacgtattatgtgaaagagtaaatccacgataactgtgctactcacaatgtgttccctggactggtgctgctttctgaactgttttgtactggtccacaattagatacgtacagaaatggagagtatgaccttagagactgtgataacaatttgataaaataattttacttctgctgggcatggtggctcacgcctgtaatctcaggactttgggaggccgaggcgggtggatcacctgaggtcaggagtttgagaccagcctggccaacatggtgaaaccccgtctctactaaaaatacaaaaaatagccaggcgtggtggtgggtgcctgtaatcccagcttcttggggggctgaggcaggagaatcacttgaacctgggaggcggaggttgcagtgagccgagactgcaccactgcactccagcctgggcaatagagcgagactccatctcaaaaaaaaaaaaaaaaaaagaaagaaagaaataattttacaaattattattattatttacaaataatagatttgtggaatctaatgagagaaccttgaacttttgctttgtgtatgtctttggcttgttttctcttttatttttctacttagtcatctttactgattttaccaaagcatggatcaatgatggattggacattaaaaaaaaaaaaagtcctttgccacaggtagtttgagaagaactgccttagaatgaagcactcctaaatatctctttgacttttactctactggcaatccatttcccaaggtacagtgagccaccacatttccccttaaacttccatcactttactgtgaaaggatacagaaagaaaagaactgggtttattagggaagcagaagtagagtaggaaagccagactaatgccattttaagttaacctccatcttgagactaacaaggcacattccttgccagtcatgacccatggtcatgtttatatttaaagaaacagcttaatgatatctgcaaggacatattcctacagcaacagagtatccctatgtcccaatatccataacagtatatgatttcaagttcattatagttatgctttaatgtacttatgtcaattatgatgtatttatttatttatgcttttatgtatttatagtattgctttggtgtatttatgccaattatgatgtatttatttaagatgtatttatccttggcatcctaagtgccaaggatagttttatttaaatcagcgaagtaatacattttgtcatactttcagcccacccacatgtagacataacttagcttagcttttacatagataagacccctaaacaagaaaaacttaaaacaaagatgaggcattcctcttcttgatttctgaggacaccctaatctgtaactgagtagctttttataaactgtctcttctcactgtactctgcgacttccttttaactctttcctgctgaagatccaagaacccattcttggggatcccttttccggcaacagcttgagagggctgggagaatgaggaggcatgggaaaatgggaggggcataacggggctttgattcttagaaaatacctctcctgcagtacgtagatggctgccagggtctctttcaatgctgtctctgagtcgacaagctcaaggaagaaagttgggggcagggaggtgactcttgagaatccttttccttccttgtctcctggggctcactctgctctgactcaggggacaagactgttttgttgactacaacctcctcaacactgcacagagtggaaagatacctccctcctcctgccagactttgatgtctgtgttctcttcttctcacctctggtactttgcccagtactcaggaatgcttcagatgacaagacagacactgtctgcatgcacctgaggtgccttggagacttagcttataggcaaatagattgcactgtcgtaggttgtactgtgaagccactactggcaactcctactctgtatcggtgtgatttttttttttaagaaaacattttcaatgatctgtttaatttaaataagaaatatcattacatgcttacatatttaaacagtacaaaggattgtacagtaataaaaaattatttctcctactgacttccccataccctgatacagtatcatgccttccccataccacaaatggtagcaagatatgtgtattattttgcttgttatttcattaaacaaaatatgtgagactacctttcctactgatgcatatgcatcttgttcattctttttaatggccacatagtatttcgttacataggtatgcataattaataaaataattccccattaatggatatttacatttacaaaaatgtcaccaaccttttgttactatgagcaatgctgaataaaaccttataaacacttctttgcacagatgagcctgatgcagtggggagactacttggctttctagtgattcttagattcttcatgtgtgattggtttttgagatctaacataggacatcatatttatccttgctgtcttttaatgtttcaatacagcatgcctgcctagagagatgtttggaatctgtttcttgccctcctatcttcatgtcctttgccaaaaatatctttttctagttcataaatagtaacatcaagcaggataggaatggtgtcatagctctgtggcactccctgagtgacttctctttgttttcatcaactcattaacccttaagttatttgacagattatgaatctatttaactatctgattgtcttccaagatattgtgggattgggatgaattgacaacctcttcctctaccttacctctaccctcatctcttctatcagagagaaaactggaataaaaataataagaaaaataaaagtcccattggaattttctctatagggtagaaaagagagcaagagactttttttcctcattccaggctcttattttattttttcatgttcatattagttcttccaagggtttatatcgaatacttcaagcttgtcaaggaaaaataatggtttcccaatattatatctaattgtgttccctattactctaacccacgtgatttatataccttatacattttgacaacaatggcattccttttagtattcccactaggtaagaataccaccttgttctctcccctttatctttgttaggtaaaaatgaaagggttatttcgatttattgatacaagaggcaactgaacttggatctgtccttcaagatatccttgcacaatgaaaacaacaaatgttatttttctctgtaaacattatatagagatgtttcttcaagtcttttatttttgtttatttttttaatggacacattgtaaatgtacatatttatgggacccccatatctacaaaaaacacttagctggccatggtggcacatgcttgtagtcctagctactcaggaagctgaggcaggagaattgcttgagcacaggtgtttgaggctgcaatgagctatgatcatgccactgcactccagccaggaaacagcactccttctggataaacaaattcaaattcagaataagaccctgtcaaagaaaaaaaaaaaaaagaaagaaagaaaagaaaaagaaaaagaaaaaatcaagtcagtatttttttttttgagatggagtctagctctgttgcccagtctggagtgcagtggcacaacctctgcctcccaggttcaagtgattctcctgccttggcctcccgagtagctgggactacaggtgtgtgccaccactcccggctaatttttgtatttttagtagagatggggtttcactatattggccaggctggtctcaaactcttgacctcaagtgatccgcctaccttggcctcccaaagtgctgggattacaatcatgagccactgcaccaagcgtcaagtcagtattttgcgtgaccatcacctcatccatttctgatttctttctttgtggtgaggacattcaaaggccagagagcaagtcaacagtaagtgtggtgtttcttgtaatccagccagaatcagtggatagaagtgagctagaagttccttctcagcccagtaatagaatgtatactggttgtggtgaagacacattgcttcagaggtgacataggaaaggaaggctgctggccaggctatcctggacctggaatttggggtgcacattaacccttgtttacagacctaaagaagtagttctctattgggggcatttttcccctgggggacatttggcaatgtctggagacatttttttggctgccataactggggaaagggggattgctagtggtatctgttgcatagaggccatcgatgcatctctcaacgtgcaaggcagtccccctccccaagaaagaatcatctagccccaaatatcaatagtgcccaagttgagaaactcctggtctagaatttttatcctatactaaaacttataccgtggagcttagcggattggggagagacaaaaatatgcatctggtcaaactccaggtcacattcctaaagattctgattttattagtgtgaggtagagcctggatatggtattttcatgaagctccccaggtgacccacataaacaaggttgagaatgactccctggaaagtctggtctgatggaggccacagaatagactgacctcccccatttccttgcgactagggggttatttaagggttgttggttccctgaagaggtagcagcagtggagaaacccacaggagatggagcgaagtccccccaagtgctagagagggtaagatggacgttcaagtctggggcttttgtgagaattgggaaatggcactccttctggataaacaaattcagaacttctaggtgagtgcccccagggctcttagcctagctatcagaccagactactgtggcagagagaaagatgcccttctagtggatgtggcccctgccaagacgcaaagctccctgaacccaaaggcatttggattttggctcccacttgccccttcctctggatgcctttgtacagtgcccaaactgcacaacctaatgcagcaactccaactaaaatttgccttagctaagatctttctgagacagcaaaggggcaacgtattgccttactgatttaacaagaactaaacaaccaaaacaacaaacaaacaaacaaaactatgagaggcttactcaaatgcctcaaagaaaccagatccgtcctgcgggcagcctagaaaccctgtcctgatgccaggatccagcgatgccaagccacagggaagaggctccagtctggtcgtggtatctttggggtggttgagaacaacccaggaaatgaggaaatctggctgcaggaacctacagctggatccccatggctgtgggtgagacagagaactttctgtgccttgtgctctcccatcagctgatcctggaaggagaacctcaagccccatcctaaaccgcagcagagcaggcacgcacccggtccagtccttgatttattcctttgcaaaagagaaacaaactaacaaaaaatctgtagtatggactttgacgtcggcagaactacacacctaagttccagtccctgctctgccagtaacgggggtgaatctgggcaagtttctaagcgtcggtgtcttattggagaaagtggacatggtaatagcgaacttggggcatggtcgtgaggatcaaaacagagaacatggccatagtatccggccgcagtgggccactctgaatcccctcggttgccccttctgtttccgtgtgactcacgcagctttctgcacagatggtatccttctagacgtctgggatgttcgaggcggttgtattgaataccgtgtgtgtattccgggtgagggggcgcgcaaattggggcaaagaaagctacttcaggatatttcgctctgctggggcttgtctccagcgctctctggccagaaaaagcgctggcacaaaaggaggaggtgggtgggtcagagccccgaaccgcgcagtgttccagggggggcggagaaaggagggcaggccccaggcaggaaggagggagggaaagaggcgagaggaggagttttccagcccggccttcgcccgcccgctagcacgcagtcccttggtctcttcggtctcctgccgcccccgggaagcgcgctgcgctgccgaggcgagctaagcgcccgctcgccatggggagccccgcacatcggcccgcgctgctgctgctgctgccgcctctgctgctgctgctgctgctgcgcgtcccgcccagccgcagcttcccaggtaggatcggaggcgtggctgcctcctcagctgggcaccaaagaccccsggagtcgccgttgggacccttcgctcgggatagagggaggtgccgggggcgccctttgtttgcgcagaactcctctttcgcagcccgagggtggggatgatgcggatcggggctggtgtctgggcacgcgccgggaagaactgaccatcccatctccaggcgcggggcgccctcgcggcgacgggagccctagcaccttctgcgtccgggcttccagagttccaatcaaacccttttcggtgtaggaggctccacagagaaagtttggccgcagactagtttgctactttctcacccccagaattttgcctctcacatggttgcccactggaggctggcagcttgtcctggaaggagcctctatgccctcccactacacgtcccaggctacccccttggggccgcaggacacgagccacggtaaagcgacttttgtggaaggcacgggcggggcctcccctgaatctcttaaccccccctgctggggattccgagaaagtctgcgcctctgaggaagaattgccagctgagagtggtgacatgtggcatgcacttgattagccccagggaaagagggctactcgcgcaaggatctgctgggcagagggtgcggcttattcctggagggcgtggtctccggcatctaagggggccctggtgtttcttgggggctctcatggtgtgagcaaaattctctttggagatgcactttaaaaagctccagctaacttcctcaccctggagtcttaggttagcgaagagcttcaggggagtagggcaatgtgccatgcactcctgttgcctcggaatggagaggaaatccatggatgcgttttaatttagtgttaatgggaaagtgggtgacgtcggctatagggcgtgcaaatatttggctctgcgttcaacaccgtgggcagcttaaatctagggtatgagaaatgaacctactgagttctggtagaaggatagaggatgcccatctttctagcagtgtgcttgggagatgtagggatggctgcgggaaattctctgcacgcacctaaataaatgaatgaatakaacaaatttgtaaattaataaacaggaacatttgtgttttgagctgactcttaagttttaagctgctttgtaggaactgattcagggtaaagtggaaaggaaattttatccttactgccaggcaactgttattcccatggtgtgttaatacctcctctcccaccccctttagcaggaatcaggttaaaatgaacctgtaggggaagaggaagtcattaagcgtcccagaagcagctttctgggagcgggcaaataaggtgagaagctagaggtagcttttccgcactgagttgggaggtgcctgtgagctgcctgggaacctcaacttttagttgagcctttctcaagctggggaccccttctccttttccatccgacctccctccgttctcctcccctgccctcccctctcctttctctcatcttccacctttatatagtacagcttgctaccagggcccagccacagaatcatgagttcgccagtttgggcattcactaccacctgtcttttgggacctatccctggctttcctggctccctctgccagcctgcaagctgctcccaacttttagccaccatgttcctgcttgccaccacctccactgactcctaacctgccctccggctctgctcagaccacaratgagctgaagctgattggagctgcttgataaacactcctcttgagcctccttttggcatggctcaatggggtctcttgggaagtgtgctccgctgaggttgtgagatccagaggaggggatttcagtccaagccagaggctttggaaggctggggaggggaaaatctctaggcccttgggtctgaaagcaaatcacataggctgagttcactctaagtgctgggtgacaaattttaaagatcatttcagagacactctcttagcaagtggacatcatatcttcagtaagagagaaagtgaaggacttgaatctggaacttctgaaagaagatggagatctagggctccatcagcaagtcgattatgtaactatctgcacgtgaatagcacatctgtcagagtgagagtaaatcattctcattcccactcctagaaggtctctggagttcttccatcttagaatttaatgcagcttttctggctctctgatctattttttgcagcctagcaaagatgcagtgtctataaaaacctacatgaagtgtatggaaaatttgtagaaaagttgtttgtgtttgactgtgtttgtatgcttataacagatgagaatttagattctgttcttaaaataattcttagagctgtatttgcatgtgagatagtggtggttcactctgcctccttctgcaaacaaggctgaagatggagaatgagtaccatggcctctaagaaaggcttcgtgaatcttacatctggagaaaactggtaaagtagcgtggttttactagtcaggaaaaccaagtgaggtttgctaaaagccaaaccagactacatcagctgaagcagtcttttgaaataccacatttggagataagtactaggaatggagcacctagctcaggttatataattaaggtgtcaccgggaacaggctaggaattcctatttagatttaaaacatgtaatcagctgacaaaagtactctgcaatgaaaaggaaatatgctggggagagcaggtcattttcctctggcattttcttcattgataacactttcagtacagtacaatgttgtttgttagttactactcatttcgcagatttgggagctgaatgagacaccagaaaccattgttaaagcagcgtcttcacatcttcccacctcatcagtcctcgtaccataaccaaagtgctgcttttctcttttagattattgctataacattctcacttttggtctctctaattctagctcattttactttctcactttagataatggtcttttaagtccattgactttagtactgttttttatcacatcactcccytactcaaaaacttagggcagcaggtccctgttctcactcaagtaaaaagttctcagttgtttttagggggctacacagtttgcttctagcctaattttccagtcttttccccctggtttcctaaaatcctatccttatagaacctgagtcacattttccttcttggcagatgctgctttctgtacctggaatccttcccccttgccatttgtccaaattctgcccatcatccagcaacacccccactttgatgagaccttttcttgatcgctccaatgggaagcaacgtgccttccttttaacacccatggtctcactcatgtctcttatatttatcacatatatcacatatttgataatgctgtatattatcataatttatgcactcttcttcttgtagattttaagaccttggaggcaggggccgtgctatgtcttacccttatttgtatttcccacggtgcctagcagagcactttgtgccacatggatatttgtgcgtaatggattaacagtgcctgtaactccagtgatgggccattggacaggaaaggagctgagggaaacatgtgcacaggtacacagggctttgtgccaccatgaatctacatacatagaaacgatggcttactggatacagaggttccttttaaatatacgaacactctctgtttaagcaataaccttctctgttgggggctgtaagatgagagactgactgcaaccgcaagctggagtttgcatttattatttttgttggccaccttgatctgtgcctttcccaagtggttgaatggtttccttagtaaacgcaaatatgtgtgctacrtcaattcccctttcagagaacacaactgaaattagtaattgaaagtgaagagagaatttgaacagaagaaggtttagttttgccaggctataacatagtatgaaatttgtagcaggcaagttatgattaatgcccaggttagagattcgcttccaaaatagcagcgtgaataataacctctcccaacttccaattcatagggagtttctcaaaccagcccctcagttcttgactgtgtgatgtcttaactgctaacttttatgggccatttgttttaggagggtggtcttttaagcctgaatctctgggaaatttgggtttagttctgaaatagaatcagtttctaccttttctaataaawcctgggctctgcccagagacttatttttaaagtgaacactgaatgatgaagcatttatgtgcttgggagaccacgatgaagaaggtatgcaatttcttctctctygtagctttctgtcttgtggggaaatagagacatagttatttcaggtggtcaatgttataatacaattggattgacaggcccggggagcacagagaggagctatgtgggaacactggaattggttattgaagaatgatgctgagacttgctggtgcggagatggtggcactaaaggcccaagaaaagtgaaagtagaggatgtgtgggcttctctaagaatgttttgaaattggagacaaaaatctgtgtgagtgtcctttttctggggagacggctctatcccgattcaaaaccactagttactagagcaccttcatgaattctatgagaaaatatgcacttaatgggcagaaaaatcaacatacagagtaagatgaaattaccacagtaggtaaactttgattgaaccagtgagcaggtggcctttccagttacagccagctgtatagtttccagttattttcatttaaaaagcagtaccaagcaaaacagatgtaatcgtaaattgtaattgccttcaggcctgggctggtaacttgctgtacccccctgccccacttagtacacagtgtgacttgggggaggatctttagtcagtatttgtggattaatggattgaagtaattgtgaatcaaagtattccatttcaaatctcccctgtaggatttaaccagaatttccaagatgacactttcctgagaaaacggattgcaagatagctaaatgtcaaaggaaatttgtccatttggacaggcaacgaatcagggcatagttaattgcgaaggctcttggatgtcaaatcaccgtaagacattctaagagacttagaaactcaagggagttctgggggcaggatgtgcagataaagatttagaggaaaagcttgtgcaagagaaaagtccttggtagcactgctaagctcccaagttttccagatgataattggtagcacctggatcttacgggtgtctggcacattctgacctcagaaacctctggagtactcattcccgagctgaatgattcactcacccgtaatccttagctcacactggatgcttctttatgcattgttctccagggagaagataaatgggtttggacataatggcttggattatcccagaggtttggggttgtaaattgagcataatgattttcaaactttcttctgagtaatagatccaaacatagaatctggggacagactttctgccttggccttgaaatatcattgcaatatttcttctgtcccactcttacagtgacctgtagtgtagtcacatgtactagcagctcatttcccctgctatcactagctgtttgcaatgtacatccagtagtacttaatgagaatctcctcaatgctgattacaccccatgatctgctaatggatgacgctcgcctgccgcttattgtgtgggtggctgagctgaatgaccctgccaatcccagtgatccaagattgttcgcaaacacggttaaattagggccacagggtgagaattaagccaaggtttggcaggcccattgtggagtggtgaggaagyggtggagcggctacatcctccacctcctgagattctgcccacaaagtggcaattccttataggaactctgacagacatgttggtactgactcagtgttagtcagatcaaggctccaattcctttcaatccccaacactgaaattttgtttccacttagattttaattcagctttccaaggagtagggtcattgtgttgcaccattacctattcacggagctgatgcccccagccacgtgagtaggttgtgggatcttgttcatttttgtattctcatggtctagcagggagcctgacttctgggaggctctcagtggatctgtggagtgacatgtgctggggggcatgcctctggccagttctgagcctctgggtgggtgtcttggtctttatctagatttctgcaggagtttctctgttccacacccaggctcccttgcatgggttgcctaattcatggaaccacggaacctcagactgggaggatgcctgagatggtaacttgccctgcattttagggaggagcctctgaggcttagcaagttgaagggatttgtctggggtcacacagagagttaaatgcagagttgggagtagacctcagtctagtggctatagaattcctttcacttcataggcatgcattgaattcaatttttgagtgatccctacatgtcaggcatcctgtggggaaccagagataggcaggcaagaatgaatggcactgagcatttgatatggtttggatctgtgtccccacccaaatctcatgttgaaatgtaatcttcagtgctggaggtgggcctggctggaggtgattggatcatggggggcggatttctcatgaatggtttagcaccatcccctttggtgttatttttgcaatagtaagttaccataatacctggttgttttcaaagtgtgtagcacctccttcctctctctcgctcctgctctggccatgtaagacatgcctgcttctccttcgccttctgccttgattgcaagtttcctgaggcctcctcagaggtagaagctactatacttcctgtacaacctgcagaaccgtgatccagttaaacctcttttctttataaattacccagtctcaagtatttcttcatagcagtgcaaaaatggacgaatacagcattgttcactgagcccctgtccagggtgtatctcagggctattctttatattgacacttggctgtactctcagcatctcatatctagagctgtttggatgtttttcaagagttctgagaagttgctgcctcagtgtcagtccttgccctcttttgaggttgtcagagtcccaaatgcttcctctctataccatttgctttgagctccccaactgatttgtgattaaattcataacagttttattgagatacaattcatgtaccatacctcattcatttaaactgtacaattcaatggtcttagaatattcacagagttgtgcattcatcaccacaaccaattttagaatgttttcattgccccccaaataaactccaaaccttagccatcatttcttaatcccccatccctaggcaaccactaatctattttctgcctctatagatttgcctacaattgaccttccataaaaatggaattacacagtatttatcattttgtgtttggcttctttcacttagtatagtgctttcaaggttcaactgtggcaggatactagccagagtcagccaatggtgcctggccacctctcaatgctggctgcagggccaccactggtgcataaagcacctttgggtgaattagaaaaagaggcccccatctggccacatgtagatctgtggacacagggcttggtcaggagacagactttgggcaagaaaaggatagaggcaggcccaagactcaaggacttgaggccttgagtccaaggattcaagacttggagagtggaggacaggcttgatttgagaccccacttgctctttttgagggtgtgacggtgggtgctgtagtgcagggaactccctgaactatatctatgtagtcctggatgtcagtagcttaactccaagtggacaagctatggaccccatattcttttagagcttgtgactctgtaaaataacaaaacagaaagctgtgcttgcatgccagcagcatctgtggtgaactcttgggtcacctgggagcacgttaaaattgcagaagctcaggcccaaacccaagacctactgaatcagcatcttcattttaacaagatccttccaatgattcttctacatgatgaaatttaggaagtactggtctgatgaatgagttcagcccttggccaagacagagtggcttgcctgtttataactgmcacacaatggttcacttcccctcctctcccttttcctgttggctttgccttcatcactgaatcctctgaccttcctttcctaagtccccagcattcctgagataagcatgtacagcctgtaggttaggtttttcctcccttctctaactcaaaaacaaatgcaacctcccttggcttcatctccttttaagcctttctgccaggaatacagcccctgcctggcttagccttgagcagcagcaaagcacatcttcaggctgattggtaacaggggccttgcatggctttttcctgcagctaagatgtattaatacctgatgaataactttagctgtcaagaaaaccaggctagtgtgatcagggccgctcctgccactccggcaagactcctggggctgagaattcctggaactgatcagctcttaaagacacagggacttcttatcttcataccagaaatcaatgmcactggggttagcggggaggcagcaccttgggagatgastgagagtgagaccagtgggttagtcaggaaaacacacagcccctcacattaagcccctcaagctccatgaattggggatgtcaggaagactgaactgttaacagcacttaaagagggtctctcaccttttcagggagttgggtaagtagtagtttccaacccagcaatggtattttttttctctgttcttttcctcttttttttttgaccgagtcttgctctgtcacccaggctggaatgcagtgacatgatctcggctcactgcaacctccacctccaaggttcaagagattctcctgcctcagcctcccgagtagctgggattacaggcgcgtaccaccacacctatctaatttttgtgtttttagtatagatggggtttcaccatgttggccaggctggtctcaaactcctgacctcatgatctgccctcctcggcctcccaaagtgttgggattacaggcgtgagccaccgtgtctggccagcaatggtatttgtacaggctgagtaaggatcacctggggagtctgatgaaatatggtttccctggctccgcctctgtgtattttgatttggtagatctaggttagggaccagtaatctagggtgaaggtctgcaaacaaagtccaggcaggccaaagatggctcactgccagtttttatatgattagttgagctaagaatggttttaacattttaaactgattgaaaaaaaatcaaaagaataataatgttttgtgacaaatgaaaatgatataaaattcaaattttgatgttattggaacacagccatgttcattcctttgggtatttgtctatggctacttggtgatacgatggcagttgaatagttgtgacagagtccatatggcctgcaaagctgaaatattttcctttacagaaaatgtttgccgaacccctaatccaaggccttactcaaagtgtggtttgataaccagcctcacctgggagctttatagaaatgtagaatcttgaacaccatcacagatatgaaataagcacctaccttttaacaagattcctgggtgtttggggctacttcttccccaccacgaggctcagctcaggactcatcttggaggtccaggccagcatgctataactagccttgtatacggttaatttatctgacacataactgggtgtctcattctcaaggtttgaggcttggtagcctcctgatatcttagatgctctaaaaactaggttgctgttttattcttgccaattcttggctaggatccagtgtcctaatctgaggctggaggtggactggcttttgctacctgctgacatatttcttaatgcttcctggatttctagacagcagtctccagatgtgctgccctgccaggatcttggtatgtagtatggcccatagctctccaccgtctcctacttccttccatgaagcactgcttcccagagacattcagaaatggtatatgggaagcaggatgcactgtaatttagttgcaaaaggctgggttaaataggtttctttattgcaggactgctcagggtcattgatatgccagtataccttgttactctctgagagaggacaaggaggaatagtgaggaccacagaatctcaaagtggggtctgtagaccagcagcaacagcagcagcatctcctgggaacctagtagatatatacattctcagaccacaccccagagctactgaatcacaagctgggtatgtgggaagtgggcctagccatctgtattttagcagaycctccaaatgattcttatgtacactcaagtgtgagaaccactggtgtggacgtttccaaatggttttctccgaacatctcactagcctagtgtttcacatttgttgatttcagtgaacactgtgtttttggtttcaggacaggacatttgggaacatgacattgaatttttcctgaagcatttactggtggcagtgaccactgcaggcttggggaggtggaagtggggaagaaaaaaaaccccaacctttgggtagcatcatctgtcccacatctgtctctctagcaattgtgtcttggttaaaggaagtttttttgagacgaaagccaccaacttttgggtgttgccaacatgtgttctttaaaatgtgtttttgtgtattcaaatgtaaagaaagctggggaacagcccttggggtgtttctctctcctcttcacgttacttcctttcagaatactttcttctgtaaaatttcctcatccaaattccaaactcatcttttcaggccagccaagtccaaatggctttcatttgagtgagtgacccttttctccatgggaagcctcaggacacattcagataggagggaagctatggctctcagcatgaggaggctgtgtcttccttctcaaagctcagctcactccctcccattccagaccttcttcctttgccttccatggctagtggtgtcacagccatgggtctgtgtgtgaacactttttagtgtttactctgtgaggatatgtaactgctgtgttgtcacttagtttgaaattctcagtgatagtgaggcttgagggtgagttgggaggaagcactaagttattctacttcctccatgggctggccgctgaggagaggaatgagggttgagaaagccatgcagaccttgattttcagtgaaaatagatgagacaactgacaacttccatttctatgtttttggtgggcagaaaatagatattatcgtttacttttcttggcttggtggtctgaatgctacacatatctataaaatggcccatctgatattgcagatgagctgaaagtatcctctgatgaatgtactttaacaaggctttcaaaaattgtaggctgaccactttttttccaaaattttttgcaaaaaaaaaatatatatatatataggctgagcacagtggctcacacctgtaatcccagcactttgagaggcctaggcgagagaatctcttgagcccaggagtttgagaccagcctgggcaacatcttgggaccctatctctaaaaaaaaaaaaaaaaaaaaagaaattagtcaggtgtgctggcactcacctgtagtcccggctactcaggggctgaggtgggaggatcgcttgaacccaggtggtcaaggctgcagtgagccatgatcatgcactgcactgcagactgggtgatagagtgagtccctttctttaaaataaaattataaaagtaaaacatgctcattatgaaaatattcaaatagaggcataaaaagttgaaagcaggcccacccttcattttcctcttgattccattctctttttctgaaattgccactcagtagtttgatataaacttctggacacttttctgtgcttacgattcttaaacaaaaaaggtaaaaaaggaatgtattgctacatgtaacaacagggatgaatctcatacataatgttcagtgaaataaaccagacacaaaagartacatatggcaattccatttctacaaagttcaacaacaatgtgcaaaactagtccatggtgttacaagtcagaatagcagttgtctttatggggtagccactgggaggggccacaagggggtcttcaagggtgccagcagtattctgtatcttgatctgggttgggaggtctcatgggtatgcacatacatagaatgtattgagctgtatacacttaagatttgtgcactttactatatatgtttacctcaattataaagaaaaaaatacccacaaatgtatgtgtgggcggggcataaatggatttaagatgtctttgttaaatttccatgccattgcctatgggaactttggaaatatatggtagtgatttgggttgtcataatgatagagaaggccaggcctacacaataaagaattggctcccttagaatgcccatagcgcccacattgaaaaacactgttttaaaagtttgcagrctgttctattgggcaggtgttcagaacatggggtaggcctttgaaatagtcttgcctggatctttactctgtctttgtttaaatggagttgaagcctcaagagctgatgtggatggatgggttcttgatttgtttttgccttctgaaccaaattgtaaaggagtggaatcatctcctttgccagggaacagaggcaatttgataaccctcaaatgtgaacttgatgcaagagagagctcttctccagctcagtgtatccctcccatgctcatagctctctgaggccatgtggcctccgccagtgtcttggtctggagtcttctgctgaaagtcttactgcatcctcctttcctttcttagattttctctgtgtcccatttgacctctatagaggagagttaagcatttgaaggaccacatgccacatcacaaattgcttttgttccactgtctggttttactttaaaggctagccctctttttgtctgtctgtgttgactggggacagtcaggctacagagctttgtgaatgccccttggtgagaacaggacttggcatttattgaggtcccctgctttgggctgacctcctcagatttaggtgtttgtcttttttctgtttctcctctctcccatctctgggcaatgggcagggacacactttggcccttcgtagtattaaacaatagaaggagactaaattggaaaaatattattttccccttggaccagagtaatgccttcatttataaagcttttcttttaagtttatttttgttggctctgtaaagtaggaccacaattgatatttcacaagccacatgctgttttaattgtctttgctaatgaaagacagagggcctggggattatgggtgccatggactctgcctagggtcttccttttggggtctgcatagaagagtttgaataagaggatggaatattgtctaatattgcctctgatgaaacagctgtggaagcaaggctgtctctgagagctcatgtctggcagggatcattctctcaccagccagccattctactgccatttatttctggatgaaataaagttaaaatgaacatttaagtgtagcctcaatggggaaagaagttatgtaacggtagtatttggatgccagagagggaggaagagtccccagcaggatggagccccaattgcccacaacagtgactcacagcagttgcccagtgagcagtacccttattgtctttcttctcttcgctgtctctctgctctagtccatcgctatgcttcctgggattgcttcccaaatgaactacttgtactttgtcttagagtgtgcttttgggggaactcagacaatggctaagctggaacttaacccaggattttggtttctggtccagagttctttgtactgctgaattgactcctgctgaatagaactctctaggtcactgaatgaactgtaaagaaggcttctgtgatggacacttggaggttgtttcacttatcttttgatgcataagaaaccactccaaaacttagtggtttaaataagtgacaactatgtatttactcatgatcccgcagtttgggcaggactttgggggacggctcatctctggttcacatggtgttgtctggggtgactcatctgggtctagaggatccgggatggttccactcatgtgtctgtgtctgacacttcatctgggatgactgaaatcgctgggatggctggtccctctctctgcctctctgcagtctgcatagtttagctcttttccatctccccgtgttgccttactctccagcaggaagctggcattacatgcagctggcctcccagtggacaaaagccaaagctaccaggacacttaaggcatagatccagaattgtcacagcatcacttctgttacattctattagtcaaagaaaatcacaaggcaggcccatatttgggatggtggtggtagtggatggagtctacctcttatatgcaygtgcagggtgggaggaattgtcggtggccactgtgcaggcaatccactacagagctggtttgggacggcatattggagatgggagtttaattttccaggatgtttgctgggtgccttctgattagatgctggacctcaggttgctagccaagtgtattaggcygtttagctacagaatgtggcatatgcagattcattgaaagttcatagaagtgagtaaatcagcatccctgggaatatcaaaggctcattttccaatggttattgatactatcaaagrcaaagactttattaaacaaaaatgaactcaaaatagatcatagacctaaatataaagcctataaatatgaaacttcttgatgacaacatgggagaaaatctttgtgaacttgagttaggcagagatttcttgaatatgacaccaaaagcatggtctataaaaggtataattgataaattttactttattcaaattaaaaacttctcttccaaagaccccactaagagagtaaaaagaaatatataaagaactctctaaactcaataacaagaaaaaaagccacctaatttttaaagcagacaaaatatttgaacagatacttaaaccaaagatgttcaatattattatccacctgctaactggattaaactcaggcaacttctgctttcgtctgccaactgtgaacaaagccacctgctcttttagggaagtgatttgtaatatacagtgcaaatgtaaggtatggttatacctcccacaaaacaacttgcacacatttctgctccttgtagagggctgactagccattttctctgtctctctcactggactttatgtgacagacacccgcaaattgctagccatggccgttaagtaaccactggccactggcaatttgaggcagatcatttactgtaagctcaagtggacgtgggtgtctcctaccatgcttttccaaaccaggctggtttttaggcctccctaaaaaaatctcccactgcctacttgttctgccctcaagtgtcctgatgtcctttcatttcaaggaacttgcatcatttgagcctgtaacagagggcttttagtcttctttggtactattgatatgtaagaaatgtactttgactttgatgtttttctttgaattcatttgtaagcaatggtaaagtttgaaatgtattacttcatattatcatatattattcttctcaagacctaatgttaaattcaatgctgagtgcttaataaggatactgattacatgagaagtaacagaacagttttcatctagtttctaaatttaggggaaaaaaaagcttggatgaacgccaaataatttcccacttttgtgaatcccaaaggcccctcttcatgcattgaacattcctgaaatttctggaataaaaaaaattgtgagaagaacacacagggtttttaaaaacgactttttacttgaggtgtacttgccatgtaataaactgtactgaattgctttcataccattttcaaaaattaattggaaatttttgtacagatctgtttctgggttctttattctgatccattggtttatgtgcttatttcttcactaataccaatactgtcttgattactgtagttttgtaatatgtcttaaaattgggtagtgtgattcctctaactttattcttctttccaaaattgttttggctataaatttcatataaattttaggatcagtttgtttatatctgcaaaaccttgctagtattctgatggcaattatgtcacacstactgatcagtttgggggagaattgatatccttaatatttgaatytttcaatccatgaatatggtacatctctccatttatttagatattagttgatttctttcacaaacattttttagttttcagtatacagatcccatacatgttttgttagatttataagtatttcattttatggggctactggaaatgtttttattttcttaactttcctctctaatagtttattgcaagtatatagaaatacaattgatttttgtggtttgactttgtatcttgtgatattgctaacctcaagtgttattttgtcgattctttgagattttctacatagacaatcatgtcatctgtgaatagggacaggtttttcctttcttccttcctgccttccttcctttctttctttcttctctccttttgttgcgcaggctggaatgcagtggcacaatctcggcacactgcaacctccacctcccaggttcaagtgattctcccacctcagcctcctgagtagctggaactacaggtgtgcaccaccatgcctggctaatttctgtatttttagtagagatgtggtttcaccacattggccaggctggtcttgaactcctcacctcaggtgatccactcgcctcagcctcccaaagtgctgggattacaggcgtgagctaccgggcctggccagagacaggtttatttcttcctttccaatctttgtatcttttctttctttcttgtcttattgcactggctaggattacctgtatagtgctgaatagggtagtgaaattgagtgttgtgttgttcccagtcttagggggaaagcacctcagtctttcatcgtaaagtataatgttaattgtgggctttctgtagatccccttcatcaggttgaagacattctcttctcttcctagattgctgtaatttttttttttaaatcacgaatggatgttaaatttcgttaaattccttttctgtattaattgatatgatcatctggattttcttctttagtttgttaatgtcatgggttgcattgattaattgatttttgaatattaagctaggcttccattgtcaggatacgtaccatttggtgttaccatattattctttttatgtagtgttgtgttttatttggtaatactttgttggggatttttgcatctgtgttcatgactgatattgtcctgtagttttattttgatgtgaagtccttatctggttttggcatcagagtaatgctagccttgtaaaatgagttgggacatgtgttctccacttcaattttgtggaagacattctgtagaattcttttaaaaatatttgatagaattcaccagtgaaatcactgtgcctggagatttatttttaggaagattatctattcatcttgagtgagttttgatagttcgtgctttttgaagaattggttcatttcatctaagctgtcaaagttatgtgtagagttatacacagtatctgctgtgataccctctgtttcattcctaatattggtaatttgtttcttttctttgtttttctttgtcagtcttgcttgagttttgtcaatgatatgaatattttcaaaaaacagcttttggtttgattgtttccattgtgttgtttcattaatttctacttttgcctttattatttttattatgtcctgctgcatgctttgggtttgttttgttctgtagtttcttaaagtggaagcttaaggtattgttttgaggccttttcctttttctaatataaacatctgatgctgtaaattcccctctgagaactgttttatcccactcactgtactctctctcctctcctttttgaactctattgactgaaatgttaaacatatggatattgtcccacagctccctgaaaaaaccaagattaaaaagaagattgaaaaaaaaagtttattgagcaaggggaagaccaagaaagacaaaaagtcacaaggagtcttcctaccctcttaagaccacatcttctctacagagaaaaaaatctccattcccagagttttaggtatctagagtttgctatacaattgctgtagtcgccactgctgtcactcctgcccactgtcaccacagggttatatgggggctgggtcatgaaataatggagaaaatgaacataaaagaaaaccagggaattttcttcattctctctgaagcattacagttcttcttttccactcttagagtcagagatagagggcttctcctggaactctctctgtacccagtgtctacttctgtgtttgggctgattttagtctagtcctgggataccagagcaacaccaattcagtgttaccccaaattcttttttttttttttttttgagacggagtctcgctctgtcacccaggctggagtgcagtggcgtgatctcagctcactgcaagctccgcctcctgggttcacaccattctcctgcctcagcctcccgagtagctgggactataggcacccaccaccgcacctcgctaattttttgtatttttagtagagacggggtttcaccgtggtctcgatctcctgacctcgtgatctgcccacctcggcctcccaaagtgttgggattacaggcgtgagccaccatgcccggccccaaattcttagtctgcctgctaatgtttactttttcagaatcaccaaagagctgttcagatgcactttgttcaggtttttcagctgcattcagtaggaaagacagggtgaagtacgattactgcatcttacccagaattggaatattgtgacctttttttttttaacattacattatccttttcatggtagtcaggtggttttcttcctcccttccttctttctttctccctttgtttcttcttttctttattttctactttttcttcactatgatgcctagtatattgttagacctggataaataacttttgactgttgcagatggtgaaaagtcttttgtgtgaggttttatagttattacaatttagagaaaggattggattgtttatcattggaaaacactttgttttctaaagatatatctactaggatgagagaagaaaaaatcacgatctaaaaagtggggagtaatagtcttatagagtcactgtgaaagttcagaggaatgatatatttgtaccaggaacaaatatgttacatttgttcctttaagtaaattcagtcccatccaaaaacgtatttattgacattagctcatttttgaaagcctttttaaaatgagctaatatcaataaatatgttaataatgaaaggaacctaacaatgcagaatgattaggcatcaaatgctgtatgtttactgtggtttgaatgtttgtcccctccaaaagtcatgttgagatttaattgctgtagtaacagtattaacaggggacctttaagaggtgattgggccattagggctctgccttcatgaatagattaatgccattatagcaggagtgggttgttagttatctcaagaatgggttcctgataaaagggaggagtttgcctcctctttccctttctgtctcatgtactcccttctgcccttctttcatgagatgatgccgcattaaggcctcaccagataccagtgccctgttctggggctcctcagcctccagaactgtgagctgaatagacttctcctccttattaattacctggtctgtggtattttaacaacagacaatggactaagacagtgtccttcttctgctttattagatagcttatttcaaaagtgaacaagcaatcctgcttgtagtctgagaaatggaaattgtggagttgagggagattcagtaaaagatgatctttcagatgaggctattgttaaacttttcattaaattgcttttattttggccctagtattggtatcatcaaacattaaacagtcttaaaaagtgaaatgatacccagtcatctataaaagagtgaattgtgagaaattatatggcttatttcccagtagagacaagtgatttcacattctgcagcagacccatgagccacacaagtcacatgaaaggtggccatagatcaggtgtttggctcagctttctattctatccaagctatttctaatcacagatgaaccagccacacattcttattttgagcagacatctgaaattgacttcagcttaattgcaataacactgaggattggaaaacatttgtgttaacatctacattctgttcaaaacatcaacaaaagccaaatcccccaaattaataggctcttttgaagacttctcttttgaataaacagtgttgacatgtaattcatcattaactcataaaaacacttcagtaatataaatcaggattgaagtctaaaagccattctgctttcaattagagcatccaaatctggtatacgagaccttttctcctttttttttttttccagccactctgttattttgtcaatctaatctcatctgtatcctgctcacgctctaggaatcaagtctttccctcagatgcaatgcctgcattctaattttaaaagtagttaatagaatataccaattccatgtttaaacaggaagaaactaaggctcctgagaggtgatggggctagccaaagtcacatggctagctagtagcagagctagatgaggattcttagcacctcactccattattttaccctagtcttctagaaagaccctgtgctgttcccagagtctcacctctgaaatatcacactttttttattttttttaattattattattatttttttgagatggagtctcgctctgtcgcccaggctggagtgcagtggcgcgatctcggctcactgcaagctccgcctcccgggttcacgccattctcctgcctcagcctcccgagtagctggaactacaggcgcccgccaccacgcctggctaattttttgtatttttagtagagacggggtttcaccgtgttagccaggatggtctcgatctcctgacctcgtgatccacccgcctcggcctcccaaagtgctgggattacaggcgtgagctactgcgcccagcccacactaaagttttaaattcagtcacaaatgtttttcaataccttataaatatatgaaccaaaaccaacttgtgatgacattaggttggtgcaaaagtaattgcggtttttgccaatggcaatgaaaaagaacctcaattattttgcaccagcctgtagacgtcaggatagtggcaggtttctgaccatgttctgtttcttgatctgagttctcttacatgggtgtgttcagtttataacagttcattgaattgtgcactttttaaaaaataaaatatttattacgagtggcttatggtattatccctgattgttgctcgggccccagaacttaatatgttagtaatgtcctttattatgcaacgagtcacctttctcatccagcttaaaaaataattttcctcttaacatttttttattttgctctccagtatacttttgcttcccagcgcctgcctaatgtttgtaccatcagtgttgtagaatcctacttcaaaagaagcatttgctacagcccagaatcatagcggtaatcatgcagtgatcttagcccccaccccagggtgcttgcttgtttgatagtcactgtgagtgttcctaataagccagggcatatctggattcatcatttatcattttctgtgctccaaggctccaacaatatgtgtgataaatagcctgtagcttattttctaaatgacagcagtgaaacctcctgtttttctttctttgaattgaatctgagacacatgaaattggtattctctgaggcttctctcttctccctccccacatttcttttacagcaggggaaaaggcagaaacctaagtttgtgattggtagtggattgaaagccgtagatccttttctcctctccagagctaaggaaatgatcttttgtgagcattcatcactctgcctttttattatttctctctcttacctttagagtcttatttcgtcctgtcctccacctttctgtacaccactccctccccaaaggttgctttttcatagcgtaaaagttgatcctgagtatgtgtgcaagacattatttggtactacaatttcacagaatcatataatcttaaccttggaaagggctgtagagccccaccctacttccctcatctcacccctcttgccagcatccttcggcctcatgggaacacttccagcttcagtaagctttgatggaatctcaagatggtcttggagtcttagaataccctgcctcacactgggctaaaatcagctctacatgacatctagccattgtccttatttctcacttttggtactgcacaaagtaagtttctctctatttttatccatgggatgaccattgagaaatcagaacacagggattctatttccttttagtcccattttcttcaggctacaaatctaaagtttattcaccattcaacaaactttttatttatttgtttacttatttatttgctatgaaagctagtctctgttggtcattttttgttttttctttctagcatcttctggcatgtctgtgtccttctcaaagtgtggccccaagtgataaatatttgaggtgrtagatatgtaaattaccccaatttaatcattatgcattgtatgcatatatcaaaatatcactctgtattccataaatatgtacaattataacatgtccaaaaaaaagaaaggaaaaaaaaagaattggcccaaatggtctgttattccagtgtggttgcttcagtctaggataagccagacttctttggtttagcctctgtcctcttgcaggccactgttgctctctcttttttaagaaactatttcacctgctggctcacaatgtgggcaactagctggctgctctttcccaagcctgccagggaagctctcccccttgctgggtgtacagcttagtgtagggagagaaatacaagacttcatgtttataatctctatttaatttctccttgtaggtttcaaactagctatggcctatggtttcatcatctgttggttttgcccatctgtagccaacattgttgatgccctgtgccatctcccctccgcccatctctggattcatctgcagctgaggtagacagttctcaaacatgctgacagtttctcaccttagatgtccacatgtcttagaggctttgcctttagatttactccagtcctgtgggagctcgctcagcaagaatttctggaagagtaggagatgtaacaccccgccagctcttagccaaaaaaaaggcaggagtctgtgggtaaatacccaacctttcgtgtccctgggttgtgtttcctcagaggctcctcagtgggaatgaatccaggttgcccccagaagtaacctgctcattagcatatctttatgggcttttcccctattcctttctcatttcccctgctttctcactgtgcttcctgggatcaccttccaaatgaacaacagcacccaagtccttgtttcagactctgctttgggagaaagaaaactaagagcttgtcctccccagcttggttatcttctacagatttgttcttcttaattcttccttcactggtagaatgacacagagccctatagcatatctcctgagaggaggttacctgttaatgggttgtgaaattcttgtagtggtcatgattagcactttttaaacactcaaatgtaatagaatagcaaatatgagagggcatcatacttaaatattgttccatgaaacttatttttcgatcatataaatgtatgtgtgtactgagtcacaagatgaaacattttctgtggattgtattcaaaaaagtgaaaagtaattgctttctgtgaatacaattcataaatcagtatttctctgaatggacctttatgtaaactagatttactagaggaggcattctcttgggtaaaccaaagaaatgaggttactttggcctgatttgctatttttgaaccaacgctgattccaaattgtcactattctaaaaatttcttcctattttttttgttaataatctgttctaaaataacgcttaggataaaattgaaacttttcatgtctatggtttccatactccatatttttactgatttgaaaattgtctatccacagcctttgacacttctttggtttcccttaatttttcagtgattatgaagaataatttcacgtccatcctttatattctttaaggccctgggatgtagtttccttggatctggaaatttgagctcaggtaaaattgccagctgggatctcgttactcttgagcccttcttcctaatctgtggcttttccccatatataatattaaagcaagaaagatatttaggtggactttaaggaagaaatttcaactttcctacaagtaaaatgttgagaacagcttgggagtaggctgggaaggctgtctccaaacttttgagttttcattgggactctctcagtacttgaggctggcgtrtgcatcagattgtcttccaagagtatttccagatctaagactctctaattttattggcaaagcatatcttttagttggaggcccaaatggtaatttttaagaacttcttggataaacatgttcttatcattgcaaacaaatgagaaacaaacctaacaagctctttgcatcaaagatattttaattgctctgcttgaaaaattttaaattaaacaatgagtagaaaaaaagaatatttacataatatgggtatggtaaaaaaaaaaaaaaaaaaaccacaaacacctctacttaccagccagtttaataagaacttaccaaaaaaagagcaaaaactttaccctgtagtccttgctattctttcctttggattcttttcctttcgctatctcctcagaggtaaccaatgtcctaaattttgtatttatcattcctattattttctttatagaatatgtttatatctctaaaaatacattatttacagccgggtaaagtggctcatgcctgtaaccccagcactttgggaggccgaggcaggcagatcacctgaagtcaggagttcaagaacagcctggtcaacatggtgaaactccatctctactaaaaatacaaaaattagctgggcrtggtggcacgtgcctgtaatcctagctacttgggaggctgaggcaggagaattgcttgaaccgaggaagtggatgttgcagtgagccaagatcgcgccactgcactccagcctgggtgacagagcaagactgtatctcaaaaaaaaaaaaaaaaaaaaaaaaaaaccaaaaacaaacaaacaaaaaacattatttacatttgcatgcttttgacttgtgtataaatggacacatgctgaatatagtcttctataacttgcttgcttttcttcacttaacattagattcttaagagttgctcatgttgttacatgcagttgtgattttttcattcacgttatcttgtaagatcccattgtgtaaatatgccatcatttatccatgctactcttgatgtgcattttgggttgttgctagttttatgttcttgtaaacagtgctattgggaagattcttgtctatctcccttgaacaatgtgcaggaatttctctagactaagtacctaggagttgaattgctggataatatgcatacatatctttgactttgttcaataatgccaaattatttactaaggaagttataccartctaaacttctagcaccaatgtgtatttccattgctcaacatccttgttaacacttgatcttgttatatttttagagttcttccaaactaatgggtcagaaatggtatgactgtggttttaattattgttagtggtattttagtaataatataatagtaataataatatggttattaattctcaggggaaggattttccttctttcactcactgctggggtacaagatgagaacttttctttgtagtccctatacatgggatggatttatttcactctttacactgagagtataggctgttggtatatcagctttatgtaggaggtgagggtgaggggatgtaggcagtctcctctaaaactgatgaccttgaatagtctctggagtttgtcttctgtatccaaggtctcaccagtccatggaaattaaagctcagttttggcagttatcctcagaataaaaggtgagccttaatatctggtacctaatcaggatcctgctttcacagtatttcttactttcttgcaagctaaaagtggatttttttcattgattttcatgtaagcacagccaggctacatggctcaccatactgcctgaaataggatcctaattgcttgactttgaaattgattccattttcaacctttagttactttcaaatgtatttcatgatattgtgccagagcaatctgtaatttgatgtttgaaggacatatgtacctcctcaaattatcctcttcagatttacaaactagaaaattctcagtggagatggctgacctaccacttgttcaagattttacaatgagacaaaaagttgccatttgcaagcatttgaggaaaatttttgggtgttcatcaagggaggagagaaaaagactgcctagggtgtttcccatttgctgcctgctttaatttttcatttataattccttgctcagaatttcattgaagaggggaatttctaggaagcattggcattcatgctctaaaaatgccctgtcttaacttccctaatgcagccttaacaatgatgaagatcccatacccagtttgattgtgctgtgtaaaatttgaatgtgacttgactactacacatagaagaacattaaaagacccatactaacaaaacaattactgacaggttttgttagggctgcaaaatagtgtgtttgcatttccccccctccccacctttcttttttggataggtttcatgtgaattcatgtgagtaccttgattgaattaaataattcatgtaaatcacccaaggcagtgcctgaggtagtgtctgttaactaaatagtaggtatttcttctctcttacaagctaggactgtaaggactgtgttaggactcactggtgtctaccttggccagtaagaccagataagatggtgctgtacaaagctgctcctgcatggtaaaaggctggagaaatagttgctacttcatttaatttaccttttatttccttcttaccctggactttcatctgcacaccaggatgctggaaaattgctcagaaagactcaatttttggcaaagttccctttagggcacatactgcctttttcactggcccatggtttctgagaactgccctcatcgctgcaaatgaggacttcaccagcccctccagtcccttccctgcagacagcctgccttggtcctaggggaaggacaaagggagcctgtcactgcaggcccttctccagcaagggactgggaaggggccaacatgcctgcaggctcctgtattgacaagttgcagcatccttaagagcagccaagaaataaaatggtaatttgtgtttgcatctggaatttctgagcttcaaaatcttggatcacagcactctcaataacagaaaacaggacacacatataaatatccatatccatattagcctctttgttaaactctgtctgggtcagcagctcgagactgaaaagtagcaggatgattgtacaggaagtagaatgaacctgaatgctgtgtttcagggcaggggacagcgggcatgagagggacgagaatggcctccccatttagtggaccctgagccatccccccagggacatctagagtttgactatattatggcttaaaacagctcttatggactctctaggggacctgatcaccactgataatgtggtttccaaggaaaagccaatttcaaattataagcaactgatttataaatgcactttggggatgctgccatctgtaggtgagaggccacatgactcccctgtcatcagtgccctgatactttggcagggttacaagccacgctgtgcctctttgtggggctctctttagctgggcagtgggctaaatgtggtattcgttggatagcaccagaagcctatccatgcaacatattatctccacttgcctgttctgctgcctgaggtttccccatgaggatcaggaagtttccacaatgagaagaaagccatttggggaaccctgtaaaaaactagtgtgttaaggcattatgtaaatatgagagtggataaatgacttagctgatatgtacagcaaagactattctgattatcaacttgggagttctagataaggtgtgtaatacaattgttttcaaactcttttgattgctacctgcagtaagaaatatgttttatatcacaatccaaaacacacacataccatgcacacagtatgccatcaactccaaaactctgtcagtcgtcagtcaccattattttaggtatcactaaaaaagaaaaatgataccaattaaactatgccattccattgattatagagctcatcttgggttcagggaaattaaaatgttaaaaagtgttgttttagagtcaataaaatatggtatatgtgtgtgtgtgtgtgtgtgtgtctgtgtataattgaaacaaaagtgtcatgaaacaatgctcacttttactatgtatggtatattataagtatctgctattttcccctattctaatctaatgtattttattgcaaataaagctggtcccactaaatttatggaatggctcactaatgttttaatttaattttaaagtgttaagtctgagctatagtattgttttgaaatagggaattggaaatgatacactgagattgatttcttatctcaaaccagatgtcatgctgtatgttttagtcatctatttcattcaaatgtaaattgatggtctactgtttaagttaggactcttgatggcacatgacagaaaccagtttcgaaaaagctttgaagaaaggatgggcttatcatcttatgttagggcagaggtatgcttgtggggccaagcaatactggaaccaagggctcaaatattgtgggatctctctttctctctttctctgttttgtttttgcttttctttgatggcttcattctctcgaattagcattctgtatgagatttaatctttgtcgttggcagcttcagggctcacatcttcctcattttaccaccagagaaaaatccttccaagattctcattggttcatgtaattggttcatatgattgctcctgtagtcaagggataggataaactcacctctactagaaccacataggtatgaggaataatgcagttttccaaaagaaaggctcttctttctttgagaggaacacaatagatgtctatcacacctaggaagtgctagcaccaggcattgtgtgctggggtgtagcctcacacaacaggtattgccaaaagcctgcagatgatcattttgaaaactagaattgccgtcagcttagttgcaccttcactttcccactagagcttgagtctcccagtgaagataataataactgacaacagctactgtgtgactatcagttcaagggcaccgaatggagaaatcggtgctttcaagagagaagctacccagaaaagaaatgattctacctcccaacacaggcagagctggataaaatagccatctgtaaaaaacttcaagtaaagtccaggtttttgttcttgggtgctcgtgttctattccctgttggggaaccggagaatgttttataaggaagaagccttaggtttcagctgagcagactgcagcctgtcactttcaggcattctcatgatgttcatttcagtgtttcagtgctgttttctggaaatatctttcttcacactctcttctctctgtctctctctgccatttaatgtactatattaaaatatcaatctacagctggcaattaaaagtttgctgcctacaattctcagtacacactgtggcgattttattttattttcttagactctgtcttctctgaattcagttattctcagttttgccaagatgtgccagaattttgtaagttatactgctgggttactgccaagaacgacgtaccagtcgcagctttatttgggcagctttttgtgccttaaatacagtatctgtttctgtaagtacagccttcactgagggagatggatgtctcattctgatattgatggaacagcttgagcatatcagtaatgtgtaggctaaagtctcaaggggaagaaaacttttgagagcctttgttagtttcacaggggcagtaaggggaaacaaaccctgaccgtattccctgaagagtttgatgtctagctgggaagaaaaaactcgaaatggcttctgaaaatccaacgcaacataaaatcagtgctgatttaaaaatgtgaacagagtgcatcaatgtgaatggaatggttaggaaagataaactgggggagctaggctttgaaatagctttaaacacaagaaaggaactgagaggagggaaagggctttcaggtaggtttctgagtcatgaagacagaaacaaggagtgaaattgcatgagatttagaatcagaaaagttcaatccttgttctcctataactgataatcacttcattctctgagctgagaatacaatcataaacaaagtgtcaaagagttgttgccctccccaggtttacattctagtcactgaatgatacctgcctcataaggttgcactgaggacttaaagaggcaatggaaatgaaagaccaggcagatttttaaaatgatgtgccatggtaatttgtttattgccaggtgtagaaggaggagggcaatttgatttgcttgactgctgttgtcccagctagaggttgaggatgggagtgttctagggtaacataatttgaaaacaggtactatgcccttctaaacacttctggtgtcccattttacagatgagcaaactgaggctcaggaaagaaaagtggcttcccaaatcaggatggcactggaacttaatcccaggkctttttcagttgcatcctaccagagaggatggccatgagcagttgaggaaactcagtgtctgcttgctgtttcatgggatataacatctatgccctgaacaaatcagataaaagtagacttctaccaccgatcccccaaaggctttctcagattttcagattccttcattctgagggaggaaaccgaattaacttaacaaatgtaggttttcaaagtatttaaatcactgtttttctaatacttttgacaagacccacaggaagaaatatattctactgtgacctattgttagagtgaatatattatttattgtacaaatcaggaaggttttgagtgtgaaagagaatgctattaataataatgttagatggtaaccatgtgaggtgatggatatgttaattagcttgattatggtgattatatcacaatggatacgtatttcaaaacatcatgttgtaaaccttaaatatatataattttgcccattataccccagtaaagctgaaaaagtaatgctgggacaacaggcataaaatgggactgtgctatgcaaactggggataccctaccacacatacacctatataaaaacaaaaattgtacaaagtaaggtttattctttatatgtgcagtgcaccctgacattttcaattctatttcactacaaaaatactagtcatgacctactaaatggggtcaacagtttgaaacatactattcttagttgatggttggtatcgctgaggcacttatgatggtagtaaagacagggatttggtaagctgaatgtctgatatgtcctataaacttgtttcatctgaacattctgttgaatcttctgccacaagaaaagcactggtaataaacattttcttcagttcattccccatgattagcaaaaggtttagactaatctttctggatccctttgttccatttggaacaagaatcttcctctgtgtatttcccctcttttcttactcttgcgcttttatctattagtctgccacttatttagggatgtaaggaatccaaggaagaatgtctcatttacagatcctggttctctgtgtacttgttctgagccttcatcttggggttgaagctggtgctctgaaaagctaaagtttctttttcgctctactccttcaaacatatacacctttacacacaactcctggacatctctcctctgttgaaactttgccaagatataacagaatagatcttgcctgctagtcaggcatacggaactgacttctgggcttcttcaaaagcccccataaattaggactttccagaagagaagcttctgcagatttagctatggaggagagaagggttaccactgtacctgtgtccacacaagctatggacaggccctttgttagcccatttctgtcactagaaatgtttgtacactcacctgtgttaacaagagcttcaagaatacaagagacccggcaatagcacctttcagcaataaaataacttttggtgagtccccattttgtaaatgtttttaagtcataaaggcatatagggaaccacagggtttttcctacctcaaagtgtaaactatggtaatgtcttgagcctaaaaatcactttttcctaaagcaaattttattatctggatcatctgaactcatagagtaaacttgacaacagtttacttttctgaaaaagattgactgtatggcttttccwggtggttattaagatgaatacatatacatatgtttatgaaagattttctaaatcacaaatcatacaggattgttagaggaattttaaaaaacacacagaaaactttggaagcactgagattcttgaccatgtttcatgcttaaactttaaaaagtatatcatgccagatataagtttgtcatatttttacattttttcaagaaactcatttacacagcagctcagggatgtggaggccttcaatttatactcacataattaagtagaaaatgtgattatgaaccctcaaattagaaacttgtaaaactaaaacatatatattatgccatttaatttatggcaaccctgttgaggcatgcctaattggggtatttgaggcttagagagactcagtggctctcttagcttggtttcctagaagcaaagcttatggtttgttgagggaatactctcaggaaaaaaacctataattgaggaagggaagcaagaaagagctaagcaaggatagagtctcaggtaaattctagcaccacagggttcttagaaacataaatactgcaaggttgtccttccactcacctttgggggctagaagtctggcttcatgttcctccatatcaatcaaacattggctgcctccaggaaacaggtggggaggaagaagtggctcctatcagctgaggacaattctctggagaagagggcaactgtgagttatttgcagtcaaaggctcccagcagctaggagatgggcacaccagcctgagtaaaggggatctgattgaggaataagcagtatctaccgcagtgacctaagagaagactattaaaccaaggctgagaggtacatcagaatcttctgactttaaggcaaatgccctttctttttcccttcctccttttgtactttctactcttcctacaccttttcctccttttgttttaaaaacaaatactgtttattatgttagaatttttataagtcaggatctgggcatggtttagctggctcaaggtctctcatgaggttgcaagcaagttattggcttggcctgcagtttcatctgatggctcgacttgtgggtgttatgtgtgtgtgtagctggggagatcttcttataaccttacttatgttattgttggcaggcttttggtccctcaacacatgggccactycacagggcgccctcatgacttggcagctaacttgacccggaatgagtgatccaagagagagagtgtgagacagtattcaagatggacaccacagtctttttataacttgacttcaaaagagatatggtgtcccttctgccaaaatttattcattagaagcaagttaataaattcattccacacttaaagtgaggagttacaaaaggttatgaatgccaggggacagggataattgggggccatcttagaagctgcatatcagagtctaccctctggcacccagtgattatttcccaccaacatgcaaaatatactcactccccccccccyttttyttttttttagaaaaatagcatctattcacagctaagcagctcactgagcctgctttctgacagtataattgtaggggatcaaagacctctccttattccttaatgtctctgccttcctaagtcaagctagtgatatttcagcatatataactcttttaagaattttgtgggtctcctgtgaatcttcttagaattcactctattagacaaaagttcaccctattagccaccttacaaatctcatagatatagactcttctctgtttgattgagaggaacttgagatacccttaatctctctaaggggccttttgtaagactgaaggtactttaaggcactaccttgatttaacaaaggattttacagccgtaattttgccttcatctttaaatcrtgtttttctggcaatgccttggatttgatctttgttcagaagctattcaaatgtccttcatactgtaccacagctgctctgtaatccattggcagatcatttgttagcactaaatcatctggctcccacaaataaacaccctatggcttccaatagtacaaaatacccttttgtaaacatccaaatctgcagtattgtcacagtttaaatttatatacggaagctggactgattagaataaaaccatccaaaattataagcatgaggacataatttatgtgtcacaagaaatttaaggcagatttttctcttttttctccaacatttttaccaattccaaatcatatactgggtatacaaggtaaattagacatagttcccacccctgagcaatttatagacatgatttatctccatagaatacttttaaaaagttaggtctaggcctgtgctatccagtatggtagctattaaccacatgtggctatttaaatgtaaatttaaattaactaaaattaaatgaaataaaaacattcacttctcttgttttactagccacattttaaatgcttaataaccacataggactagtggctgccgtatttgacagtacagataaagaatatttccatcattgcagaaagttgcattggacagcactaatctagaagaaaccagtatgataagcatttatcctttttaaaaacatatttgcttctctctccccaacactaaaatgagttaaatatcaaaaagaaggacactacatgcttcttcagtaaatattctaacatgcttaacaataaagaatgctgtaagaccatggcttttaaaatttattaaaatctactgaaagctaacatctttttcccctagaaaaagcatgctagtaccaaaaggcatgtatcaaaagcatgtaccaaaaaacatgttcaattacaargggttcatgggccctccaaagccctttcattaattctgtagtaggccatgatcctcaggttaagaatccctactgcaaagtaaattttattttcccattgactttcagtataaaattgatggtgcaatttactattaaatatgcttctttctgacaatattaaaattatgtctagaataatgatgaagggagaaacaaaatgtaaagaatgaagaactgtcttcaaaatgactaaaaaataaacccaacactttgagctaaaaatataatacagagccagcaaatctaccaatttgggtcaggtatcataatcaataaagaactatgtagttttagcaaatttgccaagttttccattagtcttaaatctctaccacatccctaccttacggtgagaaaccttatggcgtgatagcaggaacactctactagccttcagaaatctagtctcctgatgtaatttcaatacatataataagtattatttaagagtgactttggtgcctcgatgatcttatctacctggacattcagaatgaatgggtggggttccataggccaggaagaccctaatttgaactttggaaaaaaaaagagtggctatttctttgaaaatctgttgaattagagaaagtttttgcaaggagagcaaaattataaatgcagttggctccaggtatggctgagagacagaatcctacatggctctgagtttctgatttctgagccaacgtacaatttgtatttgtgtggaagaagcactgaagcattctttccagagtggtaatctgaaccatatgtagactgattaatagttatgtcataataaaacctcaattagcagaattctagagggatagccttttataaataaaggaaagtttactaagaaacctcccttctcccatcctccccaacttctttctctatttttcttccttttgaaaaattttaatggtggggaaaatctttccccaatgtacataaagctcctctgctgctttagtaagtacagtctactgaacataagtgagtctgtcttcgagcttattgtatctttcagggtgtctattttgcagactagtcatcatatttttatagaagttaatatatgagctcaggctgaaaataaactggaaattttctgagagtggcagctaatacccatttattttcttttcacttaaaaaacacctatcaaggctgagggcagtggctcatgcctgtaatcccagcactttgggaggcccaggcgggcagatcacttgaggtcactagttcgagaccagcctggccaacatggtgaaaccctgtctctagtaaaaatacaaaaattagctgagcgtagtggtgcatgcttgtaatcccagctactcagtaggctgaggcacgagaatctcttggacccaggagatggaggctgcagtaagccgggatcataccactacactccctcctgggcaacagagcgagaccctgtctcaaaaaaaaaaaaaaaatctatcaagaatatgcagtaaagttttcattcatttgtgtatcagtttatatgcatacagttgcatgtaacaaacagtgctactcacagtggcttaaattgaaaggatatttattgttgacctaacaagaattgtggaggtaagatgtataaggttgatgttgtagtctggtgacatcatccaaggtcctgggttctttttatctatccactttgccatcctcaactgaaaatctttagtcctgtgacatcttaccttgtggttgcaaaatggctgctccagcttcagacgtttatctttacacaatagcctccaaagctgaaaggcagaaaagagggaaaagtcttctccttgcgcagttttctcttttatcagggagaaaaatctttcccataagctccctccccctgcccctaagcagacttcattttacttgccattgtccaatattgggttacatgcttatccctggagcaattcctggcaaaggggaattaattttttgacttaagagtcatcatggttcatcgtttggggagggacacattgctgctgaacacaacctgtgatcttttagtaagaaggaaggggagaatggctgctggacaggcaaccagcagcttctgctacacatggattcttcattttgcttctgtgggacccactcttggcatatttgttctcacactactgaagaagccatttgctgtttgcctatcagtgatcccaaagccagctatctcatttctttgaaattgtaggcgcagaaggcagtaaggcctagtgaaaaaagaatgatagatttgaaggccaggcagacaggattcgaatccctgatttaccatttactggctgcataaccttggacaagtaaagacgttagagacttggtttccctaatgataaatctaaaatagtaccaaatggccagtgttattgtatagatttaatgagatagtgcatagaaattgcctagcatagtacacatatcataggcacttagtgtgtgttatttcctttcccatgtgaattcaattgcacagaaatcagattgcatttagcttagcagatagaccaattcggaaaaagagtaagtttgactccagtaggttttttttttcttttttcctccttactcatctatgttcacataaaagtcccctctcttatctacaaaagacttgtgggtagaaagcagtgtgccctgtgttagggtagtgtccagttactaagagaaagctataaaaccatatattcatttcttaattggtttgcttaaatatctgttaggtttaatataggaaacagaatcctctctaggtattttatgcaaaaaatgatttaatgcaggaaataaggtactcacaaaattggaagggctggagcaatggaagtcaagaagtctgcmttaaaggtcaaatggcaccatgacttcagtccagatgccagaaactcctcctatcactcaggctaggaaactgttgctgccgtgattatcaccactgccaacgtcactatcctccctaccacacaaagctgatgaggggacagtggacacagttgacaacactcacatctgctgtagcctattttctgcatgcacaactgtagaaaagagttccttccctttgattccttccaaatcactaaaagtagaccctttcacaacctagggataagggaatctagaaactgtacttttcaacccaatgccaggctttcttccgccttacccatgtgaaagccctccttatcttactaatctgtgattcccctgctgggctatctgcccatgtgcattctctctttgcccctgttttccctctatgccctgtttgggctctgacatcctgctctggcctaccatgcctccctgtcctttctggtacagatgtctgccttgctctaaaggccttagaactcagttgttcaagaagagaagattaggaaagggtaagaggtctccttgctttgttaaaaattaccgtacatatctttgtatttcccaacaatttagtgttagaagtttttgaactttataaaaaaggagtcgtatatatagtatatagtcttctgggaccaactttgctcacaatattattttagttttattcatccatattgttgttctcacacatgagctttgccatattttaaaatcttaatgcatttttgcattttgggggttatgcttctttctttattcattcagcattctataatattttcccatgttaagaaacctcttcaaaatgaacattattatgttatgaatggatcataatatgattgaccatttcttgtagttggatatttaagttaattcctatcttagaatgtggtagatgaagaagatagaagaaaaaaaggctgagattttccatgtggcagastagctggaagatggttatttgctgaaatgggaaacactgggggatgcacaaatttggtgataagaaaaggaatctggttttgagcaggttgagtgtgagtgtggagatatccagacaacagttgaagattctagcttggctcttaggagacagttcaaggctagaaacaatggatttatcatcagtacatggggaatggtttgaggcaagtatgggagtgagatggcccaggaaaatagtctggagatatgtaaaggaccaatactggactcctgggaaatacttatgtccaaatggcaggctgatctagatgtgctgtccagagagtctgtttagaaaggaggaagaaaatcgggaaactgttgtcatttggaagccactgcagaagagagcttcatgaaatgaatgggtagtcattcatactaaatgctgtaaatactgtagacaagttaaccaggatgacaaccgagggcaaaatatatgtatgtgtgtatatgtgtgttggagggctgggcggggggagaaagcttgctgctcatgtatctggatttttttttaatttggatgattgaaggttcacatgcagacatgcagttcaactgtttccttgggtagattcctagaagtggaatgacttgatcaaagggtttgagcataggcctttgattcatgttgttaggtaggtttcctggttttcattgttttttgttttgttttgtttttgagatgggttctcactatgttatccaggctgttttttgaactcctgggctcaagtaattctcccactcagcctccctagtttctgagattacaggcatgagccactgtgtctggttccagtgctcatttttttatatgcaatgatgaatagtttgtaattttgtacacatctgggtgtgcagagacaaggtgaggaaatctgcagcaaaggaaaatacagaattgggcttctgtagttgcgggtcttttcctaatgaacacagtccagccctcatctcctctccactttcagtttccacactctacatctctcatccagaacacaagtggaacagggaccattactcattagctgcatggggatttgaataacctcacagtggaggatgttcttgtctgttatggtggcaagtaactacaactaaatgcgtgaccaagacagagctaactcgagtcattaattagactgtgaagtctggagggaagttctctgaatttaagattacagttttgaagtttggcatctgctaccacttcaaggattaaggatttactgctcactggaattcaatatttaatattttaaaaaccattcagctccagcttgcaaatgagttaaattaaaataatacacagacgttctctctgaggccgtggtttttattggtagcaacgctcattaagaaattttactggctgggcacggtggctcacgcctgtaatcccagcactttgtgaggccgaggcgggcagatcatctgaggtcgggagttcgcgaccagcctgaccaacatggagaaatcccgtctctactaaaaatacaaaattagccaggcatggtggcacatgcctgtaattccagctattcaggaggccgaggcaggagaatcccttgaacccaagaggcggaggttgcggtgagccaaaatcacaccattgcactccagcctagcaacagagtgagactccgtctcaaaaaaaaaaaaaaaaaaagaaattttacttgagccatacgttcatgagaggttctaaataagcacacagatagtctatttcagccttcatttcctacaaatgctgtatatagaagcaactttgtgtttcttttgtcaagataagacatttgatttacctccttatcttgcatttaaatttatttcacaagatggacctgttttcaggtaccataaacacccagttctactgggttttctttgactgctggggaaactgtggactgtgtctgatgcacacattttattgcatctcccctggcatgagattcatatacattggcatcttctcagagtgaagttgactctctctgtttccctattccagaatttcacttggcatatggtgattccaaaacagtttgaggctcattttgcttggtttttggcaatctcagctcagccggtttcactctgagagatctcctgtttgttccttcatgaatggccacagaagcttttgctcttggctctgcattctaatagcacctcctgcatggtctgtggcaaaggaatgctttgaaatatgcgtccatactatgtggcttttcttgctgcagtttctgttcttttttattgtaggatcgggagactcaccactagaagacgatgaagtcgggtattcacaccctagatataaaggtgaatgctttgcttatgtgctaatgaggacctgctggtgccaggagaactttcctttwtgccttgtgaaacrgattgtaataaagtgaccagacaacacatttaagttctaattatctatcaaggaaaaaaawatatatatatatactcccttttttaaaaaaggaaataaagcaaaatgcattggaaatctctgaaatgctgtctttcagcatcccaatggtcattttattctcataagtttctttactgtcctcacttctgcaaaggcagctgtagctgatgaaagtgaaaatcaagcctaattcatacattacagccagaatcatccagagtaaaccacctaaggtcaaatctggaccaagtgctgataatgtactaagatgaatggggaaggagaaaacttgattttcataagctcatttcatcgtgctctttctgagcccagcatggcttctgaaacggtatgttaaagtatgttgctcaaatgaaacttaatgataaagaactccatctctacatattcccagcaatccactccccagcacgtataaaaagcctaaacaagaaccttctgtccagactcaggtaagtatgtccacaratatttctactggtgaaacatttctctgaagcttagggaaacctgggagaaatgaaggtaaatttagagatgctttctctctgaatctagttcctcttacagtggaggaagaatttgaaaaaaaaaaaaaatggttaacaaagtttcactgcggcattttgccctggaaatttgtcctaattcctgggatgaggacatggcccttgtttgttgtgatgtgtctcagatacaggagaatcagggtaggactggacaacttttgactggagatgtccttcagttgttttctacacaagtgaacaatatttccaatataatgactggtgcctggtgcttatgtgcaggtgtgcttcccatcacataccacatttttttgtgagatctgaatgcaaatactcattcctacctatagtttctatctccatagcctcaggaattaaccaatcaagcaaagcacaaatacgttaatcagatgcttggggtaaggaaaggttctaattcgcaaaacttcttaactatttatgggtttagatttttttttctttgagtcccttgttgaaaaatcttcctaaaacacatgcatgcacagatgacccttcacatctacagcaggggttgcctagtgccctcaggtccttgttcttcacatccatcttcacctcacagcattgcaaatgtgacaggtagaccagatggccaaaatgtgtgcttgccctagaacttaccctgaatgtttaagaataaattttcttagggcattgtttctattgtcagttaaattgcttactggtagcaatcatttcagtatgtataagtatatcaaagcatcatgttgtgcgcttcatacaataaaatttaagttttatttatttttattattattttttgagatggagtctcaccctgtcacccaggctgtagtgcagtggcgtgatcttggctcactgtaacatccgcctcccaggttcaagcgattctcctatcttagcctcccaggtagctgggactacaggcacacgccaccacacccagctaatgttgcatttttagtacagacaggggtttcactatgttggccaggctggtctcgaactcctaacctcaggtgatccacccaccttggcctcccaaagtgctgggattacaggcgtgagccactgcacctggccaagtttttttaattttaaaagctagagacaagccattattaagtgagggtttagttttagatcctgaggcccctgcacaatgtccagcacagagtaagtgtttttgaattaaagtaaaataagaaagaaaattaaatgtaaccaacatttacggtgctcctggtatgtggcaagcatggcttttgattcttttgcttggaataccatcatatattcatattaattgagtgagtttgtgatgtatgagtatgcaggtcatatatatacatacattagttcccccttatctgcggtttcactttccaaggttccatttaccttcagtcaaccgcagccccaaaatattagatattttgagagagagacagtacattcacctaactttcattacagtatattgttataattgttctatattattattagttgttgttaatcttttatcatgcctaatttataaattaaacttcatcataggtatgtttgtgtaagaaacaaacagtatatatagcgttaggtactatccaaggcttcaggcatccaatatcccccgtgggcaaagggggagtactgtatatcacaaatatatgtagtacatacagattatattaaaacccttagaggaaggaaaatttattcaaggaagttctttaggccttgtgtgagctcctacacgtttatatccacatggttaaatttaatcagctctaggttaagcctttaggacatcacctttacctagaaagtccagggaagattacttgagtcttgagtttagggctcacttgcagctgtctgcaaaacatgatatgacgaaagtattagccagaccagggacggtggtgcgtgcctgtagttccagctacttgggaagctgagacaggaggatcacttgagcctaggaggccgagactgcagtgagcaatgatcatgccactacactccagcctgggtgacagagtgagaccctgtttctaaaaaagaaaaaaaaaagagaaagtattagctgaaggaaatgtgaaggcaaaactaaaacagtggtctatgcataagacgtggccagaactgttggtttttgtaactgagaagcagttggaggcatatcctcagaagagaattcctgggaaagtaaaacagggtctgtcctccttcctggccacatgatggcggtcttacctcactcactgacagctcaggtgctgggttggagtgatgagccaggcagttgcagggaagtggctcctattcatggcattgagagcccggcaggctttagggaactcctcactgttccccatcaattgtgggacaatggggcagtggctgctgtaggaacttatccaccaaggagctagtgttgcccttatattttatggatctcaaagagaacatttcaaaagcacagcagggaggttctgatttattcatttcatcccagctgtgctttgggcaactatgagaccaaaatcaaaacacctgcaactttgccatctggggagggtgtcaccctgttacgtaaatggggcataactggggacacttctctatggagagcaattgttctgtgactttaagcgaaatttatatcttgttacaaacacctggaaattgtagcatcatttagattaatgccagtattacaacattttagagagaatgtgcatacggctcagacgaaatccaaattaaccaattattgaatccctaccgctatgtatgacatcagttgcccttgaaagaattatctaaaaaataaamataaaaaatcttatgtatctagttaagggaaatactaaaaagaacaagcatttattgaacatatatgctaggtactgtgctagatgcttgatatgcaatttttatttcgtccttgtaacagcactatggcataagtatagatattgactcagagaggttagctaacttgtctaagatcacacagtcagttatagaggaactcagattcatgttcagatatatctgacacttagtcccatgatcataacctccctacccggagacacctaagaaaacatggggcactaattgaaggtccaaaatttggaatgtagccagcctgggacagtaagagtaaggggacacattttctgaaagtgtcatttcatatktatctcctcttttgtttctgctacttgtagataccccgtggtgctcccccatcaaggtgaagtatggggatgtgtactgcagggcccctcaaggaggatactacaaaacagccctgggaaccaggtgcgacattcgctgccagaagggctacgagctgcatggctcttccctactgatctgccagtcaaacaaacgatggtctgacaaggtcatctgcaracgtgagtaggccagctctgtgttgggtcctcagggatgaccagagccaaagttcttttgctctgagattgaggattttcactgaatattgatgagaaaaattctccttatgatcagggggacaccagggggattctaagatatggtggaagtgagttggctcctctcagagagaatgatatgatcagctgtttgagaaaaggggagagaagatcattgttcagaaaatgagttacatttgttcagttagtgctggatcctgaagaggtgttggggatttagaaacaaataagacgcacatgggtcctgccatgaagaggctttagtaaggcagaggtgtcaactgggagataagtacaagaagggtacaaagtcagggacatatggtagcagattaaagaagagttctcctggctgggcgcagtggctcatgcctgtaatcccagcactttgggaggccgaggcgggtgggttgcctgagctcaggagttcgacaccagcctgagcaacacggtgaaaccccatctctactaaaatacaaaaaattagctgggtgtggcagcgtgcatctgtaatcccagctactcaggaggctgaggcaggagaattgctagaacccgggaggcggaggttgtagtgagccgagattgtgccactgcactccaacctgggtgacagagcaagactccatctcttaaaaaaaaagaaaaaaaaagtgttctcccaaggagtggggcttagggaggcaggaaagagtcacagaagaagtgatgcttatttatgaaagtgagtgtgcctcaagggagaagcttagaggagcagcatttcaggggctggcttttagcttcatgacaagtcatacctcatttggaaaattgcaagtggtacagcattgttgaagcacattttagatgtctttggtattcaaaacagccaccactttttgagcgcttatggtttgccaagaatttcacatacatttgatttttacagtaacactatcaatatgggtgccattatgttaacttcattgtcagggaaactgaggtttcaaggctgcagccatgtcatcgagactatgcagactctgcaactgggtgactgtagtggacaatctgctctacccagatctcctcgatgccttttactagttgtatgtatccagtacccagcttctgagtactttgctcttaaagacttggaacttcaaccttattcagaagactgctccttcagaggactgatcccactcgctctctctctctctcactctctcactctcgttctcttttcacaagagaaagcatctcctgtgagcagcctgtagctgcccaatgactgactgataaagaattatgaaagcccagcttccttgcctgggggcaggacagaatgagctgtcattcacactccagagcttccctatgggatcaggctgctgctgactttgcctgagatctcatcttgcctggatttctccccttccctgttctgctttcctcaccccctcactagtctccctgggagcactttcttactaaacctcatgcacataaatccgtatctcagaatctgcttctggggagctcaacctaagatagtggcttagctgggttgccaacccaagccagtgtgacaggaaactttgtgtcttctgtgtgacataaaaccatccattgtttcttaaattccatttgttttatttatttatacaaagtcgtgttcttgttgcccaggctggagcgcaatggcgcaatctcagctcgccgcaacctctgcctcctgggttcaagcgatcctcctgccgtagcctcccgagtagctgggattacaggcatgcgccaccacgcctggctaattttgtacttttagtagagatggggtttctccatgttggtcaggctggtctcgaactcccgaagtcaggtgatccacctgcctcgacctcccaaagtgctgggattacaggagtgagccactgcgcctggccttcttatatttaaattaacttttcacctcatgctttcagagtttctagactctgaaatgaaactctatagacaaaaactaagaaatgctgaatatctgattttctcattttcagaaaagcgatgtcctacccttgccatgccagcaaatggagggtttaagtgtgtagatggtgcctactttaactcccggtgtgagtattattgttcaccaggatacacgttgaaaggggagcggaccgtcacatgtatggacaacaaggcctggagcggccggccagcctcctgtgtgggtaagaaaatgccacagcccttaggaggcacttgctttgggaggagcagggggtgttcacatcgtggattgtaaagggagcatcactattcctcctgtaaggcctaagcatgcaactttgctctcagtagcatcactggttctctggctcagccctagatctaacctcagtgtctatcctggagctgacttcgtagctgatggcttccatctgacttttgtctttttcttggtttgctattgaggcaactacaggctggcagagatgtggcatactcctgctgattttagttygggggcctgagcaaagttattgacactatagggacagtccagtagagaacatctatgtgtctttcagccccaatgtagcttctttgtcattgactctggtggtcagcaagcactcaatttgttcagctggaagggatttggatattttgccttactctgggtttgttgggcagtgagtggttcccatggtgtggtcctgggagcagaagcagcagtagcatctcctggtctaagaatgcaaatttttaccaacccacccccaccacctgctgagtcagaaactttaggggtcaggcacagcattttgttttttaatgagcattccagggattgtgaggcactcaaatagagagctactgatctaaggcactgcttctcaaactttactgtgcagcgaagtcctctagggaccttgggaaaaatgcagatttaaattcagcaggtctgcggtgggtcctaggattctgctaaacgatgctttagggcaaagtttctgaacctcagcatgatggacatttggggccaaataattctttgttgtggagccctgttttttttgtttgcaggatgtttagcagcatccttggattttattcactaagtgccagtaacactgcccacagggggcacctcacagatgttgctttcaatatcctccctgtgattagctatgtgcatagctcttcaaaacaaaccaaaaagaaaattgaatctactccctcatattggaaggggcagaggtgatggtgggaggagagaagctcaaaaatctttctgctaagcaagctttggcagagtactctagggatcatactgtttaaatttccagattgtgtgcaacaatggaaagaaaatgctgattgttctcaaaaaccaacagcatgtcttaagctggaccagatgcgcctggaaccttcccagaggaagagagaatgaaccccaaattcaggagattcatattacagtttgtcagaacaaggttcaggcatatttgggagaaggaggattgtacatgcaattagttagggatgacaaaaaggggtacagcgatccacaagagagcctagagctcccaggaaaaaagagagaaatgggcaaagcaagcaggcaattctttctttgattttcgcgacagacaagctgaggtttgtccccagtgaattttactccaggggtattatttacttttttggctttaaatgtattaaaatagtttaataaatttgtttttgtgttgacaggggtagggggtccttgagcgtaactcagaacttcaacctattttaggaggtgacacatagtggctaagtagttcccagatttccacacaaccttcaacagtcttggccagagctgtactgagtggtgagaaagttgtcccagttctcttctagactgtgagggaagagagaagactgggcttactttggactctgaggtggtcagttctgtggtctggctaatttgaaggtgccacaagttaaaattaattctcttacacagaccatactctggcaatgagctgaaattcatagttatttcagaaacagatatagataaaaataagtcaatgtaggaggaaaaaaaatactgcaaattgcaggagggtaaaaagtctttgaagagccacaacctccattgatctggaagaaaataaaccttagaatgtaaccactattgttttcgggggatatttttctttctttccatttttagttatttttggttatgttggcatttagatagaacaatgaacagttggaatcacaacaagtcctcatgtaaagaccagattttgagtagacacatgatctctcctttagaccaacacttcttcctaggccaaaacaggaagaaaacaaattaaagatactttaaaaaccacggacaatgaaaaaccagcaaaggtcttttgacattcagagagtatccatttaattactttaacaaaagacaatgtacaaactttcctttttgccctgtggaacggattgtaataaagtgaccagacaacacatttaagttctaattatctatcaaggaaaaaatatttttaaataaatatattttattttttgctcacttatttttttgttttctacagagtagaataggtggagatttattaacacaaatgaaattctggaataaaacattttggagatgtaatatatggaaattgatggcatacgtttcttgtgtcccagctgtctcacagctggtttacccaatgacccataggaatgggatcattgcattattgctgggctgcattgcattattcagttgatgcaaacatcagtagggctaagaatraatgtatccatgcattgttgcaaatgatgttaaattgtgctaaattcttcctgggttgacaaatacacattcttttgcaaactttcagaggctagtttcagttaaaacaacttgattgactgagatactgattcactttttcccttacatgatttgttagtacaaacagaacaggtcaacttttagtggctctctctaatataaatgtatcaccaatgaatttttatttgggcttctttcttgtgaagatgttgacttttagagatgaggtctcattatgttgcccaggctggcctcttgctatgtcgtccaggctggtcttgaactcccaggcttaagtgatcctcccacatcagcctcctgagtagctggggctacaggcatgagccaccacacccggctatgatcatgacttttaaatgtggatttcattgcctcccttcttgcctcttttgtctgttttggaaagttctctggatttttgtatggtgccaaacagaggaaaccacttcccagagccatccacagagattacgctctggctgggggaagcaaacaactggatgagttttcaatggccaggtttgttctgcatttggcagtcactcacttcctatgcccccttgaaaagaactcttcctttctctatcaccaaactcaaactattttatatttgcatcagtgatctgttgctgcacaatagaccacacaaaacttagtggctccaaacaactatgttattgctcaaagattctatgggttggaaagttgggcagagctctgtggggacagctcatctctgctgtatgtggtaatggttgaggtgaccaagtggagctggaggattcaagatggcttcactcacaggtctggtacctcagttgggaaaagttgtactgactggggtctggctgagtctctttctctctctctctctcatttataatttctcatcctgattacatggcctctccagtcaattggacttctttagatggcagctggcttttaacatagtgaaagcagaaggcaccagattctttgagggcctaggtctggaactggcacagggtcacttcccttgcattttattgttatctgttgggcaagactttgtccttttgagcttcttccttatttccactacctaccgggttagatgtgtcaaggatttccaagtaaatagttcagcttcagctgggtgctggtggctcacacctgtaatcccagcactttgggaggctaagacaggcagatttcttgagcccaggagttcgagaccagcctgggcaacatggcaaaatcctgtctctacaaaaataaataaataaatgaataaataaaatcagctaggcatggtggtgcatgcctgtagtcccagctacttgggaggctgaggtgggaggatcacatgagtctgggargtcaaggctgcagtgagccgatattgtgccactgcactccagcctgggtgacagagtgagagcctgtctcgaaaaaaaagttcagcttcttagataaatagtagttgatacaatgcaatatatttgtatctcatattttatatgcacagagataactagagcacagagaagggagacagtttgtcagatgtctccaatgaatgtggcagagagcaaaggccagaattttcactgaaggtttcaagatttttatataattgcaggcatcctaattcaacaggggatagtaattatgtttctatagtaactttgttcctttcattcatggaaatgtataacttataaaatgctatcggggccaagtctgggtaataacaggcttaggtctctggagcatcagctgaagggcagaccagcttgtctcaccagccgagagagaaggcagctgcttgaggatgtgtcaggatcaagtcctgcagaggctcttcaagggttcatggggaagctatgacagaccatcacaaaacagtatgtgtgcaaaggttggcggaaaacactaggtcagcagcaggcagatacacaaaagggtttggtttattaaaatagctttaaaatatgtaatggcatttaaaaatcccagaccacaaagaaattccaaaagagaggaaatgcttcttcccagtctataaatgaggatgctaataacactgcttagtctaatgggtggttgtgcaaattcagtaaaataatatagggagggtacttagcatggggtgggcatgtaggaaggagtcctccaatattagttattatttgtaatgatttatttcttcttgtttcttctttggaagagcactgtttctgaaaagctaggccagttcagctgatcattgttagctagagataagctggctttgggaaactctgagactcttcacccagataacctatcttggagcctgtgtgcttacactgttagtacatcttgatacagaaaacaaacaacaatgtatcatccagacatttagtttacctgacagagactaagttgcttttcactctgaccatgctgcaccaagaaaatatggtaacacaatgtaattttacattgaaatctgtatgctaataaatatactttctataatgtaattgccagctatatttgaccagcagggggcagtcattatatacttgtctttctgtgaaatgttcatctgaattataaaagtttgtcttctatcacctatcatagtaaaaaattaaatgtttttaaaaacgtaacagctgagtatagacatcttgaatgcatttaaagcatcttccatttcatcatagtatttgtatactttattttatcaattctgagaagcgtattatttctaccttttaatatccctgaaatagggatgcatttcacaattaggagtgacttagattcaacaaaatatggtggttattcaatttaggattggtgcattaaggctgttaagttcacactccactgaagcacgacatagaatgaaaatgaatttggatagctgaaggcaaaattgtttaataagttattcgtaacttcttaccctgaataaaatgagaaattattagacaagacacaggagaaagtatataaagaattttacttggtgcatttagtctctcaaagacatctgtcattcagaatcaaaaggacatttaactttcattaaggcagtaatagcacttaatacttatcagttgatatgtaaagtaacatgaagctgaatgtccttaatttgctatgccttctttaaatacattctctacctgttcagaaatattaagtagaatttgcagaaatgtgaacttcctcttgtgatttcacttcagctataagatgaaatacaacccagtgtagagttgacatctcatttactttgagccctcattaaccacccatccttgttatcactatcgaggcagaactcctattaccaggtagagaaactacttgaagaaatttgggaggcttttggaggtccagagccacagtaaaactgctgtcccagaacataaaaccataagtgtagttcagtagcagttcaaggggagagtggacccagacagaccattgcctattttaagatattaagcaatatgttgataatagatagcaggaagagagagagcttgttccagtggcaagtgctccgacttagattgtaattcacagtgccattatctacatgtgtggtcttaaataaatcatttaagttctttgagcctcagtttgcacatctgtaaaatgagagagttgggcggctcctctacacctccatagcattcacttttaccttgcctggggcaattgccattttctacctcatgttatatttcatgtgtgataatgtaatccctccaatacatggcaaattctctgaaatgtcaggagcacatgattctcttgcctttgtgcacccccaaccccagcagttggaatgaagccttggataagattggtactcatgaaaaatttgttgccttgaattgaatctgactagatgatagctagaatgcctttctgtaatattccatgatgctgtgttcaaagcaggaagtactcactaaagccaaatgacttctagtttcagctgggtaactgccatgtggccttcggtaggcagagtttggaagcatggggaggaaaggctgtaactaatgaattacccacaggacaccttgcaaggccagttgattgcaggtttagccctgcaaatgtgagtatttaaacaatcttcaaaacttagcaggagagtaaaagcattatgaagggagaaaaggggaatatatagggtgaacaaactctttgaaaatggagaatacccagaggctttggtattttaaactgtgggtgttgaaccccagtttgactagatatttcttgatgatgatgagaatgttttggttatattttcagatatggaacctcctagaatcaagtgcccaagtgtgaaggaacgcattgcagaacccaacaaactgacagtccgggtgtcctgggagacacccgaaggaagagacacagcagatggaattcttactgagtaagtgaaacttggcagataaaatgatgctgtctcttttatgtgagatgtttactacccagagtaggggagtgtatatatgctggtctatttatgctttcagatgtggtccccctggtcactacctaacatactatatatgtcacctatgtatttgttgattgcctgtctctattataatatgttcactgctatgtccttaatgcccagaactgtgcctggcacatagttagcactcagtaaatccttactgaaggaaaaaggagaaataaggggtggtgaatgatgtgattattatgcattgcatgcctgtatcaaaacatcttggctgggtgcggtggctcatgcctgtaatcccagcactttgtgaggacgaggcaggcggatcacttgaggtcagaagtttgagaccagcctggctaacatggtgaaaccccatctctactaaaaatacaaaaattagccgggcatggtggcacacacctgtaatcccagctactcaggaggctgaggcatgagaatcgcttgaacctgtgaggctgaggttgcagtgagccaagattgcaccactgtgctccagcctgggtgacagagtgagacgccatctcaaaaaaattaaaaaaaaaawctcatgtaccccataaatatatatacctaccatatactcacaaaaattaaaaataaaaaaaatgtaaaagaaggggtggtgagaagaagggaaggaggaacagaaggggaaagaggaagccagttggttaatttaagaatagagccacccccattgcctgcccaggcagaccctactcatgcccccaggccattacctgcactgggaagccatctgtgtctcccaggtggtgccaaaggctgccgctcttgtgctctgtgagtacagtttagtgcaaaactttttcaccccttgttttttggctgtatttatctctttcaaagctttttaatttatttttaaaactcccgatcatatcaaacacttacagatgcttatttaaaaaaagagaaggtatcttctgctttcttccccacctctaccccattctcctggaccaatttcattcatagtttgacatgtatctgagttgctttttgttggtgtgtttgttttaccaatcacaatgagaagcactgttaagaagcttttaaaaatgggtggatccctttgtgagggttagctatgtgttgttctaatctagcatttgggcctgtacccctgcaactgtttggttggccttcatattccctggagaccactacttcatgttagcacattcatatctgtgccttaaagtttatgggcatattagagttccccactgagttttcatctgtagatgaaaggatacctctaacttatctcctggtgatccataaagcaggaaaagactttctagaatcctatcaacccaggctgtgcatgacaaaacatttttacacaatgattagcaataacagtacagtttctagtgagaggagacaggacattttgttcctacattccaataatcttcccccagtgcctcatctagcttaagtagtattactagttatgctctcccattgtaacttctcaaagataaagtttgaccattaaaaaattatttgctgtcacatacacatcccacaaattcctttggagaaaatgtaggcaatcagaattgaaaagtaagttgatgttatcagggattgggttttatttacctttgactcttcagggtctagcacaatgtctggcccagccccagcacrtagtaggtttttagatttttgcagctctgactgctgttgaaaaaacctgtgtgataaacacaaaacatcaagccatcagatgactctatttgtctacaagctttgtgagaatattcaccttgttctttttatgggtaacttgcgtaatatggttaggagtgttacattttatttgatttttttattttttgagacagattctcactctgttgcccaggctggagtgcagtggcacgatcttggctcacagcaacctccgcctcccaggttcaagtgattctcctgactcagtctcctgagtagctgggattacaggtgtgcaccaccatgccctgctaatttttgtatttttagtagagatgggtttttgccatgttggccaggctggtcttgcactcctgacctcaggtgatctgcctgcctcagcctccaaaagtgctgggattacattcatgagccactgcacccggcaggattgttacattttaaaacagcatctcagtattctcctgtccctttgttcagagcagctgtctgcttccagagttctacaacccagaggccagaaaggcttagagcaggatgtggtgggaatgcactccaacaggatgaggagttcagagaaggctgtcttgttcccttttcgctctcactagggctccttgctgccctggcatttctcctatgaccccttccaccatttcctatccaagctactgctctatcgctcccttgtgagggagaaggttctagtgycaagctctgagacaagtgcttcttgtgagttcccttatttactccttctgttatttgcatgtcacaggtgaaacaaagtctcagaaaggttacatccacttatatttgaagtatcactcctctcaggtttatctgaatttaaactgtgctttctaaagaccttaaagcatctaaagccaacagcagcatgtctcaaaatagtgggatttctgacattttcccaagacccctctctcatacctggtaaacagccacctcacccacctacatgtaaggctttcctcartggtgacaatgataattccacgtgttcattattagcaaatattctcatcattcccagaactgtagggagatggggaattatatgtatattgaaaaacagaacgtggattttgatcctgctatacttattggtgtcctcattaggcagccaagaaaaaagataaactcaccctagctgtgtgaccttgggcaagttctttagcctttttgtgcctcagtttcctcatctgtgaatcagagataatactacctaccttatagggttgttggattaaataaggaggattaagtaaatatatgcaaaatgcctagaaccatgcctaacatgtaaggtttatgtaagtgcaaagaacactttttgtcattattattatgttattaggataaccaaggaatcacagagaacttgcctttaggtctccactgtcccagacagaaagaacagagaaagttctagcacccacccccgcccygcaggcccaaattgccagtgactgcttggactatattctctaatgattttcctcacagaaaattccctcgtcttcccaacagtgaggcaattcaggtcccccctggaacaagagtgagattgaaggaggagacttgggccctatatttttcatcctccctcccccctctacccacttccctaccattctacccttcagcaagaaaaaagtctaagcttcccagtagtttgggtcttccattttctggtcacaaactgctcttctaaaacagactaaagcttaggagattctattcttcaagaaatttttgttttatttaaactggtctaatggttgcccctcagtctctccatgtcctgtaaagagtaggggatcgtcacttgcttgtcaggtccataatgtcatctttcctgtttctgattttttttctctaagtgtcattctaaaaggcctcyccccaggctccaactttccagaaggagaccacaagatccagtacacagtctatgacagagctgagaataagggcacttgcaaatttcgagttaaagtaagaggtaagagtactgcttattggttttgtttccccctctctttagaagagcaaagggaagtaggtcctcaagccagaactctctcaagtgcctactgtggtgggagacttgccagctttagattagtctctaataaggcttggggaagtgccctatcttaatgcctgaatttcacgatacacatccggatgggcgtcagtgttgccagattatttaaggagttcccaggactagtcttacaggatcccatagctgactgtcctagaagaatattattcaataatttttccatccctgagcttaggtggccagctgaagcctgtgartccatctacaaccagggtgrataggagccccctaatttgggccaccaggagaacatgtttttagtgttctagtaccattggtatgaaagaaaatgtttttaaggattattttatgcctgatggtttgggcaactaattgctaaccatctttactccttactcttctggacttcacttcctcatctataacactaggggcgaaaccagttgatatcagtggtctcattggtatggatggtgaccattgcaagactcactcactgaccaaatagtcatccctcctccctcactcatttcacaggctgatgtagaagcctgattgcaaagctgatgcctctgcatcctcaccttttctgcttactctgtggatgggagctcagcactgagacccctctggacttgtgtccctacagtcaaacgctgtggcaaactcaatgccccagagaatggttacatgaagtgctccagcgacggtgataattatggagccacctgtgagttctcctgcatcggcggctatgagctccagggtagccctgcccgagtatgtcaatccaacctggcttggtctggcacggagcccacctgtgcaggtaggtatgccgcccctccagcctgcagcagaacctgtaaaccccttggttcttgattccagtgcaagagaggtttcccttcatatactttgagaagttcatggccatccctctttatctgagtggatgaacatagtccctagatccctgctgcagctcatctcatctgccatccatcttgcccctgcctatmctctaatttccttttcatgtcctctaaggaagaagctcaaggtaggaacctagggccagcctttggtgacattatgaatcagcaaaatttgctctagtttcctttgttctagaaatgtaaggatcttatttataaagctagtaaattgccatgtagagacaatatcatacctgctttgcatcactggcatgaaagttacatagactttgggcatttggaatctttcctcctatgtaaaatgaagaaaataatacctcatctacctcttgagttgtaaggattaaatgaggtcatctgtggaacagtggaatagagcagtgcctggtacaggcaaagccttatgccagctcttattcctgatgaagaaaaattgggctgggtaatgagtctgaaacttggactagccagaaaattatgtatgtatctcttgtttatagacttctctttttctcatttcctggcaccctttcatctttatcactttcttttaattgaagcccccatttagagttaagtgacagagagacatatataccatcagctaaatgcctgagattcttcaatttcatgtattaaagtagaaagaacacacctattatagactccctacctaaggacttcatgcccaccacctatgaggctattctgaattgagatatgctataagtgtaaaatatataccaatttcaaaatcttagtgtgaaaaagaatataaagtatcttaattttttatattgattacatgttgaaatgaaatattttggatatattgggttagataaaacataaaatcatttctacctatctctttatattttttatttgtttgtttgtttgtttgtttgagatgtagtctctctctgtcacccaggctagagtgcagtggcgcgatctcggttcactgcaacctctgcctcccgggttccagtgattctcctgccccagcctcccgagcagctgggactacaggtgcctgccaccacgcctggctaattttttgtatttttagtaaagacggggtttcaccatgttagccaggatggtcttgatctcctgacctcgtgatctgcacgcctcggcctcccaaagtgctgggattacagatgtgagacactgcgcccggtctctttacacttttttaatgaggcaactagaaaatttaagattaaatatagtggcttacattgtatttctcttgaccagagctatcctagactctgagtccctggggcagggaagagggcaggaaagagggcaggaactgtgtatcactcagtgtgacatcctagtacctagcatagagcttggcacatggcaggcactcagtatataatggctgaatgaatgaatgtgtgaatgaacaaatacttcaatgcaaacctaaaatgtgaaatatgaaaaccaagattataaatcatacatggcatctactagtttttctcttattatttcttctctggggctaagccttttgcttgcctatctatacgacatccttcattgaccttgaacagctggaattagttgtcatttatttgcttaaagggaagacctattataaaaccgccttgtcccatgtcctgtttgcctgtgttgtttgctctgwggcctttgtgccccacattgctttgtcccttctgcaccaaggaggcagacttcagagattctgagccattccaaagccagcctggccactgcccattctcttacccttctgcctctctgcacccctttccccagcagatactatggtgcttggcccatatgcctttcacattcccatctgtgttcaaaaggctacttactgcaattaactgggtctgtctgtctgagagcatttctttcctggctatgaaagcattgtcagcccatgcacagagccagctggaagtgatggagagttagtgccccagaagcagccctcagcaatgatggagcaattgtataaatactccagttccctccagtgggttaattctggaggtatgttgtatatcatctcctagagttccccagtgggagtgagttccaaatgcccacagcaaaaacttgcttgataaccaattggtattgttttctttccttcactgtctcacttcctgacatagacagaataatggtccaccaaagatgtccacatcctagtccctggaacctgagaatatgttaccttacatgaaaaaagggactttacagatgtaataagttaaggattttgaaatgggaagagtatcctgaattacccagtgggcccaatgtaatcacaagccttcttatataaaggaggcagaactgatgtcagagtcatagaaagagacgatggaaggagaggtcagagagaagagagatttgaagatgctacactgctgtctttgaagatggaggaagggactactagccaaggaatgaatgtggcctctcgatgctgaaaaagacaagaaatcagattctcccctagaacctccatgggagcatagccctgccaacaccttgattttagctccatgagaccaggatcttttagatcctgacctgcagtatctaaaagaataagtttgtattatgttaagtcactaagtttatggtgatttgttacagcagcaagaggaagtgaatatacttccgtactcctccacaggcgcttcttgggactgcctcccaaataaactgtttacacttgaatccttatctcagggtttacttcttacacaaatggttctgtgtgtcatcataggctctgttgagycagaacaagtggaaggtttctgacccatgtggccatttctgattacagccatgaacgtcaatgtgggtgtcagaacggcagctgcacttctggatcagttttatgaraaaaggagactcctcattgtgtccacacccacagcccgaaacctcctttaccggctccagctaggaatgctgcaggtgagtcctcgaggcagggccaaggtgagagggagacctttaacaggaagggcccagccatttcactaaaagcaaaggccagattcagtgcctaatgcacttacagtgagtttcaggaagtggcactttagagctaccaccattcatttctggttctgggccataacctgattaacattgactccttagagttaacccaatcgttttccaactaatgaggtttgtctgtcttcaccaataagtctaattgacatgctgtccaggcctagccacagaacaattgtctttgccaaacctgtccaggatatgcctggctggaagcaatcaattrgttgcctgcccacatttttccccagggaatttctttgactcagagggtgacagccattttttcttagaaaagtggttctcaacgtgtgatccatggaccggaccagaagcatcagcatcacctgggagcttgatagacatgccaattctcagggcccctcccagacctactgtgtcagaatctacacttttaacaaaatctccaggtgattcmtaagcactctaaagtttgagggtcacttttctggraaatgtgtccttctcagctatgtaaattttgtagctactaaatgaggcaaccaacatcttgggtgtgtggggaaggctgactagaaactgtaaggatcaaactagaaattgcttgcttttgtcctgaggctggtttgcaaaagagtggccaacttcactgaatactaaagaggcaggatgtatgctgtgccatggatacagtgctgcacatttttttgagactattttattcatttattacagtggatagaactaagtgcttagaacagtattgatttaatcaaaggctacaatttacttctcatatcagcattaataaaatggataataataagtctcttttcactcttcccacgtacttgaagaattgcctatgaactctgaagagccatataaaatttttgtgagttcccttgataggaaccaaattcattgcatctttacccctggtccccaccagcttacctccccttgtatctccttgtccaagccaggggcttgctcttcagaaaacacaagcttatacctctgtcttttgtgggaaactggcattgcaggctatattccatgatcatgcatttcctcatctcttcttattccataggaaaatgaattaagccaaacaacttgcttttcctctgtgtcagcaaactatggtgacccatggctagtttcggtaaattaacttttattggacacagccacactaattcatttgtgcatgatctacaactgcttttgcactacaatgatgggtgaagtggttaggacagaggcaatccaaccttgccaagcctgaagtactctctggccctttacagagaaagattgccatcgttgctctagtctgtcccatcccttcagacacttgctaacttaacaactggttggataagatattttatatcaagatgttttggtgtgccctcctcctccaaatatacttacatttgcattttaaccagagccttcaaagaaaggtttgattgacttaggcatttcagtgagagtaatacaaaagtctatttctaactttttaaacttttcaaccagttctgtaacctcatatagggacgtttcagtggaattttggtaaaacatatttgatgttttcgtctttcaagacttcaaaatttcttttcccatttagccaaattcatcatatttgtcttacattactttttttttttttattgccattgccattcctgatgagccctcctcgtggttgactgggccacattcccaaggttcttgccaagagccagcttagaggcttggaaccttttatcctcttttcccctgggattgggtgtggagggcatagggcaggggagtgtggagagtggaaacagggcagagaagtggactctggaaatagtcttctctccttgcaaagaaaaattagaatcctctggggtggtcttggatactttttaggaaatttgactcactcaaggtctcaccctgtctggaaatacatagactgcccttttgcttaggttttcaaaatcccactgtcaagccatatctgaatgattcctctagcaaaggtatttaggttttatagccactatcttaaccccaatttctcatctgttttcaggacagttcagagtgagcaaataaacttccagagacaggccagtgctgcttctgtcggtttctagtttgataaggatgtcttttttagccatgctcatacttcccctgttgggttttctttttcccagcaagcacagtgtggccttgatcttcgacacatcaccgtggtggagctggtgggtgtgttcccgactctcattggcaggataggagcaaagattatgcctccagccctagcgctgcagctcaggtagggggaagttctgttcttaaatcttatcccctgtgaatgcatttttaactgattaggttccctggtttctttctattcaggattgagttcaggcaaccttcaatgtttaattgcttttattctgggagtgttataaccatactaatcagtatgttgctgtttgttcaaataaattgtgcagtgggtaattaccagtgttctttcttactccctccaaccaaccgtttttgcttcatgtgtgtgtatgtgtgtgtgtggttggtggaggaaggatggttaggagaggagcacctgaagaaaagacttaagcaatcatggtcttattagaagagcatgcatccaattagacttcccaggcttggtctcttttttctccatgcttccagaacacttgttcatacctttattttaacaattatattttagyttcataacccttacaaagttggagccatggattttagtctctgaataatgatgtattaaagaagcagaattcaacaaccaaaaggtaatttcagaataacccaaatttctacttgcatctcttgaccactgtgaaatcgataattaggctaaagcaaaactccttaaaatcttcctttctcacccagccttttctctcacacactgcatgggagagtacagatctctgttttcagggtcccaggctgctccctgtctctcagggcctcaggcagttacaaacatctcgaacacgtggctttcaggcttctgcaaaagtggggaaagagagtaaaaactcacactgactcctttatgcttcacgttggaggtgccacaccttgctcactctcttagttcattggccagaactagttacatgattgcaattcacttttaagggaggctgggaaatgcagtctttctgtattgccagaaagaagaaaatgaaatgggacttggtaaaccctatcacacctgttcagaaggcacagaaattccttgagaggttatatgatagaaacatatccttagcaaatgatgctatagatagacacaatagcttctttctctaatttccctgttttccagctgcctttgacccatcccatgtttgatttgtaccactttccacccaaaaagattctgccacattcctaccaaggtaaaaaaaaaaaaaaaaaaaaaaaargaaagaaagaaagaaagaaaaaactcagagggccaggatggaagaaaaataagatgattcatgagttctctttagtcggctgatgaatggagaaggctgggtacactcatatgcttttgtttttgttatattttactgcatttgcatgtagcacctccccataccgacttcagtagcagagctttcaaatattggctactcagtacctagcacagtacctggcaccatgttggcgctaagtggagtaaatgactcaaaatttcattgaaacagccttactatttccagaggtgataatagcttttaaaagtatattgtatatctacagttagtatacaaatacttcaagttgaagtgtacaaaacttaagacagagagttgtgttgatatctaaatatttatggtgaatattttcaaagtaggttttatgaagctgttgcttatttagaactacttgctcatatcctgtgtcaatgattttttaaaacttgttgcagaattttctgaatggtctttggattgaatgtgtgtgtatgtgtgtgtgtatgtcatcttcataaaatcttgatgtgattttaaactgtttaatctacttgaagaacagaaaaatgtgattaaaaaatacttgtcattcagattgtatatattggggctaccatagacttctataggctgaagataatttttaaatacattatgtcgtggttctcaaatttttaacctccatcagaatcccctggagggcttgttaaaatacgtattgctggagtctacactgtaggctctaaactgtgtttctgattcagtaggtctctggtcgtacccgagaatttgcatttctcgtgagctcccaagagaccacatggtgaggaccactggcctagttttttaccaaagcctttacagtttgaaatagaatttttgcccagcagccttcaaggaaagggtcaatcactattttgcagctggatgatagtccaggtaaatgtcatacagaaatgatcactcaggtgcattacctaatggattctgtgtcaggccggcatgcctgtgttatcaaacatatcagtgagaaacaaagagcttggcagaactttttccctttgaattggaaaggtgttttttagacaccttggagtctagtgcagaggaaaaaagatgatttaggcaaagaatgggaagcaaaagaggagaaggaaaagcataatgcctgcataatgtaaaaattctcttgtctggctattttcaaatagcaccaaggccgtgataaaacccttgaagggagtcaacagaaagaagagactgggtgcctggggttgcagggtcaccgcctaccttctttcttaccctcatttcttttttatctggaggtatgatctgattcatgctttccagaggaattttccagcaatctcaaggaagacagggaccaagaaagccatagtttctatacccacattattctttgagtctacagtgttccctggaagactttccaggaagaactccttccaatctgacgacagacacatatgtaactcaggcatactgtcggcatcacacctcatccccgattttgtgtggtgtttgatcattcatccccaagatttctgtggtctttcggccctagtgggatgcattcctgtggctgctgctagcctgctgatccaaccactcagctcttcccatgacagttttccctctttacattctgtgtcaatgaaggcacaagacttacacaggaatgtgtatggtagcagatggtggcaccgtggtggtggtggtgggggttcccatcctagtctcacaagcactataaaaaaaatgaatgctccaatttcttattggtcaccctttcccacaggcttcagccaccacattccctattcctctgtttcctgagagctccctgtaccagaactcctccacgctcccaaaagaaaactcaatatccttccccttaaagatgcagagcattttatctcttcattcacacctttgcagcctacattcgcgtgttcagaactcattaatgcactttgcagtcatctacttctgagctcccctcttagcactgcaggaaacctggcagaggtattgtcatgtcctctttatttcatttctagtcactgggagtgaactggcaatttagctccccactgggataaaatacaaattattcccttcttcctcgaaactccctcttaaaaggcagaaaaaagtagtttgtgttctatgtaatgattttttaaccttgatctgtttgtatgaggaaaacatattttactttaaatccagatggcagtgtatattctgcctcatacataatctcaaaatatctaaactgaaaaaaaaatctggagaagagactgagtgggctcatttattcattgggctcagcttatctgtttgtttgctttctctagctattcccatctaaatatgtttgtgttgatataaaaatcatattttttagtttaaattctagtgtggtagagcagaaagaacaccagacacttgaaaccacttcatattcttttttggaattatttggggtacaaattatgattaatcaagtcagaatacatgggctgtagaccaagctcaatcccttataactctgcagtcctgagctggccactgaacaggccagaactatcatgctgggaaattatatcaatcagctttacctagcccagagtttctcagccttggcactattgctatgtgggaacagataattctttgtttggtggggacagttggctgtgcattgcaagatgtttagcagcattcctggcctctacccactaaatgccggtcacatcttcactctccactgtgacaaccaaaaatatctccagacatggccaaatttcccctgggggtggggagcaaaatcacccctgttcataatcactgactttgtcctagtgtgtatgtggtcgtgcaacactagtcagcaaacgtgggttttgggttgattccaaacttggattgattccaatttaataaaaaaaatctgttagccttgtatgcaccttgtaccaaacgttggtatgtggcaccattgtacgcctgaagtcttcctgactataatctaaaaccaaagcagtgcttttcaacctctcaggtacataccagtcatctggggatcttgatagtaatgcagacactaattcagtaggtttggggttgggcatgagagtctccatttctagcaagttctcatgtgatgctgctggttcaagggtcacagttggagtagacagggtctaaaggatgattcagtccttcattgtatcaaagctttctctgcacactgtcacagtaaggctctggttgatccaccaggacccttgggagtcatggtttgacttagtctcctcttttctttgtctgccacaggctgttgctgcgaatcccactctactycttcagtatggtgctagtggataagcatggcatggacaaagagcgctatgtctccctggtgatgcctgtggccctgttcaacctgattgacacttttcccttgagaaaagaagagatggtcctacaagccgaaatgagccagacctgtaacacctgacatgatggttcctctcttggcaattcctcttcattgtctacatagtgacatgcacacgggaaagccttaaaaatatccttgatgtacagattttatttgtaattttaaaagtctattttattatgagctttctttgcacttaaaaattagcatgctgctttttgtacttggaagtgtttcaaaaaattatatgaccatatttactctttctaactttctttactccatcatggctgsttgattttgtagagaaattagaacccataaccatacacaggctatcaacatgttattcaatgtgacacctaactcttttctattttgttttttaagtaagacttttattaataaaacaaaatgttttggagcaaatttagtagaactcactttgtttgtcaagcaccagccatacttgttcagtgtggtcagtggttttaggattgtgattcttagtggtgttttaagaatggaaaaaatttaattagtctttttaggagctctgctgagctgggagagagctgagctgtcaggtgttcaagtagccaattaaagccacaagctgaaaatgaaagagttaagccttcagtcacagtctaaaaccagaggaagcatcaacttcactcttccattttcccctgtgggacagcacgctggtcaagattcaagtggagcagcacagacgtggggtcatctttatattgagggagtcccgaacaaaaggctctggcagttttacggaccctggagtcatgtggtggggtaggagtggaaaagtcctgggcactgaggcagagtgaaggaaagtatcttcaaattttttcccttttccttaccccataagatctcagcagaggaacctgaagacctcttgcccaaggcctcagataaagggcctagaaatgaaggcacagggctaggaatgtaaatatgtgaaagagcatgattggccagggggtctgagtctttgactgcaacaccccacagagactgccatacgctggctgtgcaccaagtctggtgtgtggagggcagctttcccagtgaagcctgccaggtaaagtcttcgtcatcgcctatgatcaggcctgaaaaatcacacattggtttttaaccagtagccagactcctcaattctcccatgcaaatcttgaaatttttcctccatttttagaatatcagtttggttcacaatctattcctaaataaaatgactaagtgaatgatgtttcccactggtttcccactgaaaatcttgcagaacttttctgtgcaccttttggaccttatagaaacaatagataaattctaacatacagagatttaacacagaaagcagatttaacatttttttttaatattaggcagggcgattgctgaactgccaataggtttacactctatttacaaacatgattttgttcacagagcatactagaagccagtttttgacttctgtcttcttcagatgtatcagaaaggtcaatggcatggctcatagaggaatgtcaaatagtgaccaactggaaaccatgaaaagttcaataggggtgggaagagggtgaaggataaaagactacaaattgggttcagtgtacactgctcaggtgatgggtgcaccaaaatctcacaaatcaccaccaaagaacttactcatgtaaccaaatagccacctgttctccaaaaacttatggaaataaaagaaaaaaggaaaagttcaggagatcatttgttacaattaagcaagcatatatctgcctctacctttgttaaagctctcttgctttgacaagtcagcctgtgccctttgccccataccctgaaaggttcaaaccttgaagatgagctgacatttaaggaactacttggattccttcaaaccaatttacctgatgacttggaatattgcaagcacttttcccaacaagatcaacagactatttgaagatcaatgaatccactatggtattttaaaagtaaataccctgcatcaaaatttggggacatttctaaagattaattaatagcctctctctagagaaccggtttcccactggaaatcttgcagaacttttctatgtaccttttggacctaataaaaacaaacaaacaaaaaaaaaaaaacagttcctaattctgcttgcttacaatttggtactgcagaacttctacacatgtatgcaggttgtagtatacacacacacacacacacacacacacatatatatacatatatatgtgtatatatatgtgtgtgtgtatatatatatatgtatatatatatgtgtgtatgtatatatatatatgtatatatatccagatatagttgttgtctgtgggaggttagtccaatagaaaccattattagaaatctagtagtgaaggatgaactagaaggtggaagagtccagtccattcacagagaactgcagatttacctctacaaactctcaactcttgagcttagatcattggagtgagcagtgaaggagaggaaaggcagtgcacattgaagcaaggattaatgctcaggatgttgatacctatactattcctgcagtaaaaattaccccaaaaatcagtgtcttaaaacaacaaacatattatctctcacaatttctgtgggtcagggatttgggagcaacttagctggccaattctggcttggagtctctcttgagattgctgtcatatcttggctgggactgcagtcaaaggattgactggggctggagaatccgcttccacagtggctcactcacatgactggcaagttggtgctgatggttggaagagatctctatttgtctccacatggatttctccacagagtgttgcatgaatgttctcataacatggtagttggcttcctctggtagaagtgatccaagaaagggcaaagtggaagaggcaatatcttttatgacatagtctcaaaaggcacacactgttacttccacagtatcctgttggtccaacagatcagccctattcaatggggaagaggacaacacaataggatggatactaagaggtaaagatcactggggcctattttgaaggctagcttctgccagttcccatagctgctgacaacttcttaactggggacatggcaatttatttatttattggcataaatttagagggtacaagtgcaattttgtgacatggatatgttgcatagtggtgaagtctaggcttttggtatcattatcacccaaatagtgtacacattatacccattaagtaatttctcatttctcatccccacccacccttacccttctgaaactctattattactccacactctatgtccatgtgtacacattatttagcttccacttataagtgagaacatatagtatttgactttcagtttctgagttagtttacttaatggcctccagttccatccatgttgttgcaaaggacatgatttcattctttttgttatggctgagtagtattccattgtgtgtgtgtgtgtgtgtgtgtgtgtatcacattttctctatccaatcatctcttgatgcacacttagattgattccatagctttgctcttgtgaatagtgcagctgtaaacatacaagtgcaagtgtctttttgtataatgatttcttttcctttgggtatatacacaggggtgggattgctggatcaaatggtagttctatttttagttctttgagaaatctctatattgttttccatacaggttggattaatttacaattccaccaacaatgtataaggattcccttctctccacatcctcgccaacatcttttatttttttgacgttttaataatgagggacatggcttctttatggtagaaaacatggagtagttctagaataaacaaatataattgtggcttcccaaattggtaggaaaattcccaattttacaacttcttagcagttcccttggcagtcccaggtggtttagggacttttttatggaaggtcagcataaagtctatttttttaaccttccactctagataagaacaatatcctttctctttgaactagcttgcgttgactctattctctgtaattaagtccttaatgatacagacagtaaaattaaaagcgtagtcttgaaacactggatttcttggacttctcttccttgcaattccacagttaacagtgatatcaagcatctcttgaagacatatcttataagccatgataaaatcattcagtacaattgaccatttttcttcagcaatgcttagtcacacaggttgaggaagagagaaggcatactgaaagactaatctgggggtagatggttgtgacaaaggtatggtggcaggacaaggggagggagttggttgtagtattgagaaaatggattgtgtgattacacacaaggacaagagttagtccaaaaagaaactcgggaggctgaggcaggagaatggcgtgaacccgggaggtggagcttgcagtgagccaagatcgcggcactgcactccagcctgggcgacagagcgagactccatctcaaaaacaaaaacaaaaaacagtagtggcactgacctattcaaagaatatagggaaaggctaatgatcctaatgtggtttaagagtgaatataatcagtataaagatatgagagatttggaagagatgaagaaaatatcattgaaattgtgatgttaggaagttgaataaattatccaaatgggtgatgtggatactggcaggagttaaggcaaaggagatgagtgagagtcaaattccaaggatatatagagtggaggagataactgtgtatagataggtgactgtaaggagagcatgatggaaagtgatatggtagatggcaggattctcagagaaggtcttttgctcagattaggaaagaatgatcaattaagaaggagctgtggggaattgagcagatgttgacattacctctcaaccaagtgatattaaagtatgaaagagcaacctgctgtaagaaaagcgacaaagaggaaaacaagaatttactcaagaatattttgaaaagatactaaagctataggaaggtgctatggtttggatatatgactcctctaagtctcatgttgaaatttgattcccagtgttgaaagtggggtctaatgcgagatgtttgggtcatagggacacatccctcctgaatggcttggtgccatcctggcagtaaggagtgagttgttcctctgttagttcctgtgagaattctcctgagaactggtcatcaaaaagagcctccaactgcactcccctctcccttgtttcctgtcttgccatgtgttctctgtacataccaggtccccttcaccttcctccacaagtggaagcagtatgaggccctcatcagaagcagatgctggctctatgcttcttgtacagcctgcagaaccatgaaccaagtaaacgtaaacctcttttctttataaattacccagcctcagctattcctttatagcaacacaagtggactaaggcaaaaggtcactttactatgaaatgtgtgtgtgtgtgtgtgtgtgtgtgtgtgtgtgtgtgtgtgtgtgtacggcaatagtccagaggcatcaaagtctggaagagagttgggcaaggggacactcagagcagtatgagaatgagacaacaacaagaccagtgagggagacagctcatgcctgtaactggaggattatagacatcagagacatggatgaacttgataggctttgaggtttccattttcagaggacaatgttttagtgccagaactgacattccttgtgattcctgtgtaacctatcttagacaaccgagacaggaagagtcaggtccagccccctaccatgaccagaactgaccttatggtggaggctgggcctggttcttcctgccttgaggtatctagcacaggttacacaggaatcatcatcaactccacaaggagacaggacttcctagagagtatttggctctacgtgtgggcagggaaattcaaaaagagcctgctgctgttgtcaaaaggcaagaatattttcagaggtaaccgaggtaatatttttaaaaatattctttcatcttttgatggactcttagtttgattccttatcttggctattgtgaataatgccacaataaacatgggagtgcagatatgtcttcaacacactgattttattagattgtaagacaattggccaggtgtggtggctcacacctgtaatcacagcactttcggaggtcaaggtgagaggattgcttgagcccaggaaatcaagaccagcctgggccaacatagcaggactctgtctctataaaaaatgtttacaaattatctgggtgtggaggcatacacctgtggtcccagatacttggaaggc

SEQ ID NO: 5638 - DNA, 43436 bp, Homo sapiens
tgttgggtttcctaaactctgctttcacctttgtccacattcactttgttaaacattcatccaataatccagtttaagcctgttgcatgcttcctgccaggacctggaccaataaagtaggaattcaacaagctaaggggatgccatgacatgaagtccagaatggttgagcataaagtgagctgaatatgggagacgtaaatgaaaaggagcttgaggccagatcctggaaggacacaaatgccatgtcaggatgtctagattttatctgtacctgtgtccagtgggaaacactggcagtttctgaatgggaaagtagactgaattaaagtccatccctcacttttggagaggtaattttgccataagaatgtaaaatgtattcaggggtaaaggatacccatggaggtggaagaatgagttagaagacaaaaatatgcatatactctaactcagaaaattcatttctgggtatttctcacacataattaaaaacatgcacaaagatttaattgcaatgacagtcaccgaagtaccttttcaaaaattaaaaattatgaacaacccaaattttcactaacaagaaaataaatatttagcctttcaaaccaatgccgtagatgtggatttgttgacttggtaaaatttagtattatatggctgaatgaaaatagagcctaatataaatggccaataattccagtatatatatttgtttatgtggaaaaagcttaaatggatatatatttaattagtaataagcacattttttaatgagcatgtataatttgtgtaaacaaaagaaacattttgtaattgtcaaggttagaccttttgagggccttgattagcatgaaaacagtaggaactatgcaagtagataaaggatgtgagtgactgaatcacagtgccaactgagagaaacttgggagtttggatttagcacaatgcttcctatatcttgattaaggtgagtaagggtgttatcaatgactggggtaaggaaaaatgccctggagaccaacttggcaggccagatggtagaatccagttactgaatgcacacaaacaaacccattgtgacatccacagttctcaagtccttaagtgaaccacgtccacaaaagatatcaaggcattgccaatgaggaatgaaggcttagcctggcattggataataagtttttgaattggctaaaatatcaaataaaagataaattttttctacttcaaaaacttagcggcatagttatcatcattggactattggatctcaaattctattcttagatcgtgatattctaccttctcacttctgtcactctgtcttgtggtaggttcttccaacccacacaaaccaccagtatcttccaggtcttcctagttattcacatacctattcatatatgtatgaattgtctttctcatatgtatatttatgtgagatatggcaagatttctcttcaaacagcctgctcatcttcttattctctaattctaaattaccacccctctttcttctccttttcttctttctgattttactatatgcccaggcatgccacagccccagctcacatttatttccttatttgggaatggactggcgggcgctctagtcctctgtagatgaccccttcctcctcttccctctctcccatcataagcccaccttatctaagaaagtttaaatatttagccaatcgagtctagtttagattgtgcagtctgactccagccgatggggaaaggacacaggggcaggagtcatcttaggaataaaagcttctactctcctttgttcggtgtgctctcgtggcaatcagccctacgagaagcacccttctgcaccgaagtaaatttgctttgctaaaaaatcctttgtttgctcacttttctttaagactccgagttttatttctaacaatttacatatctctagatgcatatatatctatatacatactaataggtaacatctatgaagtgctcactctgcttgtcaaacactgttccaagcactttacatgcattattccttatcatcctcactacaacccagtgatgtagttgcaggtattatttccattttacagattaggaaactgaggggttagaaggctacataatttgcccaagaccgtagaaggagtacaggtagaggtggattccaggctttgtctgactctgctctcttaataaccacaatcacatcttaataaagcatctagaaggtatgtaccaaattgttaaataattaccaaatgaagttggggttacagggcaacctgaacttcctatttttttctgttttgtttagatgtctagcaatatcaatattacatcttaactggaaaaatgttttcaaattaccatcgattatgtcattttcttatgacataattgatcatgttgtgatgtactactattgccatgtgctagactttgtactggatgcaagaataaaaatgatgtggttcctgtcctcaaggtgctcactgtccaaactctattacattatccagaggacttttttagtaaccccagccctcctttcattcttatcttctggtttgtcctatccatatgcctaatgctcttgacatgatggagaacttgacattcctaagatgtattattcacttctaggcccctgagcctttgctcatgaatttccatattctgtagaatgagtaggagttcatctggaagaactcctactcatgcttgaaagctactgccatggtgaagtcttttcacaaagttctaatcttgaaaagttttaaatatgtatttcatacaatcatgagcatagttcaaataagtagcactgaagtacaaaaaagaaaagcaagagtccccacctcagcccaccccaaccccaacgtcaacctcagtctcaatctcattgccattctccaaattcttaatggtttctgcttttagatttctggtggtgatctccatgtttccaaaataacatgctatcttattatttcctggtatatcatcttaggccctatgtacctaatttttcctaagagaaatgaagatttaactcacatacacactggtcttacctcctccctgacctcctaatagagatacgtctctatattcagccctgcattgctctctcctctgtacacccagaccatttcgtcctgtcaactacagacagtatcttttgactgtcacttcctaaaatgagaaccttagtaccccacccttctctccaccttactcctgctcctacccctttttacctattgacgtttaccctgtgcattaaaaaaattaatcatatttacattatcttttagagtcatagttattctttgacttgcctataaggtgaatctaaaagcagaaaaccaatatgcagcatttctgcgactatgtgaatattgttccctgtaatctagtggagggcttgactatgcttcctgctctgggtcatttggagaacattcagatttcagatttaaatgggatctcctgtttgagacaccactaatagctcaaaatcaatccattttaggtacatcacacttgcgtcaggcctttcctggacattttctcccttgaagatcctagttttaatttcaactttatattttagatggaaataatttaaccataattttttttctttgcattctgtcaccttctaacaacctcgagggcttccaagttcctagtcatgctttcaattgtattgaaccctatttttccctccagacttcctactgcaatcaggatgggttgcttcctagcctccacactgctgccattctgggacctctcctgcttatctcggttggagccacttttctttgggtcccagacagtgaggtgtccttgactcccacatctttctcaggataattaaataactcaccttgctgaactcccacagtcctctgtatttgcctaatagggtagcactttttgttgttatttccttatcctccagggaaggactgtgtcttattcatccttgaaatggtacctgacatacagctggccctcacctcagtaaacactattcaaatttaaaaaaaaacgttgagcgcatggcaaggcacagtggctcacacctgtaaccctggcactttgagaggctgaggcaggaagatcgcttgagcctaggagttcaagaccaacctgggcaacatagtgagacactgtctctacaaaaaataaaaataaaaaatttagccaggtgtggtgatatgtgtctgtgatcctagctacttgggaagctgaggtaggaggattgcttgagcctgggaggtaaaggcggcagtgagctgtgatcatgccactgcacttcagcctgagtgacagagtgagaccatatctccagaaaagaaaaaaaaaagaaagaaagaaaagaaaagaaaaagaaattgagcacattattacaatttaatatcttgattgaagggaagaggtgagacatcagtttcattcatattaaagaggaaataggtactgttatgtcaatgggaaatgagaggaggaattaaatgtaggaaacagaataacaaagaaccaactcataaaaaactaaaacaacccatatcagacacaccttataatctgtatgtctgtgttgacttatcctcttggaatgtgaggaatattctttattaattttacttactgggttgccagatataatacaggaagcccagttaaatctgaatttcagataaacaacaaataactttttagtatatgtcccaaatattgcatggggcatatttatactaaaaaactatttattgtttatctgacattcaaatttcaccagatgttctgcatttttatttgctaaatctgggcactcttcactgggcatcttctcagggcactaacctgccaaatgccaactgctgtggggctgctcagagaatatgacctaatgacaatgggagatgacatgttgctggcaatgagagaagtgaataaaatgttgcatacttgttttcaggagctgttctcaaagcttaccacctttttagtgtgggattaggtcttcaacttcaactttgtcttcacctttgtcttaaggtcaaaagaagacgttagagatgtctttggtagggcataatgtatccttttagattgatatttgtgggccatttgttttacagggggttagtccaggaagtacaagacaatgtcattaggcggatagagttccatttaaattaaaaataaaatctattgttaggtttaaatgagtcactgcttcattaagctatcaatattagataacacatattgaatgaatgtttcccataggccaagctctgtcccaagcatttcacatgtatttgcatttcgtgctcacaaactgcctctgactgactgattttgattttcttgattttatggatgaggagaccgagaagcagagatgatgaacttccccaaggtcacaccactcataagtgggagaaacaagctaaaattcaggccatcttactgcagaatactcaaaatcaaaataagcaaaatttcatctccagttctggcacctcaccaaaaaccaaaacacgatttaaaaatataaaattttaataacaccacacataaatttcaaactactttccctaagtttctagctgaagttttaaatgagtgtgtttttaatttattagaaagtggattgaagagaaaacattggaagatgaaggaaggcgtttcagttaaaccccaaataactctgtgttacactgagctatgaaacggctccttctagctccatttctcctcagacctaagtgctattcctgattgtccttcattgtcatttccagggagaaatgacaccagcacagtggcaggccttccaatctggagcacggtccacacaacttccgaattggtgttcagtgtaaagtgtaccggagtgcggaaaatgcgcagggcattgccaactatagatgctcggagtaattcagtgtattcagagaacacggtgaaacaaggaaaaccggcctgactggggggtgaattcagcagggagtaaatctgatcggcatcaggtctgcggaaaggagctggtgagcacgacaccacccaggcattgcctggctctctccgcggcgggctaagttaaccgcgggtccaggtgcgggccatggtcttggggagggtgctgggtgcgctcgagcaggctagcgtcgggagccgccgctgctagtgagaggccggggccacacacgctcctccccggtacctcctccagcwtcaccaggggaggagagggtcggggccacaaggccgcgctaggcggacccaggacacagcccgcgcgcagcccacccgcccgccgcctgccagagctgctcggcccgcagccagggggacagcggctggtcggaggctcgcagtgctgtcggcgagaagcagtcgggtttggagcgcttgggtcgcgttggtgcgcggtggaacgcgcccagggaccccagttcccgcgagcagctccgcgccgcgcctgagtgaggaggggccccgggggcgaggcgggagtgggaggaagggcacggtcgccgcgctggaggtcgggaccccggagcggcgaccggccggggtgggctcgctgagtcgcacccgctctgctggccggtcctgggctcacagtccctgcagccctcggaaacagcgctaggatccttgcggggagagggagaggatgacggtattagacaccagttcttccaaaccttttcccgaaaggaagcaaccctaagagctcagagctggggggagaatcaggacaggcagggaacacatggagttttcttttcttttttytctctctctctctctttctttcgttccttctttctttcttttgaggcggagtctcattttgtcgccaggctggagtgcagaggcgcgatctcgactcactgcaacctctgtctcccgggttcaagcaattctcctgcctcaacttcccgagtagctgggactgctggcgtgccgtatcacgctcggctaatttttttgaatttttagtagagacggggtttcgctgtgttcgccacaatggtctcgatctccygacctcgtgattcgcccgcctccgcctcccaaaatgctgggattacaggcakgagccaccgcgcccgccccggagttttcttatctgtagatctcctacagggacaatctctctctccgtctctctctctctctctctctctctctctctctctctcwcacacacacacacacacaccactacacacctctcactctgcctcctctctctctctccctccgctctctctctcacacacccttctccctctctccctctctctcactctccctttgaggagtattgcgtttttggagcccagttatgcgtggctgctgtaagaacaaaacaaagcactctttgtcctacctggagcatccccctgccggccagataagatcacagctgtgtcaccaagtcaagggagaggctcatttttaaaaaattaagcaaaatcagaaaacagagaacactgtcttcctcatcatctcctggagcttgtaagagaaatttctgtcaccaaaaacgaaaagttcgggcttttattcatgcctgtggttcttgggattactgcagtggtgatgaggaaggagaggtgcgtatrgctcataaatggcagcttgccacctttaaaaggcacacggattcagatttgggatgtgttaacaaatcaggcttgcacaaattacttttgatccaaatgagaatgctgagctgggagactggtatatgggtaggagctggaaaatgtatcccctgaggtgttggcaatcccaagaggctcagcacgaaaccttgagcttacattgaattcagagatctgagcattaagcactggcctgatcaagaagaagcagatggccttctggtcacgaggcactggtgagcctccatcacccaggcagattccctcacagaggaattctgctggccctgcagaaagtggtgagacagcgcaccaccttggcattttccagcaggcctacttcagctccttgcacttgggcactgaaagtgctttcccctccccagatatttgtgcaccagaagctgctgctggccatgtggtgatgtctcaatgtctttcttcattgaactgggcccttcatacccaaggctggcaccatagtctgtgactgcctactgtacagccagcaagactgaaggagttgcagcattaggagtgttgtgaatctggttcagccactcattttacagttgagaaatcccttctgaggtgtggaagggcttgcttagcaccgcaggacttttccctcagacagaacctgggacagctgggtcctcatttcctctccattgtgtctctgtcccctttgcacttttgttgtgaggaacatacatgggcctaaacacattccctcactctcacctttgcacatgaatatgacttaccacactctttgaagctctgtcagcacagaacattaagaaaagtgctaactgggtacctgagcagctggagtgggagcccctgggaaagtcagtttaggagtcccctttatcttccttttcctgatacccaagaagatggctatttcctggaaaggaaggtggatattggattatttacactctgattcctcttaagcctaattttttttcaagattcrtgataataagcctgactgacgtctcaagatgttgagaaatttccataaaataaaagcattgaagagaaagtactgagtgaagggaaattgaagagaaacattcagttctaaaattgtattgtttcagaatatgattctgggttcttactgactttcttcatgacgccagccacctgttagacacattatgtgccctcactgtcattttgctcaattttatgggcgtgactcaacactaacagaaacaggctaatacatacaaacatgtaggtttttggtttttaaagaaacttagcagttgaggagaaataaaaagtctattgtaagagtagatgctcattgaattaagtgggctagttgattcctagtagaacttgtattcattcattcattcacttcaaaaaatatttattgatcagatcctaagtgccaggtactgagtacagcacagttagtaagatagatatgctctctgctctcacagtgctcacattctagaattgagggatgaacagggtgaattcatataatgagaagaaaagcaagcagattgctgcagtatagtggtgtgtgtgtgtgtgtgtgtgtgtgtgtgtatgtgtgtgttggatatatgggaggggcctagcttcttggattggattgtgaggagagacttctctgcaagaaggcctggagatgaaacctcaggaagatgggcagacgtccctgcagagggaaccacaagcacaaatgtcctgctcctgggaacaggtgtgatgtgttggaggcacagttggaatgccagtgtggctggagttaggtgagggagaaggagagttggaggagtgagctttaggggcaggagccaggtcaggaagaccctcataggccaagggaaacatttggattttactctttacaatgagagaagccaaaagagagtttgaagcagagatgtgacataattgatttactttataragagatgactctgggtgctatgtggagaatggattacaggggaaggagaggggacagaagaaggccagaagcgagtttactgatggggggtggtagcagtagatgggcgtaggctattttttggagttacagtgggaagttaatgtttctctgtctcgaatttcccatctacaaaatgggaatgagattgctatacctggtccacttgtaaaaactaataaacaaatgaatatgccctgaagcataatgtaagacattattaccattattatttgctcatattgtattactttgaattccctgtgctttatcttaaaatttattttaataaatttgatgtcttattatattattttcagtaaacctaatttattatacataaaagtatctttctctgttcggagaactggaaactcttaactaagagttaccaataaaaacaagtcrtcacaaaatgcagggaaattattgctaaaataatagctggcttaatttcaaaagttgaatatggtcagataaaaattcaaaaatagaataattaaagctgggaatgggaaaaaaatattttggacagatttgcctttgtcctggctgtggtcatgcagatatctgtgagtgcaaagatttgtagataactgaaaatatctatatggcagcagaatttctggagaagtctgtggaccagagttgggtagggttgtttcccttagtgaagcattctctctcagaggaagctcttgaattttctctcgtttatcactaagttttagagtgtcaggaagttttaaagttgtttaccaactaggatagtgacgttcttcgcagagacaggacaagtaactgccacaataaggcaactctatttctctttcctgactcactctgatgtgcaagttactagaaggagatatgcctgcttagaggaaaaaaagctcttcctcatttgtattgtgggcagcagaaatgtcagctcgtgacttaatagtccctaggtcatgttaacttgccagatccccttaattatttattggtcagtgtgtctgaatttcagcttgaagtggctagtctggtgattcaaattgcagacaaaatgtgatagtaattctgggatctgtatgatttatctcttgccatatcaaccaccatatttttcttagggctggagagtgggggtgtttgggtatcttaaagggagaggttacatctctccttgaagccagaaatctatttgtttcactcacgttttgaaaggttgaattagttgctcctttaaaaatcagtggatattacatacaaatgtaattttccagtttttcttggaagcaatcagatgatctagtgacatggagctgccattcctacatggaagcaattaactggaatagagtggtagttgccttctttggatggtccagtttgcaccatccaaatagaataaggacagttcacgccagtccttattctattgcatgaacctgtttgattcatttaaattacctgtctggcccttgtagacttttgatttttaacttcaggtttagggcaatcaagtgtaacctgtctgttatactttcaccttcatgtaatgcaggaatctatattccagtatccctgctggtagtccccaaacctgtactttaactgctcctctgataaagaagataatgctaattgttgaaaagctactgttgatggagctgtacagtctgggcctacatagaacatgtttaggaactttgcacaggactgtggctgtcacatgcaacctaggttttccacattaaaagtaaacattcctcattccttcaacagctcctcatgtgacttgctgccttgttccctcatcattctggttatttttgggttactgtcccttgtcctgaacctttatttgttaaaatccttaaatccccaccaattcaataagatgtggtctaactggtgcagaatgcagtgggagggtggcctccctttctctatgatgtcatacttttgtcatgcaactgaagatgtctttagatttttcctggcctatccattgtgtttttaaatttactttcagggcttattttccagttagattgttcctgagagtttacaggagaactgctcaatgtacagcttgagagcaatggttttcagctgaggatgatttatgcccccactccaggggacatctggcaatgtctggagacgtaatatttagttgccacaactggggtgtgctattggcatctagtgggtagaggccagggatgttgctaaacaccctgcaatgcacaggacagcccccacagccaagacttatcagcccctagtgtcagcagtgctgagcttaagaattcctactttagggtcmgggtctaggttcagatcctggtttagctacttcctatccttgtgaacttgggcacgttatttaacctctttgtcttcattatctcaactgtatgtcaaagaactctgaggactaaatgagttcatttatatgaaatgcttagaagggtaactgtatgtacaaacactatcttatttttctaccatattttattcattttggtgtgtacatatgacatcagataagtgggtgggtaaagtttgagggatagcacttcatttctaatcttgcctatgggatgggcactagtgcatttggatgttttagggagctaacagcttttctcagaaatgccttctctctatggtccccattatcatttttccggcttcttttagtattttcctccatattggggcatatatgtcagtttaatactgcatcctcctggagaatatggacactgagttcctttagcgggagagcatctgtgcctgttgcttgtacatcccatttccggtgtgccccaggctcctccacaccccagtcaccgtggcttgcacctgcacaacagattcctggggctgtgtagcaattggtagactttggataataataatagcatttctccaagggctcacatccccataagaaccccattatcagggttcctctttgacagatgaggagagaaaagcagaaagtaggtaagaacttaactgaagtcaccaaactagtaagtagcagattcaagattcaaaccttggcagccagaaactggagctaaatttctaaaccactttattaytctgatacaggtaagttttctcaagaagtatacccatgaccttaacctaaccatcatgtagccatttatgcatacaacactcaacmgatccagttactcttactcttactattgtgagtaatatagttgggggactgagtctgagagtaagatcaggaacttacagtatagcagcaggctgcccattgatcttagacaacttttaccttttatgacctttaagccatatagaacaccaaacatttggacatttgcacatgggatgcagattaattcccatttccaaaattgtgagtagaatcaactaattatatgttacttgcaggttttgcatctcatgcatctgcctccctagaatgaaataaatatttcttccttattaaacaaggatagagttgccccagcattttcttagaccagggtttctcaacctcagcattattgacattttgagattcctctatgttgtagggctgtcctgtgcactacaggatgcttaacagcatccctgactgctactcactagatgccagtagcagccccctcctggttgtggcaaccaaaaatatctccagacattaataagtgtcttcttgggggscaaaaatgccttagttgagagacactgctgtagagtgatgttctagctgcattctccagccttcatcctattgtaaaatayccaaagaagattttatcttcttcagcaatcatttggtgtggtaatgggtcagttttgaggtatttaagccactttctttgactttagttgaaactgaattgggctattatttgctttttgtctcattcagttactttatatgctccatattagttttctattgctgctgtaaaaattttctacaaatttagtcacttaaagcaacataatttattatctcatggttctgaaagtcagaagtctgacatggccttactaggctaaaataacaggttcagtgaaccttcagaggtcagctagtctgtgttgctttcctgaggctctagagagaatctgtctccttacctttccaagattctagaggccatccacatgttatagctcatgcccgcttccttcattttcaaaaccagccatggtgggttgagttctcacatcacatcattcagatctcttcttctgccatcctcttatacttttaaggactcttgtgattacattgggtcagataatccatgataatctccctattttaaggtcaactgattaacattaattccatttgcatcttaattcttttttgccatggaacattacatattcacatgttctggggtttagaatatggacatttgggtgggagtgcattattcaacctgccacatgcccccattccaaaggtcaatcaggaagaatttggaaagagagtactgatacttaacaaatgagcattttcttttctgactctttactaataacacaagagctaaggcccacctgccctaatctcttgccaggactgggttttacttggatggtttatctgtcagcttttcacagagatttcaaactcgagattggacattttatctattgttttgggttgtcttttgtttcgaaaagggaaatgatgcctgatgagaatttaacagtgacaaataggggaaatcgggatttgtggcagttatggttgtgtatggagactacaactgagatctgaagaacaggtagggcactgtggtttcagtgggagaaatgaagtctgcaggagagaggcagaaaggtagaatccgtttaaatggaatgtattatctgagtgctcattgaaagtcttcttgattgccaggatgatattttatctagtggtcaaggggccaaattgaagatagttattttcaggccttactatttgaagaaaatcattgatttttaaagtgaacattcccattgatttagaatgttggtggctcatgcctgtaatcccagcactttgagaggtagaggtgagcggatcacatgaggtcaggagttcataagcagcctggccaacatggagaaaccttgtctctactaaaaatacaaaaattagccaggcattatggtgggtgcctgtaatcccagctactcagaaggctgaggcaggagaatcacttgaacctggaaggcggaggttgcagtgagctgaggtggtgctattgcattcctaggtgacagagtgagactccatctccaaaaaaaaaaagtttgtgtttttgtattgaccagtgattggggttatggtaatagattttcatacaatatgatgatgaagacggctgtatcaagggttttagtgtagtcctgttggattctctagttctaagagaatgtctaaagttaccattaagtttttcagggtcctagttcttaaatataaatacatttctagctaactcatatcccatggttgagaaaaaggcacttatctgtgtaaagagaactttaaaagttaaaagacttcttatgaattattcctgtgtgttcatattcagaagcctctgtggtcattgtgattattacatgttaatatggttcctggctcataactcccgttgcccttgctacagtctttggttataatattggagtgctttagaccccagaagcaggtctcagaaagcagaatctttctctctgaccttttcctgccttcctttcacctgcccaaggcaggactctaatctgattgtaggttataagacccttattcagggaagggtcctcttaccttggaaaaaggaatgctgcacagacagaccaagaagaatctgaatagacagggcttgctgggttgcccctctgagtctattagcattagagcttacccttactgtccagtcatatttctacacagctgttcatactttgttgaacctatgcataaaaatagacagtttcccctgtatctttgggtcttcattctgaaggctccttgtgaatacacattaaataaataatctgccttttacaagttgatttttcagtgacccttcagaggtccaaggggaatgccacccgtggcccccttggccccttcagtgtgcatgtattcgagcctagaaatgcctctggaaaaaaatctgttagcaagtcattatttgcgaagagataactcaatttacctttttctgttatgtttggatttttgaaatcatgtattaactttataatataaytaaatataatactgaaataagatcaaataaaatcaaccaaaattataaataatcttaaagagttgcacatatataccttttttttctgatcaaaagaaagatgttgaataaggaaatacagtccctctgcaagtagtttaagaagttttggctggacacggcggctgatgactgtaatcccagcactttgggaggccaaggtgggcagatcatgaggtcaggagatcaagaccatcctggccaacatggtgaaaccccatctctactaaaaatacaaaaattagccgggcatggaggtgggcacctatagtcccagctactcgagaggctgaggcaggagaattgcctgaacccaggaggcagaggttgcaatgagccgagatcacactactgcattccagcctgggtgacagagtaaaactctgtcaaagaaaaaaaaaaatttagagctccagcaacacatttaccagctgcctatctgggtctttctagcctgtacaataggagctgcccttacacgaaagccccatctctttgaaatctttctgtctacattcctgttgctctcagaacttgtaccatatcatctaagaattataaaatgcccctgtaatttgctttcttcctgtattatattgttaatatatgctagtcttgtctctgaaacacaattgtaaactctctgagagtagggattgtgtcaaattctctggtacttaccacagttgttgccataggagagggcatatagtatttgcttaagaaataccctttgattgaatgactgcagatctgataatcaggataggccatgctgtgctccattaaggcaataacagcttcacctggaaatttcagtggcttaacacagcaaaggtttatttcccatttgtgaaaggtcatttgaattggcaggggctcttctctgttcagtgactaggtatccaggcgtctttcacttcaagactgcactacatcagcacatgatttctaagtttgctgtgtcagggaaaggaaggcatgaaggagatacagtgactctgttgcagacgacttctgttcaaatttttgtttctcaggaattagccccatgggcccagcccaaccacaggggcggctaagaaatgtagggaagcacatagatgttcaggagcactcattgtctgtgccacacatctatattacatcttcccgcaaaatagctatactaacgagtgcttcattagtgtcagtgggacaccggatcattaaacttggctcggtttgtattagtaaccagatgtgctagatttattcactcagcaggcatttactgagtgcctctgtacaccaggcactattctaggtcttgggaatacagcagggggaaaaaccatcaaaaatccttacactcacagaactaagtttttagtggaaggtgataaacaactaacaaataacatacaaggtacgttagttggtgataaatattggagaaaaataaagtagggagggaaatagggaatgtattggtgtgaagaaggaggttagattgcaattttaaatagattgaaccgggaaagtgtcactgagaaagtatcactggagcaaaaacccggaggtgagaggaccagtcatttgggtgtcagagcaaagagcattcccataaaagggaacacattcaaagccctcaaagtggggatggaaggtgggtgtggagtacttggcatgtttggtgaatggcaaagaagcaagtgtgattgcagcaggtgtccaagaggggctaggggaaggattgggagtgtgttgagtaaaggttatgtagatcattataagctattttgggtgaatggcttctcccccgtaacatataacaccatttgggggttttgtgcagaagggtgacacaatcactctggctgctgtgttggggatagattttagggtcaagggcaaaagcagggagactcgttagaggtgatggcaaattttaggtaagagatgatggtggcttggaccttttctatcccccacaaaagttgaagggccaaattttaggggggaaaatggatgcacaaatgcaagatagtttttgctaataagatgttagcatacagactaattataatttattattaccacacatctcatattctcttgtttcatttactgattcaacaagcatctatgcaatactacttcttccaggccctctattaggcactgagacaacaaataagacctgacttctgctttttggaaacttatatcatagtaggattatagaaattagcaagaatataacatcatattaacacccaaaacaaccacagcagcagaaatatagtcactatataattaaatgatggaaatagccaaaatttatgaattatttactatgtgctagacatacctatggatattattatratgatgacagatggttgttatatttgttatattttgttggctatttttatagctgaccatactgttataaagttagaaaactagtgaccaaaaacttaatctaactgtctgaaagtattatttctctgctctacaatccaatgtaatccttagtaatgtaggtaatggtaatcctacattaccaaggattttaccattgtagtaccaatctaaaacccagcacagaaaatacatgttttattttttccaagtgttactagtacctcagcctttcttgatttgtcagcttatttaaggcctcttcattgcatacttcttttttcttttaatcatctgcttcgaaggagactaagctgaaactgctgctyagctcccaagatggtgccacccaaattgcatgtgcttttctgcctstgcggctgcctggctgtggtttatccttttgactggcaatacataaatcctgttgcccatatgaaatcatcaggtaagaggtgtatttgttcaaggtcttgagcaactgatctgtcgccatacttcaagtgggccccaagaagttgcacatctgcacatctaaacaagtcctatttaaaggcttatggagatcctgtattctcctggagtaggggagaggttctcactttttcctcatttcaactgaaattgaagaagcacttgtgttcttcagtatcaggactgcaggacagaaccaggatgggacattttaagatatactggacgctcagcttgcaatcaccacggagaacctccttaatgccaccccttctctctctgactgccctaacgcatgcccacacaagcatagtaatgcaactggtctggagtccactccaagacagcctcaaaacctgcttccatgaggtgaaaaagaagcaggtgtcttgttcaacaggcatactcctggttaatagtggaaagtcatgtgagataacaatttcagktcttgggatccaaaaggaaacaatctttcctacctgataatagagagaagtagggacaagtaggtgctagggagttccagatgagaatggatgtgatcactcattctttcttgccttgtggtaagtggggaaagaaagaggtggaaggcatagactaacccaggaggagtggccaaaacgggacagccatctttagacggctacatttaatgtcactaagagagaccttaattggaaaaagattgtttctggagctttgcaaattcctgctcatcccagagggttgtgatgcataaacttctctttccagtctcctatggagagcagtgtaggtggcttctgaatggtgtcatactgactatacctacagagctgtgcacctggatagttgtgggtcactctggatctaattgttcaagcttgatgggtgactccttacgatagcatttgcaaaagagctttcataattcagtaccttaaattttgccctactacataagcaggaaaatgaatgcrttaggagaggttttatatcttatatctacatttgcataggaaatagaataatatctcacaggtccattcatcctataacgcatcaggaagttaagtcatcaaggatacactggtgactaagacaataaatgtgtagtcaaattcaagggtcctgcatcctagatgacattaagttcatttttcctactacctttttcatggattgagaacaggtaatatcttagatggtgggaaaatcatcattcgggaaacatttatatccttcacttttaattggtacagggtaaaaatttaaacatttttaaaatccctttgtctttaaaaataattggaaggctgttgctggactgacagaaacttgaggacagggacgttgctttatctttatagtcccagcattgagcccaatgcaatgcccattctaaatgttcaaaaatgaatgcaggccgggcatggtggctcgtgcctgtaatctgagcactttgggaggccgaggtgggtggatcacttgaggtcaggagttcgagaccagcctggccaacatggtgaaaccccgtctatattaaaaaaaaaaatacataaaattagctgggtgtggtggtgcacacctgtagtcctagctacttgggagactgaggcaggagaattgcttgaacccagaagaaggaggttgcagtaagctgagattgcaccactgcactccagcctgggctacagagcgagactctgtctcaaaacaaacaaaaaaagaatgcatatatattggtttaaagtattagaaacagtttattaaataagaytaaaataataggtgattctttataatttcttactaaatgaatacacagaaaatatggctatgcaggttaaaaggtttgtaggaatgggctagagatatcctctttactaatggaggacataaagccatataagagtgtaattgtcctagcatgtatacagttcatctccaaacccaagactgaacatcaggaatatttgacaaatgaaaaccaccaaaaatatgtaataaaattaatagcatgccataggttccaatcctcctattaaaataaagttgaagaaaactaagaagagacatttataaattctgaaccacaaaactgtgtgagtggtcatttgatctgatgagtctcctccttccacttccttaatgatgactcctgacagatggttagagaatgggaaatccaggcccataaccgggtcagctgtaggctatggagcctgttccacagccacccccaggcaccctggcactggtgcataggaccccatagacctataccaaaacctggatcagcctgatgattcctgaggtcttctcagaggtcaggtgtcctggaacaggcagacctcaccttgacctgaatgctcctgaatgctgagtgaggaaacttcccagggagaacaggtgttggacaaccagggcactcctaacttattggaaaatgttcccctgtcctttggaattgagatctcacaagcggaggcttgtgttgggtgaaaccctcccatgcctccagaactgagcctccaattctagaggtagtgtctccaacagcagctgtggccctggrgctccttagcgagttgtgtgagccagaggtctccctgcagcaagccctgcacaggcacaccatgcctgcctaggggtggggttgcagtagcaccaggctgcttaccacagaagaagaagcaggtgtccctaccttaaggwcctcctccttgggacttcacatctccctgttacaccagaagcatggctcagtagatactcttttaatggaagaagagccttttgtaattcaaaatagaccctgaaagttcaccttgcaggtaaagtttaaaaaaaaagtttctggggtttgaatctacctggggagaggttagacctgctaaaacttccctaaggactcagcacagatttacctagcaagagtaaatggactctggggaaggagtaaacagcattatttgtctaccccttatgtgtcatgttttgtactaagaacttgacctacattctcacctcatctttacaactgtactgtgggctggtcaagtgcttttatgtcattttacgaatgtrgatcagagaggggagcaactaggccagaggattatagcttgtaagaggtacacctgaaatctgaaatagaaccatgtccctccaattcacagggtttgttcatctccatcccctctccccttgcctttcttgaaactacctcctaccatttgaccatggattgctgacctgtgtgtcaggcaggtggtctggaacttcagcccagtgtctcttaaactttaatgggcactccttttctgattgagtggaattgtggtgaagtccaggagcctgcatttccaagctccagctggtgccagtgatgctggtccatggatcagctttgagtagctgagccttatgtattgaaaggcttcatcatgggcaggtgtttcacacatgagtcaccagtgtggaggctgtaaattggtttcttcccatgactcaaaacttttctgggcaatgttccatggtattgatgcagacgctttatctaacatagctcttgatagctggctagcagagagtaatcaactcccaccatccaatggaaggaatgggtggacaagctgaatatgtcaagaaaagtgagagtctgaatacactgatattttgtaattaaatatggatttgattgaggtttagaaaggagaacggatgaagctgctggtgtgtggaagattgcaccagagagagaaaagtagttttaggagtggatgagtaaaatactgcatgtgataaagggtttaaaggaaaacaagagagaccagtggccattcaagttaactgagcttattttcacaagtatttgttgagcattgactatgtgccagacactgtgttaagaggatgcaaagacatggatatggctctgaagaaagagcctagtgtagcatgcagacacataagtttaatatgtgacaggaagaatgattacatgtgtgtatacacacatgcacatagaatctatgtaatattgaggatgaaatgattaagtctgtctgggaaatcagggaaggtttcagagaagacaggacatctgaccaaggtattaaagtgtgaatgggagtttgctaaggggatttaagcataggcagtagcatttacaaaggtgcagtggcatcaaccagcccagtgtgttgctcaggagtactgtagcacaaggaaggggtataacttaaggggaagaagaagaggaagagtatgaggcaatgggcctccagtggagggtttctttgcagtgcccagaaacttgggatttaacttgtgcacctgtgaacctcagtatgtttcaaccccagagcactggaaggataggccacatttttgcaagtagcagagtattggcttaggaaagcatgtgtagatttaaattcctcctacaaactgccttccaaaaagattacaatacattcctccttcaaggaaagaacacttgctgatagggaggcattgaaggattttaagaattgtctggtgtgatttgtgctttaaatccctccaggagctgtgtaaaggatgcatttgaaggggtcaagatccaacgtgggtagaacagttaggagagagagcaacagtctggtcaagagacagtgagggcataaatgagacagttgagctagagggtcagcgatatattgtggagatcattctaagctaaaaactaatgttagcaatagaggtttggggctgggcgtggtggctcacgcctgtaaacccagcactttgggaggctgaggtgggcggatcacgaggtcaggagatcaagaccattctggccaacgtggtgaaaccccgtctctactaaaaatacaaaaattagctgggcatggtggcacatgcctacacctgtaatcccagctactcaggaggctgaggcaggagaatcacttgaaccagggagtcggaggttgcagtgagccaagattgcaccactgcactccagcctggcaacacggtgagactctgtctcaaaaaaaaaaaaaaaaaagaaaaaagaaagaaaatagaggctccgttgaatgtagggtggttggtgagaaagaggtaggagaataggatgattcccaggtttctggcttgtggtgcaggagatgaggagttcttgagttgcmggctgtgtggttggaaagtgagaagggagagttgaargatgatcatttagtttcattttggaaactagtttcattttgacattcttatgggaaggacatcaggtagagatgctcaaggagaagttataggcacaaatctgaaatgtgaaataaagttcatgtttaggaaaaacagatttgtgaagtcatctttaatttactctggatagaagtagaatgagagggcaaggctgcaaacattaggaggtaacagtccaaggcagcttgagagaaaggctatgtctactttcatctctttaccctccaaaacccctacacagtgtttcaaacagagcagaccctcaataattgcatatcttacttgttaggttgagaaagaaagaaggccagaaactatgggaagtaacttgattccgttggaattcttttgcataataaaatctgatatgtaatggatgacaaatgagataatatttacctgtttttcagcatgggtcaacaaaatacaagtactgatggctgctgcaagctttggccaaactaaaatcccccggggaaatgggccttattccgttggttgtacagacttaatgtttgatcacactaataaggtaatgctttgatttatacaacttatcctgatactctaatattgtctgtcgctatggaccactagaaggtgttcaaatgtgaccttgccctcacctgagaatgactcattttgcaatttgtattgtttcatatgaaggcttttactagtttggccattcctcaattctttgttattgtctgattaatttctctataaaccttatttttcacttccttaatacctgaagccaggctgcttgtattttcctttcactgagatagaatattgtttttctgtttctctttcatgactatcttcaatcaccacagcagcctaaaaagttctttagacctttttgtgaacacagaggtatttgagtccccactaattaaatatgcaaaatagctgctggaatatgtttgagacacaacttctctaaaagtgcattaatttctttcttaacagggcaccttcttgcgtttatattatccatcccaagataatgatcrccttgacaccctttggatcccaaataaagaatatttttggggtcttagcaaatttcttggaacacactggcttatgggcaacattttgaggttactctttggtaagatttctgttgatccttctttgtaggctcttgcatgtatgaaaaccttgaaaacaacaagaacttcaagtagttaagaccaaagtagatttttcttcagtccaaatagctcctaaaatgataaggaaagtatttctttaaagcccaggcaactacgacagaatcaaggttctcattttgtccattctgagttggatgggagtggccgagagtatcagactgactctgacatctttctgtggctgctctttagttttcatctgacataccatggagaaggcaataccgtggtgagaatagcaggttatttggtgtggccactatcccgcatgctctgtgctaaagttagacaaaaagagaaagaaagtagaagccatcaaactctccagatccaaaacaaaggagtcaaagctaatgcctttcttgtcatacatgaagagactctactctcattcccatcacctacccccatcgmtaagacaatctgatgtgtattcttcacttactgtctacattctgctaatatagacttttccttccttatctgtttgactagacactactgttggactgatgttaactgtgtcttcacatttacccctcaaaacgatctacaaattttgggattcatcttaaacatcggcttttaattttcttaaaaaccacttataacagacatgaaaatagcataactctgcatatttatgttgcaaaataatttataaatcacttccatagcaatcatcacattcagtctttatgactgcatctgcattttatagatgagaaaatgaaacacaaatgattgctgataataatggtgacaataaaaattgagaagtgaaagaagacaatatttccattttttgagccccttactatgtgatggattgcaccactgctttacatatattacctaattaaataaaattctcacaaaaaccctatgaaagagatatcattttctgaagtttacagaagaggaatctgaagtacagaaagtttaaggaacttgcccaagatccatagttaggaagtggcagagctgcatccatgactcagtatgaagtcagtggtttctctaccttttcctgcatgattatgaccaaatcataatgaacagagtctctgtttcttagattctggctcttagtgtaatgtatccaaggttttatgggtagtttggtttcagaacattccctttaaaatttttccaaaacctgggaatggcagtaagtagcagcctttatgaatacacctataagtgggaaaatctctcaccttaagtccagagctgtcagtaagaactcatcgttaatgatcctatggtctgaggaaagaacttacgccgggtgcggtggctcacgcctgtaatcccagcactttgggaggctgaggcaggtggatcacctgaggtcgggagttcacgaccagcctgaccaacatggagaaaccccatctctactaaaaatataaaattagccaggcgtggtggcgcatgcttgtaatctcagctaatcgggaggctgaggcaggagaatcgcttgaacccgggaggcagagtttgcagtgagccgagattgtgccattgcactccagcctgggcaacaagagcaaaactccatctcaaaaaaaaaaaaaaaacttacagttcagctctttggttggtgggtatctagtagcagtctttttaatgaatctactattcatccataaaaaagtagatataaatcagatgggtctgcattttatgctaatgagatatgaattaaattcactagcaacactcagagaaaaccttaactataaccttccattgttgtctaggttcaatgacaactcctgcaaactggaattcccctctgaggcctggtgaaaaatatccacttgttgttttttctcatggtcttggggcattcaggtaatgtttgagaggttgaacaattttggcttccaggaataaatgacaatttttttattcaagaaagaaatagcagagtttggaatgtcatgcaggcccttgtctggaggagttgggkttcctcaataattggctgtgggtctattgatcagtcctagacctgtctggtcaagtagttttttccctactatcagctcattgggattagcctcacagcagagaagaaagggtgttgcattttctatagttgtccttcattattgtaatatttacactcttaaaattatcctctgtaaagtttagaacttttgagaaaccaattttagattagctgggaaagactgttattaagagaaatatctgtgaaggcaagagaaggagcaggaaaagatggggagaacctttggaccatgacacaggttggacacctgaaaaggtgatggggaagggagaaggattggataagaagagcttcagaatgaagcatggttctaagaaatattgagccaggccaatggaaggagtgctggactatatttgcttatcaagagtcctgtatctcataggaatgggctaatgttagtacccatgctgtgccaagtctctgggagcagctcactggatgcttagcttccacttgaccatggtgatggatacagaggggcaggagctggatagggtctttagtaagctatgcagtctgtagcatgatagctgagtggcacattttcataacaacaaccaccctcttcactttcttccaccactttctcacctgtcacccctcttctacytcaagggattgtaaaactcagaaaataagagagatggcttttagctgggaagaagttgggtagcacttgcaataaagaattctcttcagcactgtaaatgtagttcagctagctatttgatttctcctacattagtgactggcaaattagaacccaagggccaaatccagcccactgcctatttctataaagttttattagaacacagccacacccattcatttttgtacactgtctatggctacttttgtcctacaacagcagagttcagtagtggtgacaaagactatggcccacaaacctggaaatatttactctctggccttcaacagaaaaagtttgctaatccctgtgctatatcattcccccctcttgaaaaggtcctgtatcttcagcaataaataaatagtttctagctacctcctttttattctctgtggacatttcctattgaatgcatggtatgaggaaaaggttgtgcaaatgaagctgtggaagagggcataaatgcagtgcttagcacatgatttttcaactatttcacccagtccaatcatttaaataatagctaacatgtgttaagtatttacctgtttctaatataagtactgaaaatgtattaattcaattgatcctcactgatgaggtagcatactattatagtgtcaccattttatagataaggaaccaaggcagcaaaaatattgtgacttattaaaggtacacagctaacaagtggtagaaccagggttcaaactcagtggtcagactgcaggtctcattcttgtaactacaatactgtactgctttcctatatacattatcttagcaaaaccttacaactaccctaaaacaaatgctttactcttaggcccattttacaggtgaggacaaaaatgcagtaattacctaaaatcatatagctgggaagtggcagagccaagattaaaaacccaaaactctcaaaggcaatatttataatcactgccctgggttttctcaactttagtagtcttgacattttggaccagataatctcttgttgtgaagggttgccctgtgcattgtaggatgcttgacagcatccctttacccactagacaccagaaataccctcgcccacattcatgataatgaaaatacctccagacattgtcaaatatcccctaaggaacaaaatcaccctcctttaagaaccgtagctctccactccaccccagggcactactacaggggtgtaatggcctccatgttcccagttttattagtggactcagccttgtaatcatgactggtagttgtaattcttccctctttttgttttgaaggacactttattctgctattggcattgacctggcatctcatgggtttatagttgctgctgtagaacacaggtatgttacctgatataattgggctctttggccaactacagggaatgtcaatgctcataactatgtttctaattttcataaaagtttatttaaaatgttgatggaactttcaagtatggtaacatcatgagcaaaaaaggagattgagtttatcgacttaaaagacttaaaagcacctaacatttctagagtgtttattgcctgccatgtcctatgcgaaatgtttttaatacgccatttcattcagtcttcataacaatcctatgagatggttattattattattgttgttgttttaaggaagaggaatatagaggtgataaagggtaatttgcccaaagtcacacaactagtaagtggcagtgccgggatttgattcctgagactgagtttcaacatggctaacattgcctcccagaattaggaagatagaatggattgagtttacctgcaacttgatgatagacaataaggtttttttcctggaactcttttacagtcttctttaatttaagagaaaatatagagtggaagaagaaagggaagtcaaaagatcagaggaagttgagtcaaggatggaactgagaaacatgggtcagatgaggaagggaaggagcatgcataaataataattttgcttgtattatagagatagatctgcatctgcaacttactatttcaaggaccaatctgctgcagaaayaggggacaagtcttggctctaccttagaaccctgaaacaagaggaggagacacatatacgaaatgagcaggtacattgcagtgaaaggagaggtggttggtgacctaaaagcatgtacaaaaggatgacatttgttaatttaattttacacctggcaagttatgctcctagctctcctatttcccattcccaaaagatctgtcaatagattcctggagcagtaaaattcccttaatggaatatctagttcatagtaaaaacaaaggcaaatacaaaaatttgggagatgacagtgaatattcagaattcccttgaattaaaacttctaattttagaatctaaaaagtgctagaaaataaattaatagattcttcctcacagacaatataaaaagactacttttcagagaggcagtatacaatagaattaagagtatgggccttagaacccaactttctatgtttgaatcctggctccaccacttaattttgttatagaataatgaatagaaacattatttgtcttacagagctattagggcagttaagttaagtgaagcatattggcttcctctttatagtgggtgttttacatgtgttattatgtttgagtccacccacatttcctttaggtaggaattattatacaatcaatggaaactcagagaggttaagtaaatcgtctgaagtcacatagtaggtaagcaacagagccaggatttggactaagctatacctatgtgcaaagctggggcctgtgtcattatggtagcaagtaatagtcactaatcagatttccagtttataactgaccaacsatttttcccaaatacagcttctacctaaactttaaaataagtgttataactttttactttgtcatttccttcttctaataattatattaggtacggcaaagagcaaaagaatgttcccaagctctcagtctgattcttgacattgatcatggaaagccagtgaagaatgcattagatttaaagtttgatatggaacaactgaaggtaagctataaaaagtaatttttctcttgtcctacagttctttattgttttttgtcatttaattttctgctatattgcaaggtacaatatgataaagggctgcaaccagccccctccccaatgcrcacacacagacacacaaagcagtacaggtaaagtattgcagcaatgaagaatgcattatcttggactagatatgaaattgccaaaagttagtcagttttgatctacaaaaacagcaatgtcatatggttcaactcaactcctgtggaagtattattatttcatggacagctcctgcatgtttttaagcttgatcttgaaaacttgacacaagtttgggagcgggtggaaaaatatcagacagagtgggcagcatgaacaaagactcaaaagtgtgtgtggcatgtgaagtgcagggattagggggaactagagaataagatgatggtctgttctccagatacaatgaagaaatttgttatccctcaagcagccactctcttctgtatccttgcctttgtacatgttgtccccttggcctgacacacccttccccttgcctaactcctacctaatttcaagactccagttgagcatcacctcctctaagaagctttcttggaccccaatacccacttctggactgggctcgctgtctgtcatgtgtgctcctttgtaccactgtactgtattgcatcatgcctctgtataactttcttccctgatggactgcaaactcactgaaatgagactgcagtacctggcacagagtaggtactcaataaatactcatggaatgaacaaacaaataaacatggggtgaggagaggcagaagtcagaactgatgttgaagtttccagtgtgggtgactacaaagaacattaagtttactttcaaacctttacatatgttatatatatgtgtaaatgtgttttatatgtgtatatagatgtatatgtgtgtatggtatgtataaatgtatgtgtgtatatgtatattctattttataagaaatcaatgtatttaaccatccccatgaaatgaacaattatatgattgacaaaatcatttcttctaacaccacgaaatagctataaatttatatcatgctttttcaaataggactctattgatagggaaaaaatagcagtaattggacattcttttggtggagcaacggttattcagactcttagtgaagatcagagattcaggtaagaaaataagatagtaaagcaagagaatagtaaattattggaagaaattatattgtgagatataattttttattcaaattcttagtgaagaagggatctcttggagtttataaggctattcttttgcccccataaaatactctatatacattttcctaggctaaaacatctacctctcctgctattaaaatctccccctactcccataagttttccctcattattcttgtttacccaaggggttaacacttttcactgaaaaatttatctttatatawttttttgtgacataatgattgtgataataatattgtcatcttaacagtattgccagacttctccagtgggcaggacattttttaattaggtttttcccccttccacctttaagatggagctggatctaaaattacaattatttgggtaagagttgggacaagaccccagttttctagcttgcaggaacattttctttcttaaaccttcattccagactgatgagatcacatagaaccaaccgtacagagagtgggcaggatcatttttgaaacttcacctcaaatttcttaaaagtccatttcagtgtaagaattctcttctttgatccatttaccaaaagatcaggaaacataggataaacttacttttaaaaaggaagttagtttcatcttcaaatgatatgctccatatgtttttcttcaaccctcagacagtttttcagctgaagtgcctctaaatataaagtaatgggcccaattgttactctaataaagctataataaatacactacaaggtgcataaaagctctgaaaacaaaggtgtatttattatactttttcagatactccacagtgttgaagaaattattatgtattctaaaatttattttgaataaaaagttttaaggatatatcactcaaatggttgcaattcctaaaggcatataaagaaaatgattatataaaattccaggtctgctactttacaaagttaatcatatccctttcccacattgaagtatgatacctctttattccaatsagataacccataataaactggtatggtgcgtgtccaccaatcctagcattattaggatgtcctcaatgttggctagtatgtaaccagtttaatttcatcattgtcaacaaatatctacagatgtggtattgccctggatgcatggatgtttccactgggtgatgaagtatattccagaattcctcagcccctcttttttatcaactctgaatatttccaatatcctgctaatatcataaaaatgaaaaaatgctactcacctgataaagaaagaaagatgattacaatcaggtaagtattagtgacttatttcattatgtgaaacaaacttgaagcttgggtaaatatcaatcgatatcatttggtaactattaaagaattgctgaattggttgtttagactttcaataaggagagaattagataatctcagtttctaagtacatttagtcttactctttttaaaatgggaatgttaacgtatatagtatatatactggttatattagtctgttcttgcattgctatatggaaatacctgagactgggtaatttataaagaaaagaggtttcattggctcacagttctgcagcctgtacaggaagcatgatgctggcatctgctcggcttctggggaggcctcaggaaacttacaattatggtggaaggcaaccggggcatgagcacttcacatggccagagccggaggaagagagggatgggtgaaggtactacacacttttaaataaccaggtctcacaagaattcactgtcacaatgacagcaccaagggggatggtgtgaaaccatgagaaactgctcccatgatccaatcacctcccaccagtccctgcctctgacactggggattccaatttgacatgtgatttggtggggacacagatccaaactatatcactggtaattaaaattagcattatactacatgctacttcaatctaaacaccagaatatgcctacagatttttggggttagagctagggggaagtattccatcattaggctggggtaggaactctttaaagaaaaagtcagattatcgactgagacctgcaatatactaacctgttgagaaagaatatgagtttataaattccccaaagctataatggggtaccatgacgtgttggcaattcttgtatcctggaggtgaaaaagaactcctgataaggttttgaactctcgatgagatattacaaagcaaagatggacctgaactcacccctttcctatctgaaatctggtttatttaggagaagagaagaggcaggaaggaaatatatggagtataggcaataaacactatgggctcagagaatagaggggtctcttccaacagaaaaggattcatagatgacactaaaattggattttgtaagatcaagagagtttagatagtaaggaagggtttaggtatttcaggcaaggacttcatttagcttatgtgtatgtgcaactctttctaattctaaaacggaaataatacagaacacctaaccttccctcaaccctatttccttactaagctctcacctttgcttttgtcccttctctgctagaaaccttcaaagaatagccaatattagtcattgcatgtgcttacttctattcactctttgactcttgtggtctagcttcctgggcccccacgggcatgccaaaacaaagacactaaaggcctgctgcctgccacaccagcagcctcttcagagtctcaaccttgctctctgcatctgttcaacattgctgaccacccctcttcctgctcccttggctactatgacccacctctttgctgcttctcctgtcatttataccactccttccatttcttctcctctggcagttctctacagtcagatcatccaagcttctgctcgcaattctcttgtattcctgctgtttatcttctttatgtttctgacattcaagtttcctactacaatgtggggaagagtgagagggagttaagtggccctgttttgagcttagatgactaaaagaatgatgggttgcttataagaaccagcagagtcaagaggcagagcagctttgggcaggactgggaagatgtcttttaacttcacaatttcttagcttgagaactgaggaatctgtacacagatgtctggccacacattggatgattacataatttacatgataacacagatgaaacatttgaagtagaagagattgcaaagtgagaaaagagttggtctgccagtagaatcctaaggaatgcctacattcagccaatgggaaatgggtgaagagccagtgaagaacatagagtggttagcgtcagaagggaaggtgcaatgttaaggaaacgtaaagaaaaaaagtgcaagaaggccatcaagtgtcaaatgtcccagtggtggtagaaaacgaggacttaaaaaaggccattctatttgacgttaggctattgatgaatttacagagcagtgcaaatgatatttataaagtgcttacagtttaatactgggaaaagtggtgtttgaaatctgtttcctctaaggcttaaatctaaagtgatttaaatttaaagtgactagcatcaaatacataccacgttcagtggtgagggcaggtagcaggctctggctctgagttcagggacccttcaatacagaacacattccagtattcaaactggaagtattccaattcactaaaaagcaagaatcatttcttctaaaatcaagataccaagcaagaacaagattctttgagttgtatttctagagggaagaagaatatactctgggatccctaaacaaacagcctgtgacccttgaaacacatctaagtagatcaaattacaagttttatttcttctttggttttcagtaaacagaccaacaagaccagtacctttcttacactctaactaaaaaaataataattttatcaaacaatgtgacttttaaatgtcttgttctcttttaggggttcagtccaccagaattttgctgacttcacttttgcaactggcaaaataattggacacatgctcaaattaaagggagacatagattcaaatgyagctattgatcttagcaacaaagcttcatyagcattcttacaaaagcatttaggtaagaaactatttttttcatgacctaaaccagatgaatctcaggacaaagctgtctatcttaatacagctttagtactatttaaactatttccagttggtttacaatggaacaaagcagtatatcaatttgaaaacagaaatttgagaaagtcaattttgctgctttacatcctctatatcatagaaagcaaatccaactgttaaaggtaatattctttgtatgaagcctagagtggacttccatgttgaggatactgacagcaggttgcctcactcctatcccgtttgcattcagctgctaaagcagccatgaggcagctgatacagagcacatcgtctctaccatcctaacggaacttgtgtaatttgtaaatctttattgccacctaggggcaccaaactgtttaatgctctcaaaagtttaatatgttgattaacactttatattttataggacttcataaagattttgatcagtgggactgcttgattgaaggagatgatgagaatcttattccagggaccaacattaacacaaccaatcaacacatcatgttacagaactcttcaggaatagagaaatacaattaggattaaaataggttttttaaaagtcttgtttcaaaactgtctaaaattatgtgtgtgtgtgtgtgtgtgtgtgwgwgagagagagagagagagagagagagagaattttaatgtattttcccaaaggactcatattttaaaatgtaggctatactgtaatcgtgattgaagcttggactaagaattttttccctttagatgtaaagaaagaatacagtatacaatattcatatcagcctaaattttaattttaaagatgattccttttcagtgtcgaagttaaaaactgtttttacattactttgacagacaagtagattaaaacaggcaaaatcccagtgaaaacctgttgcaatgatacaagactccctaaacatagagtaaaaaacaatttcttgccttttattatctactatgggcagtggagtttaattatagcaacatgatattctaggtagaatttggcagctcttctctttgacttttggtcacggtaagaaaaattagaacaagcaaaagccattgtttcagcacaggattggtggtactacacaatttcaaatgatgactaaaaggagtagagaagggttaagaatattagagatgaggcaaaggcagtggattaaattggtaattttttgacactttctttaattctttaaggcattctacttgctaaagaaaggttccacaggtattacagcatatagcagggattccagttagaatacattagttactcacacaaaggctgtgaaggataataaaacattcagaattacatttagcttcttcatattccagttaattttatttaatgttttcaattctatatgtagtagtaaaacagaataacacgattaaatggaggtaaaaatatagcttaagaatttatacttataaatatgggaatcatggaaaatgattttatttcccaggggacataaaaatttataccactcatttggtaccctagtcctatcttagtggtgtcaggtgcaaagtcactcattctgagaaattttacttctgtagccattcagattaaattttttaaaatagggagttaaactcagcttgaaattgaaggcttcctataatctgatcctaatgcatcttctctgagctttgcttctggcaattcacattatattatctatatgagtaagccaaacttgtctattcattattccaggaataagtaatatactcatctacctcaattacttttaatgcaaacctctctcccttctacttacggaaattataatgggtttttaaggttcataattctatttccattaggcttcagagtctgataatgcttcacagagatacacctttaccccagtctcatttagcaaaccttttccctattcattttagaaataagcattccaactgtatggatgtcccattcaacacttttttgtttgtttgttttttacagtcttttgttgatggcgcatgctgatgctgaaaggagaaaataactattgaaaatatctaataagttaaggttaaaaagaaataacctaacatagtgcacactgagtatttttcagggtaaagaaagacacatttatcaaatgcctactccttttcagggactttatatcaattatttctcatcttaaaaaaacactgcaagaaaggttttattatcaccactttacagatgaagatcaaagttcaaaatattacataatttgcccatgtcacatatctgttaagcagcatatagctcagatctgtttctaaaagctaagatctatgctttgcaaaatcatgtttaaaaagtcatgggcttcaaagttaggtaggtctgggtttgatcaagcctctgagactcatcagctatctgaccttaggcaagttatttaacctctttatgaagcttcaattttctcacctataaaatatggataatattgatatgcacttcaaagttgatgaataaagtgaaaaaatgcatttaaagtataagctaagtgactaatacataagagctaacatttaatattactatgctttccccaatcctccattacagaggagagatggaaccaagtatatttaagagttctatttcctttttaataaaatgagaccatcatattaaggataaactttatttaaggataaactttattcaaatcttgtattagaatacttccaaattcaaacagaatgttagtcaaatgtttagacaaacaggcaaagattcaaagtcaagacaaaaattctgaaggagatcctgctaaaaagctatcctaagtagaatcaaataatgtacttgtcatgagcccttatttttctattttaatttaaacactgtatttgaaaggtaccaaaatagtttttgaaatgtaatgtgttagtaaactgtttagcaaaataaatcctcccaactaattagaaacgtaagacaataaagacgaaagatcccagatctgtatatataacaggatcactataaacacaccccaccatcaacctgagacctaatttgttttccacctatatagaagtttttgaaaatgacaacttcttgtggttacatgttttcaattttctcaaatactctgttggtctgcgtaagatgccacttgttcaagggcagcttctgactgattggccacagctatagatccacggttaaatctccatcacctccaaaccccttttctgaaacaaaaagagaaaaacttcaaactgagaaagaaacatacaaacaaaaaaatttatttccatgggtgttaccatgacaaatgtaatgttctctaaaagggagaggggacagatgagtattctaattactatagggcattatttctatagaaacaatgttttattttcttattaatattttggttctcacactgtaccatcaaatcaagtttctctaaaaattatgaaattggcatattttatattttgctagagaatggtgtgaacaaggctgataatcaattagttctttttcctttttgattagtatatatttttcacatgatattaaagctaccattagctgattttattctcaatgtgcctcaattctaagaaccactgcattatttatgaacaagaatgtgcaataccaagaaccagccaataatttgaatcttatataaactaaagattcagaaattccaagagattatttaacaaatatcatttgaacatatgagctaattaacagagaaaattctttaaaatgtgaatttatcacattcataatttaactttcaagattaattcaattaataaatttcctatatttcaagaaatcctcatcttgggttatttatctccataagtatatttaaatttttttacctaaagtggtttttcttccctgctacctatgtccaaagaaattgataaaccatttttgtttgagggattcagcataacaatatttttaagaaattgtaattctgggtgataaaagtattttgttttaaaaacacaagttacctttaatagtggtatcacccactgacatgaagtaaagatctttccctactctttgggatacagcctaacaaaaggaacctttgaattgctattgattctttatcacgagtacaaaataattcaaatcagaaatggaaccacagataagccagaaaagatgtraacaacaaaatgtatttctatcaaaattatgacaatctgattttataatgaggaatcatgtcaagtactttttctattcttcaaatactcatttctctagaacatatccctggagcactctacacagggagtaaagtacccttttccaatgtttagctctcaaatccccaacaactctggtaattggtgaaggagggagggacatcattgttcaaggggctgttattcaaacacagtatccatgtagagccacagatgctttattaaggacaatgaaaagggaaatatttctcctatattccttttaacaaccaatagcatcatgtgcatgcattatgtgatacagtaactaacaaaatactcttatggtaaaataaaataactcagataagaaaccatttttttaaaaaaagtaattagattcctagatcatagtgacttgatgtatcattaaaaaaaagtcatgcataatacaacactcactttgtaaggaaagctagctcatttgtagacaggtatccagagttaagagcttcctcgaatttgagggaaggatatttaaatctcattagtaaccaaatcaaaatttttagagtcttactcataagtagtttctatatgtctgctaactggcctagtcaaagccagaggtagttatctatttacttatctagatatataattttatgtctactttaaatagttcttttctatgtagcaggcatagagaactttatccaaactgaatcttgtatgtacatatgtatgcatttggctgtggattcttcataattaatggatggagacaacccaaatgtaaaaagttttagtaaatactgatgcaaaaagtgtagtaggctggtatttttgacctaagcaaaaaagtaattaacataaagagagatattcattgattttttatagtaaaaatttcaaatgacctaaatatccaacactatgggaaatggtttaatacattatggctcactagtgtcatgcagcattatttagctattaaatattgtttatggccttctgggtgcagccaagatggaataagctgactataacctctttcgctgattacaatgaaaaattctagacagaatataaaaagcaactactcaaagactcaaaagtgaacagaaataggtagattaagaattaaagtaaaaacgtgaataatgactcacaacaggagtgagtttcataggccttttcttttctttttttttacttctttgtctcctgattttgatctgagggtgggccaaatcaaaactgcctagctagcgtagacagcaaaactctgagagaaatttcttatttatagccagtggactagggataaaggaaccctgaatgctagagagtaagaaataggtaggaaatctctttgctgtattgtggtgttatgtttatttctatttttttttctggccctgccctgagggtggctaaccccagttactgcctggtgacagctatggcaacataggcacctacaaatgtgagagatgacccgtctctctagccagtggaaccaggaaaagagctttctgtcatctgaagaatagtaataggagattgtttttgttmtctctttatctgcttcgctcttacgggcaaacagaactgtgtggtggagcagaggctgagagaaaaatactgtctggctaggtgaccagaaaaaggggccattggaggctggataagagaggatcctgggagccagaaaatgtggaggacatctcagagaggaaaggagttgaaaatgtttaactcctaatgctacatgtgaactctaagtctcaggattgcccctgagctatgcacatgcagaacagagccaaataagcacagcaaagtctttgacacttaactactatataaaccactgaccaaagtccctgactaccctgggtggcttatgtacctggaagacctgaacaacaaaggctttgaaaactaaactgacaggacaatcaccaaccacagaaggagaaagagaacatgtaggatgaattgaaaccagctgatcatctgctgtaacaaaaacttcaacattctccagattttaacaggacccaatgtcttaaaacataatatgcaaaatgttcaggatataatccaaaattactcaacatacaaagaaccaagaaaagctgaccatttctctagggaaaagaaaatcaacagctacaaaccccaagatgaccagatattaaaactatcagacaaagattgtgaagtgagaagttcaagaagtccaaccaaccccaaacaggataaactcaaatgcccagacacatcataatgtcatggcaaattgcccaccatatagtcttaaatgaagaaaaacagaatataaaactatacataggatgaaatcaattgtgtctaaaatatgtagatgaaatacttatattacatataaacagaaaaattataaaagaaaaccaaactggtcaacctatttgtctctggatgggtatattatcggtgattgttactttctcatttttaatattgttatatttctcaggttttctgcatctaatatgtattttattagagtcatgaagaccaaaacattttctaatcaaggagtaaaacattaataactagttttctcagaagaatacttggcataaggactaaaatcactgattttgttattgctgtttttaactat

SEQ ID NO: 5639 - DNA, 53328 bp, Homo sapiens
acatgggacaattgataaaaagctaaattgtaaacagtccttgccccagaggacccatggtcttagggcagatgtttacatatatgacagtaatgtaatgtagaatgtgaagagtaccatgacagagttttggagaacaatgtgctgtagaaattcagaaaagggacagctcatttctagttggtgaaagccttcatgaaagtggcaaagttgaacctgagaggcatatttagagggcaaagattgaggtgagggcattctagccagaagtgctagggaactttaattgagcacatactctgtgccaagaactgtaccaagaactttacacatacatgactcatttaatcttcataactctgtaaggtaggtactgtcatcccgatttaccagtgtggaaaatgaggctctagagcagtgcccggtagacttttcacaacgatggaaatgctcaaatatctgcactgtccaatacagttgtgactagccacttgtggccactgagtgctgaaatgtggctaatgtgactgaggaactaaatttttgattttatttaattaattagaatttaaatttaaatagccatacctggctaatggttaccccactggatagcaggctgtagagagcttaggtagcttgtcctagtcacacagtggtaggttcaaacccaggcctgttggacctcaaaacttgaggtcttaacctcagtgttctacagtatggtaaaggcctagaggaggcttcagttctgttcctcgtatcaggcaaaacatgactgcaaaaccatagagggagtaacataacttaagcaaagattgaagatgggaagttgctggcaagaagatacagtttgaaggggagtggaaaatgtgtagaacagagtatctgatgctggtgtctgtgatttgcagctgttttttctcccctagttaaaaatgggctttgagtgagccttgaacctgtcttggactaattcagaaagcctccaagagattgcccccttagataagtccagtaaatgtagttgtctacatttttcaaaaagataaatgggaacaagtgtgctacgagattcagacatctgacgtgatgttttcgttgttgcctcagcaacagatgcggttatgaacattgacaacataagcacacgattgcagatacacataggcgtataaagcacacaaaaagaagattctctgaatggttttgtgcttatgatgtattttcaatattgagtaattatcaagatactaatttatagttatatagcattttatagttaacaaaatatttgaaatggcatatttttttcagctgtacaagaaaggtagttctattttccttttatatttgaaataggctcaaagtttgcccagggagcttaggttctttgacttatagagaattcatgatttgtttctaactcttctatttactgtaacttcaaagtggaaaatgaaccatataaatgtgtaatagaattatttctaatatatcaaaataagtaaaaataaaaatataaagcaatggcgattagaaggcagcttgtgtgtgagtgtgtctgtatgtagttattctttagtcctaagagccaagatagttgttttgttgacattgggcttgtgctgctgttacgtgggcctgagtcccctagaaggagaggcagaggaattttaaatcagagtgggtatgactaggctcctgactctgcaaactcatgtctagttgaggtgacaaaactacagtttaaggcaggttgtaatcacagctaatatggcactttgactgtgttatctctgtacctcacaaaaaccctgtatggtgggtgttcttatttgcatttcataggtgaggaaatcaagactcagagatgaaatcatctgtctagatcatagatagcaagtggcaaagctggaaatgggatccagtctctgatctttctcacaccagggcctgccctttttctatgtggtgttgcttctctaagtaccaataatatagttccaagttttttaagagagggagaagcaagtggggtttgaaggatcaggaaatatatagtacctgagctggtcatttaaaacgggtatgattttgatcaatagtatggcagagatggcactcagggcaggagagcaaagtcagagaaatttgcatacctcctttgggtgatgttgaggagagctcaggctgatagtttccattttgacttctttgtgctatttctgcagggaggtcctggccagtgaagccatccttaatgttcctgataagtctgactggaggcagtgtcagatcagcaaggaagacgaggagaccctggctcrccgcttccrgaaagactttgagccctatgactttactctggatgactaaaacaaagggaagaactttttatgaactccacaggaagtagtaaagcttttttttttttttaattaaaagaattttttttgagacaaagtctcgctctgtcacccaagcaggattgcagtggcataactgtggctcactgtagcctcaacctcctgggctctagagttcctcccacctcagcctcatgagtagctgggaccacaggcgcatgctaccatgcctggcaaacttttttgattttttatagagacaggagggtctccctgtgttgcccaggctggtctgtaatgcctaggctcaagggatcctctgccttggcttcttaacctgctgggattacaagcatgagacaccattcctggcctagaagcctatttttaaagaaactacaatctcccatggggactgtttccctgcctcttttgtgcagtcccatggaacttgcctacagcaagaggcctaagattgaatctttttggggaaaagtcattctaggatgaaaatcctatgttaaggccgggcgcagtggctcacgcctgtaatcccagtactttgggaagccgaggcaggtggatcacctgaggtgaggagtttgagaccagcctggccaacatggtgaaaccccgtctttactaaagctacaaaaattagctgggcgtggtgccaggcacttgtaatcccagctactcaggaggctgaggcaggagaattgcttgagcctgggaggtggaggttgcagtgagccaagatcgctccattgcactccagcctgggtgacagtgaaactccatctcaaaaataaaagaataaaagtatgtctgtcatccagctcctatgtctgttatccagctccaagtacagcttgtgtatatcaacattttcaaaaacctttaaactaccaaatgaaatccagatgtttttccatggttgagaagtgtcttgtgttcatgttgcctgtgaccgttgaaatgaagtagtatgtgtaatagcaggggctagagctttaggcccagctgttactccaaaatcacacagggcagtttctccctgaacaacccaaagtggaaaagggatccaaggcttttgctatttttctcttaaagcattcatcttattcatagataagagcccatttagtccttcggatatttaactcctatgtgccaggcatttttctaagctccaggaccatagtcatgtcccaatatggtccctgttgtcccagagattacagtttaatggggaatagaagggacagatttaagaaaaaaaagataattctcctttggatattgttttaggtgcttgatatatctaatatgtgtctgttgtgctgctgggcagttctaaactcatcagtacctgggttggttacagggctttggggatcatcagggtataggccataggtgaaattaagatagggtaaatacagtcctgagctgaagatgattacctgagaaatatcagtatttaaggagtgcttgaaaatagtgatctaacatttacatagagaaggagcaaagagaatgctacatattaggcgcaaaaagaaaaatatttttacctttatattgggcacttatggtccagacactgtttcatttaatcttcacaaaatctctgtgaggtaggtattacctctattttactcatgaaaaaaaaactgagactcggaaaattgaagattgtggagcctggggtcaacaggcttaggctttttaaaaaacaggccaggtggctcatgcctgtgattgcagcactttgggaggctgaggcaggcagatgacctgagatcaggagtttgagaccagcctagccaacacggtgaaaccccgtctctactaaaaatgcaaaaaattagctgggcgtggttgcatgcgcctgtaatgccagctactcgggaggctgaggcagtagaattgcttgaaccctggaggtggaggttgcagtgagctgagatcacaccattgcactccagcctgggtgacaagagtgaaactccatctcaaacaataacaacaacaacaacaaaaaacaactcaaattactcatggccctgggaatgggggcatttaaaaagttaaccaagggaaccaacctggtttccacaaagatggccacttctgggtcagcccaatcatcagtatccctgggtcctcagcatcccttcctacctcttttgactgggaattacgagattacagccccacctacggaaattgagcacattagcactggccatgctgtacatacagcaaatgagagggcttcatactgttacaacaatctgtaccacaattctctgtgcggtctgcccagctctaaatgacatgtcctcagaggcatcatcatctccaagtccatggaaaccatgcacttacagaaaccagaacctcccataccacatgttactaatgacctacaacatcgacttcgtctgtatcatgcagtgctcaacattctggttgcagcatcacatttatcaataatttgattccatgctgattcctttacttggagtattgagatcccccaggtacagtgaaggtatgaccctcttaaatggaagaccaggagttgtttcccctatgctatggcaatccgccacccggaagcacttgctgcaccaacagcattcccaaagcttgcctctgcagccctgtagcacccattagaaacacttctcacaatgaactactgtgctggcaaacccataactggactgccggacagcaagctctgtgaggcatctaggaaaaaagctcgcgaaatcccgagaaacactcttcactccggaatagcgtcacattcttgagtcatttgggatgacaggggatatcctggagcaggtgtattgggaagtcagtgaacaagaaggctaattcattagtgggcctgctagcgtagtattttaacgatttcgcagcctttaaatcattggtggtctttagcgtgccggatcagctggtggtggagttggaggatagatggcagggatctgaagaaaggtgaagtgtagataggagtagagacaatatgaagtttagaaaagactaattgctggacgcggtggctcatgtctataatcccagcactctgggatgccaaggtgggaggactacttgagaccaggagttcgggaccagcctgggcaacgtagcaagaccatgtctctacaaaaaataaaaaattagccaagcgaggtggtgcgcgcctgcaatcccagctactcgggaggtgagaagatcgcttaattccgggaggtcgaggctgcagtgagccgtgatcgtgccattgcactccagcctgggcaacggagcgagaccccatcttaattaaaaagaaaaaaatacaggagagactgggctgctttgaaaagtggatttgacgggaatgtggggtttggagagatcttatgttttccaagactagaaaaacattgtggttccgttcagccctcccggaaaatacgtaggggacttaaagagcggaccgagtacctgtttgtttccccatcccttagccggcagggctctggcagcgccctgggagaacttagggaagggccttctcgcagcggttaccggaagtgacgcattcattctcgcgagaacaaagacgcgcgagcatcggcggcccggaaccggccttggaacaactgtggaacctgaggccgcttgccctcccgccccatggagcggcccccggggctgcggccgggcgcgggcgggccctgggagatgcgggagcggctgggcaccggcggcttcgggaacgtctgtctgtaccagcatcgggtgaggcggggcrtgagagggagcggcggtgggttggagcggcggtgggtttgagcgtctgtggaacacagggctgacagtgtgggatagatggttggtgggaccttgggcagtatttgggggccagtgggcttgtgtgtgtgtattagagagaaagatactatgcctgygtgtccaaagttgtatttgaggtactgggcatagatagagctgttgcggggaacttgggtatgactgtcaggctgtgaccaggtgtttagtgagtgtgacagtgcgtgtgtgtctctgtgaatgtggagtgtcagggtgtgtgaggcagatgcacgtcacagtgtgtatgtaggagcacgaatgtgtgagaagagggctgaaggggactgcctttgggaatgtgtgcgtccgtgtgtgtgtgtgtgtgtgtgtgtgtgtgtgtgygcgcgcgcgcgcgcgcttggaggccatatgatatcagtggggactggagtagacaaggaaggcttcatgatgggtccagagttaagcctttggaagcatggatgggctttggaattggggatgtattccaggtcgggacagtatgagggtgagttggtgcagagcatggcttcaaacgaaaggctatattagtagatggagatggggggcgctctagtaggtggaggacagttaacatcagactcaagaattttactttgatttaatagagaatgtttaaccattgtagtagcagttaaaaaatcatatttgggtcttgtttgtttgtttttgtttttgagacggagtctcactctgtcgcccaggctggaatgcagggcgcgatctcggctcactgcagcctcctcctcccgagttcaagcgattctcctgccacagcctcctgagtagctgggattacaggcgcccgccaccgtgcctggctaatttttttgtatttttagtagagacggggtttcaccatgttggccaggctggtctcgaactcctgacctcaggcgatccacctgtctcaggctcccaaagtgcagagattataggcgtgagccacggcaccaggcctgggacatgtattttttgatataccgataaaagctgtgaaccctttccccagaaaaatgcacagatgcacattcacacaaccatgcattgccatttgagaggttcgtgccttcctaaaggacattttaggtaaatagaccctggactaataattcctgtaatataggctttgttttgttgcctgtaaagtaagtatagtataataattacatgcatcatggatttgagagttaaataaaatagtaatgtgtgtaaagctaaatacggtacctgacccatgaaagccctcaactgttagcacctgctgctactttgttgttgttgctgctatgatcataatgctcctcattaattggccttaaggaaatgtcaagataaaaagtgttgttctaggaaaatggttttgtaaaggataaatttgagtggaacaacatatgggacaagatgaacaggtaagatcttactaaaatgcctgggcttggcttgtgaatagagaagttaattcaagaggaaaagtaataatttgttatctaaaggaacatgggtgtagtgagaaagctcgtaatttggggtgggagaaaggggagataggagtctaccttgggaaaataggcatatttagggtaattagaatgacaactgaaactgttagaactgaggaagttttgtgaaccaggtttctagatagggcataggagaaaatcttggagaaagagaatggaaggtgaaggactaaggcattaagtcctgtgatagcaggataagtagtaaatttaataattctcaccatcagagggaacataacacactaaaaaaaaaaaaaagtgggagccaagtgcttccagtggcatgttgcctgtgttacctaagcctgcctatccgcctggtcataaggaaaaaggatgcatgctggcagcttttgtgacttcttttcttggtccctgggtggggatggatgaattaatcactttttgttttattatggtaaagtatacatmacacaacatttatcactttatttttaagtgtacagttaggtggcattaagtacattgacgttgttgtacagccatmaccctatctccagaatattccgacttttttgttgttgttgtacatctataaacttcccatagaatattctttgtgaaaaggtagaatttcacagagttgatgaaatataaattaaggagttgaaggatcttacaaagtgggatttttgaaatagataacttattgctccattaacatgagcattcagggctcagtgttgttcatggttgtgcctgattctcatttccatggtggtaaaggcctgcatgggacatagatataactggtcacctgctcataacaaaaggaagattgaagggagtgagaactgtgggtaggctagcatgcagtctatcctagtttccttcttctctatgcaccaggtatcatcttatctctagcttcttttttcctctcaccctccaattcacactaccctatccaagctatgtcttgcttccccacctataatatattttttctgtcctggcccctgggctcttctctctgtattcatacacagcctttattacaactctggtttgtgtcagagattacatatgttggaaattcttttgaactctccttgtgatatcagaaacatagtgtagcctgtttagccctgactgctatttctgagctgcattattaatgttgccagaatatgatggggtctggctatttcctgtaatatgcatcagaatgggtttaatttcagtcagaattggctaaattactagtcacaggcaagagatgttaggttcattatgtagctatggaagcagaagtacactcattggtaggattttttttcttcatgtcatttgaaatgcatacattaggattggagttttttgctttaggcttggttatattaaaactttctcttgctgtttggagtccaggaagccctgaattaccttcttcattttagttatgctagaagctggggcacatattagttgtcttgattaagctctgaaaggggtttgctgaggagacaggatctttttttttctaacattatatatgagagagagttctgaaaagacctgttataaaatcagtttcaggcacttttcccttgtatgctgttgtgtgtttgaaggtcagttttaaagcatkggtgtaatagtctcatggtttatctttttaaaaagcattgcctcaagagagctgtggataaatatatttaattagtaaagctaaaaagttttgttgtcttaagttatttctttggtagcaaataaatcttcacaagaacctaattttttttttctgttgattttctattttggcaggaacttgatctcaaaatagcaattaagtcttgtcgcctagagctaagtaccaaaaacagagaacgatggtgccatgaaatccagattatgaagaagtaagtgtattccttgacttacatttccctggttctacagcccaaccagatgtcatcatggggaaagaggccaggaatccactcttctcaggatctttttgggaacatatatttttttctctcattaaatatattctatttcaaataataatatcacattaagattaagaaggtttagttaaaatcagctaggacacttacacactgttggtgggaatgtaaaattgtgcaactgttacggaaaacagtacggtgattcctaaaaaattaaaaatagaattaccatatgatccagcaattccatttctgggtatatacaaaaatgaattgaaagcagggacttaaagagtaatttgtacactcatattcataacattattattcacaatagctgaaaggtaaaagcaacccagtatctaccagcagagacatgtataaacaaaatgtggtatattcatgaaacggaatatcatgcagccttaaaaaggaatgaaactctgacacatgccacagcatggatgaatcttgtggacattatgctaaatgaaataagccagtcacaaaaagacaaatactgtgtcattccacttatgtgtggtacctagagtagtcaaactcacagtgaaagaaagtagaatggtgtttgccagagggtgaagggaccagcaaatagagaataatttttaataggtgcggagtttcagctttgcagaattaaacagttttgtgcagtatagtgatagtagcaaaacattgtgaaagtatttgatgccaggctgggcatgttggctcacactgtaattccaacactttgagaggctgaggtgggtggattgcttgagctcaggagttcgagaccagcctgggcaacatggcaaaaccccatctctacaaaaaatataaaaactagctatgtgtggtggtgcatgcccgtagtcccagttacttgggaggctgaggtgggaagattgcttgagcccaggaggtcaaggctacagtgagctgagatcataccactgtactccagcctgggtgacaagagcaagaccctgtctgaaaaaaaaggaaagcatcttgatgccactaaactgtacacttaaaaatggttaaggtggtaaattttatgctatgtgtrttttaccacaatcaaaaaactatttcatttcagttaacaaaagtcagctagggccgggcgtggtggctcacacctataatcccagcactttgggaggccaaggcggatggattacctgaggtcaggagtttgagaccagcccggtcaacatggcaaaaccccatctctactaaaaatacaaaaattagccaggtgtggtggcgggtgcctgtaatcccagctacttgggaggccgarggaggagaattgcttgaacccgggaggcggaggttgcggtaagctgagatcataccactgcactccagcctgggcgactccgtctctaaataaataaataaataataaaaaataaattaccccaacatttagtggcttaaaatagcaaacatttagtatcttatagtttctgtgacttaggaatttgggagtggcttagctgggtgattctagcttagagtctttcctgagacatctcaggatattggtcggagctgcagtaatccaaaggcttgactggggctggagtatctgcttccatgctcacttatatgaatgttggccaaaagcatcagttcttcgccatgtgggcctcttcatggggaagcttgaatgttttcatgacatggaagctagctttccccagaaagatcttttcctcagaaagagtgagtgatctragagagagagagagagagagagagtgaacgagcgagcaagatgaaaaccgaygtatcttttatgatctttacttggaagtgagactccatccttttccaccacattctgtttgttacagtgagtcactaagtacagcctacattcaaggggaggagagttaagctcttaaaaagagaagtagacatattttaaaacttccacaggtagtgtgctaagtactttacagatcattcttccagttatcacagcaatcttatatttaggtattattttgcaaatgaggaagttgaagcttatagaatcacatagctggtggttggtraagtgtggatttgaaataaatactttctgactctaatatctgtgcttaattccattttgattctcaaacttggttatgtggcagaatcaccaggaaagcttaatagtataaattatcaggtcctacatgtacatggaaattctgtttgcttctttttctttttttctttttttttttaaaagagatgtggtcttgctatgttacccaggcttgacttgaactcctgggctcaagcagtcctcccacctcagcctctggagtagctgggactataggcatgcgccaccacacccggctaatttttaattttttgtagagatgaggtctcactgtgttacccatgctgatctcgaactcctggcctcaagcaatcctcccacctcagcctcccaaattgttgggattacagttacaactacacccagcctagaacgccagatttgacttactcactgtgtgatcttgttacttagccaatttgtgcttcaattttctcctgtgtggtgaaagtattaataaatctacctataataggattattgtgacaagtaactgagttaatatatttaaaatgtttactgcttggcacttagaaatgtaatagtagtaatagtgatggtatttttatgtgtgttttcttttaaaaaattactaatttttaattatacaaatcagaaattagaatattataaataatactgatctttccccctctgttcatccacccacaattaagtagcatttcaaatccagtccctttttattggaaataattttttttattgtaatgtttttctttcttattaggttgaaccatgccaatgttgtaaaggcctgtgatgttcctgaagaattgaatattttgattcatgatgtgcctcttctagcaatggaatactgttctggaggagatctccgaaaggtagtgtggatgttttgagatgagagagagtamatcacaaactttagcaatgtttgaatcatgttaaatataataaactagaataagaatcggaaaaactatggtctgcttcctgttttgtaaatmaagttttattggaacacagccacattcatttctttacacattgtctatggctgctttcttatggctgcagaagtgagtagttttaacagagactatgtgacttgcaaaacctaaagtatttaccatatggttccttacagaaaatgttgactcctgatttagaaaatgcatttttgttgttgctgtttgatgggactatagcaatggtgttagatgaaaatttcagtggttaaggtgcttataaaaagttgttttctgtattgcaatcttttttttctacctaattttaaatgtgcccatatgaccatttttatatatatccatgagatttgtcagccttttccagtttcaaatgctttttgcctctttttacttttatgagccttatcatgaaatttacatgccctcagtatggatttggwaattttattcccttgtattttattatgacttattttctcatttgaatattcttttagagtatartaattaatgtgtggtcactattgcagcccagcaatttgcagaacagatttttagatttctttctttttttagctgctcaacaaaccagaaaattgttgtggacttaaagaaagccagatactttctttactaagtgatataggtacgtatcagtattaaaataccattgtaatgtaatgtccctttggcccataaaagatctttttgggaattcaggagaattgttgatacactatacaaagtctatagaatttcaacatctataagaagttataaaaatctattactattgatgctaaattaaaactaggatattttggctaggtgcggtggctcacgcctgtaatcccagcactttgggaggccaaggtaggcggatcacaaggtcaggagttcaagaccagcctggccaacatagtgaaaccccatctctactaaaaatacaaaaattagctgggcacaatgccgcatgcctgtagtcccagctactcgggaggctgaggcaggagaatcgcttgaacccaggagatagaggttgcagtgagccgagattgcaccactgcactccagcttggacaacagagtgagactttgtcacacacacacaaaaagaaactaggatattttattatttatttgtggctaagagtcctttttttgtctaatagatgttccaatagctgacaaaaaaatcatgtgaaatgaccttactcaatttctctccccccctaccattgacatagtaattttgtttacagtggaattacatctccttgagggatgggtcctcaagtcaactcttttttgtttgtttgttttgagacggagtctagctctgttgcccaggctggagtgcagtggtgcgatctcagcttactgtaacctctgcctcccaggttcaagcgattctcctgcctcagcctcccgagtagctgggattacaggtgcccgccatcacacctggctaatttttgtatttttaacagagacggggtttcactgtgttggccaggctggtctcaaactcctgacctcgtgatctgcccgcctcggcctcccaaagtgctgggattacaagcgtgagccaccgcacccagccaagtcaactcttcagggtgaaaaatctctgcttaatcagaatgactccagaaaaattcctaaaataaccagtacctaaccttttggaggaacctcaaaaaccaaaaatttgtttccccatagattttggttttgcctcttttccaaggtcatgagggctaaagtccaattgaaatgagtgatttaggtgggagaaagaggcttataagagtttcagggattttcccaattgcttgttgcatttctatttggtgttaattctaatgagttaaatgaacatatagtataattttgtagtatttgtttaatgttacttttttttctgtgaagaaaacctggacactgtagtattagttgtgtagttacgatgatccatataaacttgagcatcagagtagatttgtacaaaatgtgaggtgaatttttcttttaactcaatgatttctgttacttyaaagtatattttaaactttatttaggrtctgggattcgatatttgcatgaaaacaaaattatacatcgagatctaaaacctgaaaacatagttcttcaggatgttggtggaaaggtaggtgaaacctgaagtaatgtttcatgcctattgaatatagtctctctgatatagttagtccttgagctttggtgtctttgctgtatgcccataacagtcttactttttccatttcagacctcaccacactgaactgtagttttgtgtttagtttttttgtcccttctgctaaacagtggttccatcagagaaggaacagcacctgctttttttttctttttcttttttttcatttttcatacttaacccagctcctagacttcacctgtcttgttcaagtctgtttttccatcatagtatctagcaaagatacaggctgtgaatacataatatgttaacacttattattttattcttatgaagcacatccaaaacacatacatgcacatcctgggtccactttaagaaaaaaaagaaagtatatatatttttaaaacttattttccttcccccaatttaaatgagtcatctggagaagaaccagaaattgtgaattgactcttaaaatgttcatttcattggtaacttaagcagttttcttgtttccagcatccaaatttcattccaataaagacttaaaggccaagagtctgaaccttgtgttgagttgtgtgtgccgtctctttagttagtgaaaatagttgttggcctcttggaggtgttggaaccttggtgatgcctcttctcttaggaacctttcacgtatgcttggcaccaaatatctctgctttttttttttttaatccaaagacttcaggacattcctgaagttagatctaagtatttactcacatttaatctactataaggaggtatgatgcttcttcaagtttggaagtcacccttgcctttactttccrgtttaatggattgagcttattttgaatatagtaaaataaaaattaatagcccacctgtattcaatttttaccatgtaccaagcactgtgttaccttctttactttcgttatttcattggatcctaataacaattctgtgaagcagggactgttagtcatccaattagattactgagagaggttaaataacttggtagatcacatgcctagttaagtggtggcactcagacttgaaatatttttgtgttattacagagcccaaggtcctcaccactaccctgtctacagcctcgtaaggatattgttgtctttcctttttaaatttctctaccatttaatacttaatctgtcttattattttgcagataatacataaaataattgatctgggatatgccaaagatgttgatcaaggaagtctgtgtacatcttttgtgggaacactgcagtatctggtgagacctgttttgtttctttgaatttaagtgtgtataggattctcttatttctgaagatcatgaatatagtaggtcaaaaataaagtagcttttcccatacagtgttggtgtttaaagcattttctcttttgaaggccccagagctctttgagaataagccttacacagccactgttgattattggagctttgggaccatggtatttgaatgtattgctggatataggccttttttgcatcatctgcagccatttacctggtaagaaatggatgagaacttgggcatgcttaatgggaatggaaattttttcatttgtctttttttttctttctttaaktgtttaattgcctttgaaatatacaattaaatataattaaatggcaagaaatcttaatttgtgagaatcactttgtcaactgaggtagcttttgattttataggcatgagaagattaagaagaaggatccaaagtgtatatttgcatgtgaagagatgtcaggagaagttcggtttagtagccatttacctcaaccaaatagcctttgtaggtaagtatattttagttaaggaagtttgcctcagtttctccagagttgtaaaggagcaggagagtagttgtctgtttcaagttgcattatccagtagaactttytgtgatgatgtagaaaccttctatatttctgttggccacatgaggttattgactacttgacatgtagctagtttggctagagaacgaattttgaataaatagtaaatataaatagccacttgggactagtggctaccattttggacagcacaggtctggtggaaacaagaactgccatttaactgtttgacatatgtcctaagaaggctcttaggataatgaagtaaatgggttatttgcagaatggatttggactcatccrtcagarttgtcagtaactaacatatgtggagttttgagtagtttttgatggaaaaaagtttgtcccctgtcatttcatgaatttgaaagtaatttatgaaatggtacagacaagtgatgtgggaaagaaaatggacaacctgcaaaattacctttctaacagtataaagggaaattggaacataatgatttgattttcaccctattttgtatgttttctagtttartagtagaacccatggaaaactggctacasttgatgttgaattgggaccctcagcagagaggaggacctgttgaccttactttgaagcagccaagatgttttgtattaatggatcacattttgaatttgaaggttagtcttaatgggtctactgcataagaccagcattgaaagtaacaagtttatttggaaaattagcataaatacagtttaataatcttttcctgttgcttatttatttatttattttgagacagggtctcactctgtcacctaggctggagtgcagtggcatgtttttggctcactgcmacctgcgcctcccaggttcaagcgattctcttgcctcagcctcccgagtagttgggactaaaggtgtgcaccaccatgcccagctaatttttgtatttttagtagaggtagggtttcgctatgttgtccaggctggtctcgcactcctgacctcaggtgatctgcccgcctccacctcccaaagtgggattacaggcgtgagccattgcrtccagccctgatgcttatttgaaaaagaaaattatattcttagagctgattttttaaaaagtttatttagcaagctgtctcagtttgcttctctgtggtctttgttaattactcctttgaagcaacttttttatttaccttttcccatgttgttgccattatcctcgattcatttatgtctagtcatactggatttgatttggtaaggaaggttcctatctgcctttcatggctctgcacttactccttaacctatagttcattcaatatgtactacctatctcatcttctgaaaatgcttttttattcttctgcccaagaaactaacatagttctttttttttttttttttaacaagtcaagtgtaaactgatctgcttggttttttgggggggctttccctaaccaagttttgccttgtacctgcttctcttaacctttacctcatacaagaccagcttgtcactgctccttatgcctcaaacccgttatctacctttgtgctttgacagatgctatccttctgcctggdtatccatttctgtgtatcttctcacctacactggcatatctttaagagcttttctttaaatggtctctgccacaaaatttgtcatttaaaggctatattctctttctcgtcttccattcatgcatcttcatatagactgttgtcttcttcaatgttgggattgttttacttcttttattaacaatcacccaccctacccttcctaaccatggcattctgtacagagcagggcatgtatcaggttcttagtaaattatttattgatatgaatgagagctatagatagttctattatgcagtgtacccagaaacaactctcatcaatagtstttacatttgtattgattgtttgtagtatacaggtttctaaaattgaaatgagaaattataatcatgtaatgttggagtacatggcgagatagctcactttagtctgcaacccctgagctcaagtgattctcctgcttcagcctccagagtaaatgggactacaggtgtgcgccacctctcctgcctaatttttaaatttttggtagaaatggggtctcactgtgttgagcaggttggttttgaactcctggcctcaagtaatcctcctacctcgacttcccaaagtgctgagattacagatgtgggctactgtgcccgaccttggcatactttattaaatagaaacttgaggccatgtggatgtcattcttggctaacactgaaaagatacctggcttcttcttgatttggtttccttctaatgtgccaaagaataaattatccctcagtgtgttaggaaagcagggctttagttctgtgttgcctctgaaacatttcagctgtgaatgaaccacatctcgcatttgtttcatacttgtcataggaatcatagcatagtttctgctctgaagggcatctgtgagcctcttgttatagggcacggggaaagagtmcacattatggagtttatagtttacagactttaattcagtttgcagcaccactatttacctatctgtgaacctgagcaaatgtctctctatctcaaggacagtaatatcttcctcaaagcatcaatattattatgaggttatgcagaataaggtatgtataaggtactagttatagtagttcaagaagcttcaaggatgcttgttagacatgataataggactgaattttgaagaatgagagtttttagggaaagggtgagggcgggagagatttataggcagcagagcatcatgagcaaaagtacagaagcatgaactgcaaaacagcttggtgttactgtaggacattttcccaaaatgtttatatatattgtacaagaaaggaatgatgtctgtttgattttcacttaaaaaaggaagcaacaaaacagttactgaaatatttcccttttgaaaaaatagcttagcaagtctgattgtatgcatattttccaactgtttattatgaayatctttagatatgtagaagagttgaaagaagtgtactgaacctaccactaaaaataatgatgaaacagtagcatttaattattatttttttttgcctcctctttcacgcccctaaatgtaactatattctgagtctcttcttggttctctctttttccattacatttcctttcttttattaggcagcctcttcaactgtatagctttacttataaactacatatggctaactcctaaagttatttatctctgtagctgtgactcttctgccaaggacttataactgctgtataactgtataactacctggctgttccactggcacttacaacttaatttattaaaaactgaacatatttgttctatccattaaatctacttcttttttttttttttttttttttgatatggagcctcactctgtctcacgatctcaactcactgcaacctacacctcctgggttcaagtgattctcgtgcctcagcctcccgagtagctgggattacaggtgcctgccaccgtgtccagctaatttttatatttttggtagaaatggggtttcaccatgttggccaggctggtcttgacaccctgacctcaggtgatctgctcacctcggccttccaaagtgctgggattacaggcatgagccactgcacctggcccattaaatctacctctatagatttcctacacttcttatttgcactgtcacctttccagttacccaggtgggaaactttggatgtgttgactcttcctttctcttcaatcgatatatccaattattttatcaaatttatcttttgaatatcttaacaattttgagcttgccaggttctcaatttagaaaggcttgcatagttttctttcacttattgaataaagtccagascctttcattggtactcaaaacctatcttggtttcatatcaacttacactcctggacttatctcttactaatgccctgagaggccatcattttaggtacatttgaactggattaattgtattctctgattatgcccatccctttctacttttctgcttctgctcaccttgttttctgcctaaaggaactcttttcagtcttttcccatttcagtctttcatttcaaagtttagctcaagtagtgcctcctttatgaagtgcctgcttcctactgccaagtgtatgatactttacactgattataacacctatcacattttgcctggtaccttagttctcttagtatatcttaatatcttctgtttgactataactgtatggaaggcaaggatcataaggtactcagtttgtatacccactactaccaccacaacacacttaatagtatgtaccaatagtatgtacctaccaatagtaggtactcattaaatattatagtgagcaaaaagataaatttaggttgtatttcctcttctttcttttgcttccttctggcctggagctttggtagtgagatgccatgatgacatactctaatatcctgtgtaaaagtagatgtccattataggattttctattgctataagtggcagctgtcatagtgtgaaatctgcctaaattgggaaggcatggaaagtctcargtagtataattgtattgcaaatccgtatcagttttgaagatttccctactccccttttaaacataaagatttatattaaagaaaagtctcttaataagagaaatactggcaattgtgttatgacatttggaattcacatgaaaaggatcagcttcaggttataaaaacagtttggtatttcttttttaaaattttgttgatacaggtgtggtggctcatgcctgtaatcccagcactttgggaggtggaggcaggcagatcacttgaggtctggagttcgagaccagcctggccaacatggtgaaaccccatctctactaagaatacaaaaattagccagggatggtggtgcatgcctgtagtcccagctacacgggaggctgaggcagaagagttgcttgaacctgggaggtggaggctgcattgaaccaagatcgcaccactgcactccagcctgggtgacagagagagactctgtctcaaaaacaaacaaacaaaattgttaatacgcttttaatttttttttttttttttgagataagagtcttgttctatcacccaggctagagtaccatggtgcaatctccactcactgcaactttcacctcccagactcaagtgattctctcgtgcctcagcctcccgcgtagttggaattacaggtgtgcgccatcatggccaactaattttttgtgtgtttttagtagagacagggttttgccatgttggccaggatgttctcaaactcctgtcctcaagtgatctacctgtcttggcctcccaaagggctgggattacaggtgtgagccaccgcgcccagcctaattttttaaattgacaaataattatacaaattaatggggtaaatagtgatgtttcaatacatgcactgtgtagtgatcagattagggtaattagcatatccatcagctaaaacataatttctctgtgttgggaatattcagtatccctttcttttttctttttttttctttttcttctttctttttttttttttttgagacaaagtctcactctgtcgcctggagtgcagtggcgcgatcttggctcactgcagccttgatctcccaggttcaggcgattctcctgcctcagccttctgagtagctgggattataggcgttgtgccaccaagcccagctaatttttgtgtttttagtagagacaaggtttcaccatgttggccaggctggtcttgaactcctgaccttaagtgatctacttgtcttgtaatcccaaagtgctgggattacaggcgtgagccaccacgcccagcctcagtttagtatttctgtagcaccacttatttgggcatctgtgttaggatttgtaagtggaaataatagtgggccttcaaactaaaaagtgtacagtagaaaaaataatcaacaaaacgaaaaagcaacccaacccatggattgggaaaagatatttgcataccatacatccaataagaaattaatatcctaaatttataagaaactcatgcaactcaataccaaaaatgtaaataacccaatttaaaaatgtgcaaaggacctgaattagacacttctcaaaagaagaaattcagatggtcaacaaacatatgaaaaggtgctcaacaactcttagcatcagggcgatgcaaatcaaaaccacactaagatatcaccccccacctgttgggatggctattatccaaaagaaaaaagataagcgttagtgaggatgtgggagaaaagaaatcccttgtacactgttggtgggaatgtaaattattacagctattgtgggaaacagtacaaaggttcctcaaaattaaaaatagaactactggccgggcatggtggctcatgcctgtaatcccagcactttgggaggttgagacaggtggatcacatgaggccaggagttcgagaccagactgggcaacatgcagaaaccccatctcaactaaaattacaaaaattagctgggcatggtggtgcacatctgtaatcccagctactccgtaggctgaggcaggataattgcttgaattcaggaggtggaagttgtagtgagctgagagatcatgccactgcacatcagcctgcgtgacacagcaagactctgtctcaaaagaaaaaaaaaaaaaatagaactgtaagattcaacaatgtcatttcttggtatatatccaaaggattttaaagcaggcttgtgaagagatatttgcactcccatgttcattgcagcattattcacaatagtcaagatctggaaatagcctaaatgtcctttgacagatgaatggatagggaaaaagtggtatatatacacagtggaatagtattcaaccttaagaaaaagaaggaaattctgccatttaggacaatgtggatgaacctggaggacatgttaagtaaaataagcaagtcacagaaagagaaatactgcgtgatctcacttacatgtggaatctataatagttaaatttaatagaagcagaccatagcatcatagttgccaggggctgcagggatgcgggtgcgggggtgtatgtagagatgtttatcaaaaggtccaaaaattacggcagcaaaagaaaaaaaaggtacaaaaatgacaactatgaagaggtgacagatatattaattagctgaaatgtgataatttcacaacgtatatcaaaacatcaagttgtataactcaaatatataacatttttatatgtcaaattaaattgtcacaaaataaaatatgtaaaagataaagcaataaatcaggagagggggctatgatagatgaaacaagataggctctatgtaaatgatggttgaaactaggtgaggcattcacagggttgggagggggcttattgtactgttgtctatagttttgtgtctttgaaaacatcaattcagatttgtgttttaaagggaaaaaaataatagtggacttggattaatgccttacctttgtagtaaggattttcagcagagagaattttaatcatttgcatatactagtcaatgtaaggcatggagaatgtaggcattaatttcgtatggcttttctaaggatactggaaggaagagaatttaaaatcatgttcttttcaaaagactgaagtccaactctgtggctgtccgcgctgacaggtggggacagagccccacctgactcagcctcacactcacttggcatgtatcaggctacttttactggggctttaggtgagagtgataaaacggttcttacttgatttggggcccttaagcaggttgctgctctgggattaggttgtcttataaaaaggtaactcaccacscataacaatgctttttcctgtttaaagagagacctagttcttctatcagatgatttcttaaggcagcatgaagtagccagacacaaaaagagttaagatccaagctctaccagttattagctgtgtgatccctaacaagttatttaacttagaactctggtttctttctctgtttaaaatggagattaaaagatctaattattggggatgttatgtgaaagtggtttatgcctgtggttgtcttctgttaggcacttcatgaattggaatgtttccttttcggtctatgataatgtttttttcaaaataaataacttaggccgggcgcggtggctcacgcctgtaatcccagcactttgggaggccgaggcgggcggatcacgaggtcaggagatcgagaccatcccggctaaaacggtgaaaccccgtctctactaaaaatacaaaaaattagccgggcgtagtggcgggcgcctgtagtcccagctacttgggaggctgaggcaggagaatggcgtgaacccgggaggcggagcttgcagtgagccgagatcccgccactgcactccagcctgggcgacagagcgagactccgtctcaaaaaaaaaaaaaaaaaataaataaataaataaataaataaataaataaataacttgttcttttaaattgggatttttcttaattttgaaaatttcttaactttgaaattttattgttggaactaacatctattgtagaaaaggaaattgttcagttttcagaatgtcattttataattataaaaggagatctcactttggagaatgagtgagccttgtttaatgtagaaataatgccttttgcccatattcaccttttagtatctggcagcgaatcttttatgtaacaaataatcaataactttacctttttttcttatttatacagatagtacacatcctaaatatgacttctgcaaagataatttcttttctgttaccacctgatgaaagtcttcattcactacagtctcgtattgagcgtgaaactggaataaatactggttctcaagaacttctttcagagacaggaatttctctggatcctcggaaaccagcctctcaatgtgttctagatggagttgtaagaaaattaattataatatccctagagtatgtgaaatctagagggattgcgtgccctgcaatttttatgcatacttggaattccttgggaggccgcacattttgttttggttttgtccttctcccaactcttatcattgctttgcaaggtgaacaggatagaaatgaaacatttgttgttttgaactttgcaagactttttctttggtgccagttttctgctcctgttcccagaccaaactgagggtcaggctgcttactctcgcggcccaataacgagatgcagatgaattgggagagatgggagtttttatttctgtaaccagttacaggtagaaggcctggaaattaccgccagaccaactcaaaattacaaagtttttccgtagtttrtttatcttctaagctatatgtctatgtgtaagtttgcattcatctaaagacataagtgattaacttcttttaatctgtagctgaggtctgagtcttgaagacattcctctggagcctcagtaaatttacttactctaaatgggtccaggtgctggggtgattacccttatcttgtctcctattaaatcacagaggtttaaggagttccttcagacccccaataaacttgtttgtggaggcctggggtttcttcagacccccaataaaacttatttaattctgaacgggtcctgttaagaattcctttgttattttgcttttaggcctgggaaaggcctgggcagaactcttggtaggctttggctacatttcagcctttgtgtaagggcactggctcttccagttttttttttttttagacagtcttgctctgttgcccaggctgaagtgcaatggcacaatctcagctcactgcaacctccgcctcctgggttcaagtgattctccctgccacagcctcccaagtagctgggattataggtgcccaccaccatgcctagctaattttttgtatctttagtagagacggggttttgccactcctgaccgacctcaggcgatctgcctacctcggcctcctgaagtgttgggattacaggcgtgagccactgcacccggccactctttcagcttttaatatttaacttcaccactcagtcgtgctgaaacagttgttatttaggcctgcattagtgagacctggcctgccacactcccagttaatattccttcttggcttggtgcagtggcccatgcctgtaatcccgggactttgggaacccaaggtgggtggattgctgagttcaagagttcgagacctgcctgagcaacatgttgaagccctgtctctacaaaaactacaaaaattagcggggtttggtggtgcacccctgtagtcctagctacttgggagattgaggtgggagaatcacttgagcccagggaggttgaggctgcaatgagccatgatcacgccgctgcactccagcatgggtgacagagcaagaccctgtctcaaaaaaaaaaatttctttttgtatttgaagcccagtactctgaaactactgtgagaacagcagtctcataggtcctgccaaaggataaatgggtggtaaaatatgactgtggtcatgactttttcccccatttttctttttatgactttattgaggcatattatcatgttagttcccatttaaggtgtacaatatagtgattttttatttcttttttattaacttgtcactgacttgatgctcaattacagtgatttttttttaaagtaaatttaccaaattttgcagctgtcaccataaatcagcttaaaaacatttccattaacagtccattaactgttaatctccattctgtccaccccaggaaaccaggaatctattttttatctccacaagtttgccttttctgaacattccatataaatggaattatgtaatatatagtcttgtgtctgactttttttacttgcyttgtatttttgaagcccgtgcatgttgtagcatgtatcagtacttcattcgttttgattaccgattagttttttcactgtatatatctttttgcatttgttctttgggttttggtgattgttcactttagcccatacaaaagtttgggtcttttttcctcaacaaaagtttggactctgttatctgtaagagatatgstaatacacattgattttgttcatttgcatttcaaagtaggaaatctggtgcataagtatttagaaaacctaggattttcaaagatccttgaacaggattttaactgtttgtttctttttcagagaggctgtgatagctatatggtttatttgtttgataaaagtaaaactgtatatgaagggccatttgcttccagaagtttatctgattgtgtaaattatattggtaagtccagtccatttagtggctgagctttaaacatgaattaatataactttgactctcagtatgattagtagaaatggacttttggtgttgtgttctgtatctcatacttgaagtttctatatggagttatatgagaactctgaaaaatggatttatatartttggaaggtgaaaaggtagatattaaatctccatgagatcattcaagagaagatttactttcttgaggatagggctctcacaggagaatgaaacttcactattagttgaacctgctttttaattgtctcttcatagtctaagcatgttcaagtatttatttcatttttcctgtgaatactgcttgatgttcaaatgttttaatttatcctgtgaaaattattcttttcttttgaacaagttaagtgtttgatcactgtatatctgtccaaataaagtaaagcacaaaattgtaaaatcaagaacaaaattgagcagaggggctaaaatgtatgtaatcttacttttttaaaagtctttttattagttttcttttgaatttttcttttaaattgaggcagtttacatagagtgaaattcacagatcatatagtttgataacttttgacaaatttagatacttgtgtaatccacaccacagtcatcatgtagaacatttctttcaccttagaaagttccctcatgtctcttttcagtcaactccccttgccccagactttattactattttactaatggactttttttttttaagaatggttttagatttgccaaaaaattgggcagatagtacagagttctcatataactcccctcactcacgcatgtagtttttcctattgttaacattttacctgggaggcggaggttgcagtgagccaatgtcacaccactgcacttcagcctgggcaacagagtgagacctttctcaaaaaaataaataaaaaacataaaatatttaaaaatattaaaaagtaaaaaaaaatctattttacattagtatgatgtatttgttacatttaatgaacccatttattattaattgaagcccatactttattcacatttccttcatttttacctaatatcctttttctgttctaagatctcatcttagaacacattacatttggttgtcatgtctctttagctcctctttgctgtgacattttgtcagacttcaaatagtccttgtttttgatgaccttgacaatgacctgaggaatactagtcaagtattttgtaagatgtccctctgctgaaatttgtctttttgtttttgtttttgttttgtttttgagatggagtttcactcttgtcgcccaggctggagtgcaatggcacaatcttggctcactgcaacccccacctcccgggtacaagcgattctcctgtctcagtctcccgagtagctgggattataggygcacaccaccacgcccagctaatttttgcatttttagtagagacagggtttcaccgtgttggccaggctgctcttgaactcctgacctcaagggatctgcccgccttggcttcccaaagtgctgggattacaggcgtgagccatcacacctggctcttgtgtgtattcttaaacctggattgttggtccagaatatgaaatttattattcagaggtaggaaagactcagaggagatgggacttgatttagaacttgaaagaaataatttggattagcagagagaaaaagagtattccaggttgcagaaaagcaagcaaaaaagacagatacaggaataatctcaagctctgtgagtgtagcgattgtgtcatttttatttccccccttgtatgtggagcggggcttaagtattgcaggtgctctgtaaatgtatattgaactgaattaaatggaaacaagtggttcttttagcatcagtttctagcatctatgggaatcctgtttgtgtggacaggaaatcacaaagaatgataaatcaactctaaaatcctcaaaagtaactaacctcccttgccctttttctcatcttcttgtatatagtacaggacagcaaaatacagcttccaattatacagctgcgtaaagtgtgggctgaagcagtgcactatgtgtctggactaaaagaagactatagcaggctctttcagggrcaaagggcagcaatgtaagtggattctgttgtttataagcacaatgcaatgtgcatcatatactcaagaattaatcttgccggttttcactaatcaatattgcatgtaatagtaacatactgggccaatttgaagtgtaatgttctgataaacttgtagaattcttactaatggactgagaccattctattgtaatggcttgagggtaataattcccatacggtcctagtataaaaagattgtttatcacaaaatattataggcaggaagtctttagagatcagattctagagctcagttatttctcatagattgataatagaaacttaggctttggccttgtggcagtttatgtttttacattattgttcaatgtttctgaatgctgataatatcttttttctttttcttttttttcttgctgtggtttaggttaagtcttcttagatataatgctaacttaacaaaaatgaagaacactttgatctcagcatcacaacaactgaaagctaaattggagttttttcacaaaagyattcagcttgacttggagagatacagcgagcagatgacgtatggratatgtaagtgtctgtgtaatgtatttgaaaggagcatctggtttcttgaagccatctgttattttgccttcttaactcagccagttgttttacttaccttcacattagaacaagagacaggacaacttaaattaacataaaccatgtttgttttgaatgttacctctttttttaaatttgcttagttgagcaatttagcttcacaattgggctaaaattatttagctctaaaaaaatacaggtgcgatttaataatcttgaatttcaaacctgattttaaaataaatacaaaatctggacttcttagccagtgctgtggactgaatgtatcccccccaaaatacatatgttgaaattctgaccctgaaggtgaaggtgttggtaggtggagcctttgggaagtgattaggtcatgagagtagagccttcctgtttgggattaatgctcttacaaaagagacctgaatgagatccctcatcccttctgcatgtgaggacagagcaagaagatggtcatctaggaaccagaaagcaggccctcaaatctrccttgttcttggacttcccagcctccagaactataagaaataaatttctgttgtttttatggcacttagtctatggtattttgttatagtagtccaaatggactaagacaaccaggggagtcttaaactgcttacttttctgtaaataatgacacaaatattctaaggctatgtttttttcaaaccatctactgtggagtcctactattttttagtgtacacagtctccaaattttccatatttgactccaagcttatctccttcagatgtactaaggaagtgtaaaaaaacagagttaaaatatgagtaaattgaaggagtcatactaccagcatttctgttttcttttataaaacaaatcctttttaggaaacaaatacttgtttcctaaaaacatatacttgtcctgagcaaactmtgtgtatctcagagtaaacaatcaatagtgtccagttgggtgaatgaatttactctccagaactggttttattaatattattgatattttatttctatttatatattattgatattttatttctatttgtatattattgacattctggtgagtgataaaacattataattatttcattaaaatatcttagacttgtcaaaggcttattatacaattgttaaagaaaaatgaggtagatctatatgtgcttttattaaaagatcacctaagtctttagttgacagttttaaattgtgggaaaaaataaagagtatacagatgttttcacttgtgagggagcaggctatgtgtctatgtaacagataatcatagtaaggtcccttgaggtggatggtagaggggtagaagagagagtcttttctgtttatatccttttatagtatttaatttttaaaaatcatattcaagtattaaatttcttttctggccaggtggtgactcacgcctgtaatcccaacactttgggaggccaaagcaggtggatcccttgagctcaggaattcaagactaacctgggcaacatggggtagaacgccatctctacaaaaaatgtaaaaattagccgggcatggtggtgcacacctcagctattcaggaggctaaggtgggaggatcgcttgagccctggagatagaggttgcggtgagctgagatcatgccactgcactccagcctgggtgacagagtgagactctacctcaaaaaaaaawtttttttgttgttttttcctttatccacccatctgcacactggtataaatatatatatttttaagaaaaaagtcatctgtattcatttcctaagggttccataacaaaatcccataaactgagtggcttaagcaatggaaacttactgtctcacagccctggaggctaaaagtccaaaattgaggtgttggcagggccatgttttctctgaaatctgtagagaagaatctttccttgtttctctctagcttcttatggtctgctagccatcattggcattccttggcttacagctgcagcacctcaatctgtctccattgtcacagagcattctcccctgtgtatctgtatcctgtgtctcttctaagtacactggtcgtactggactaagggcccagaccattccagtatgagtattaatttatctgattacttctgtaatgaccttatttccaaataggtcacattctgaggtattaggggttaggaattccacatatcttttgggggaccacaattcaactcataacacatctttgatgttgatatggcaaggaggcaggcagccagtaattaaagatatggctatttctgagataaccaatttagacttttcttttagcttcagaaaaaatgctaaaagcatggaaagaaatggaagaaaaggccatccactatgctgaggtaaaatcattgacgtcattctgtatacttattaattcttgatgtctccattagaaactatctttggttttgatatataaagagcatttttcatgtcattcctgaaattcagacaaaattctagtagatgctttgtatataaagagggatgtatcatagtgattaaaaacaagggctttgggaaaattacctagtgcctcactgagcttcagtttcctttatttatttattttttgaaacagggtctcactctgttgcccaggttggagtgtagtggcatgatcaaagctcactgcagcctcgacttcccaggctcaagcagtcctcccatcttagcctcctgtgtagctgggacaagaggtgcaccaccatgcctggctaacttttacattttttgtagagacggggtctcactatgttgtccaggcttgtatcaaactcctgggcttaagcaatcctcccacctcagcctcccatagagctgggattataggcatgagccaccacatccagctagtttccatattatagggacaatttcttttctagtagggttatgaagattaaatgggagtcagtaatggtagttgtcactattatttttgtgactggtttagataggatggctgcacatcctggtttacctgggactgtcccagtttatacttaatgtcttgccataattatcagtagtagtccctttcactctcaaaattatgccggtttggacaataaattatatggtgtccctaggtatagctcattctctaggtggcagattttttccccttatcctgtacatttgtccacggtcctaagttattacactccttaatgtcagtacttaccctgaggatgtgggtggggatacccatggtrtcctggggtgggaaatccaagttctttatctttttgtgtccctattcaaggtagtggggaccagggggcagtcaaaatcatagagccaagatacaagtaataccaatggttttggtggtcctttttctttcttgttagttgatacctgttgtagctttttgcttctccggaggtaaaagcaaatactagtagtttactgttgtcaggagagaaaagagagaagactaagactaagtatgttcttatgtgaaagattaagtgtcagaatctgaagaatagaaaggctttaacaaaatcagtgtttcgtattatattatttagttctctaatgaagcagcaagtcattctgtatccttaagatctgaattttgtttcctatgatgtagtggtaagcctttcatttcctttgtattttcatcatattttaggttggtgtcattggatacctggaggatcagattatgtctttgcatgctgaaatcatggagctacagaagagcccctatggaagacgtcagggagacttgatggaatctctgtaaggatgcacttgtgttgttggtcttgacatctgtaatattttgtattctttctgcttacatctggcaaattaaacctctagtggttcttttctatagttttcctttccccaaatatattggcattatatttaaaatggaagctttttctcagtcacaggaaacttcggaaataattctttgggttggccttttttggtttttaataaaagcatttatttcataggagtgttaagaattttccaagtataactaagttacaaactatttccctactcattatayctctggtccaaggtattgactcttaaatgccctaaaacttgaaattttttctgaattaaagttctggattaaaaacttcagatattttctcgaattataggtcataatttttgtctttttaagtgtctgtggtgcagagatgtccccatgatagatcagaatagatatgaactatattaaactttgcattttaagaacttgtatagttcttattactcaatacaatgctctgtgaaatacttgttggcaatatgaacttgctttaaaatgggttcattattcaaataaaatattgtttcaagttgtagattaytgaagtcattaaattaccttcacttatcagagcgtgttttctcttttatagggaacagcgtgccattgatctatataagcagttaaaacacagaccttcaggtaagacacttctaccacagtgcttgaaggcattttaggtaactatcactagcctaacaaatgtgggggatctaatatttttaagttaaaaattttcttaaagctgcagaataaattccagttttggtattgccattgagacatggtataataagctttaagattgtgagaatttaggagatgataaagagaaagtaacagagaacgtgaggtagaaaaattttagaaggggacgtgaaaagaaagaatggaagacagaaaaaaggaactcagagaggaaaaagcagcaagaaaatgtttagaaagatggaaaaaataagtgttgcttaagattagagaggttgggccagttgtggtggctcatgcctgtaatcccagcactttgggaggccaaggtgggtggatcacctgaggtcaggagttcaaaaccagcttggccaacatggtgaaaccccatctctactaaaaatagaaaagttagctgggcatgttggcatgtgcctgtaatcccagctacttgggaggatgaggcaggagaatcgcttgaacctgggaagaggaggttgcagtgagccaagatcacaccactgcactccagcctgggtgacagagcgagattctgtctcaaaacaaaacaaaaaaatattatagaggttggaaagaatttgaggcagtgggttcaggtatggaatggttagagggaaggcctgtgctgttctaggccaaagcagattgctttgaaaataatgccttcatctgcactggtcactgatgacttgttttgttggcaaaataattccagttgaacatctgctaaatactgagcaaggtctgctggaaagagtactggatggggaatcagaggcttgaattctagattgagtaatttactgaccgttacctcaggcaaatctgcgtttcccatttcctycttctgcaaaatggggttgaaacctarctttcctactcagtgagtatattgtgacagtgtatttaagaggatgtttgtgaaaatgctttgaaaactataaactattatgtacttgcaagatattatcatttagttaaaaatttgttttgaagggtaacagaagaaataaagtctgtgccctaatgtgcattatacttaaatgcatgttaaaaaaagatatacttttacactttaaaatttgtagacacatagcaacacatgcaaattaatayacatgtgaaattgtatttcatatactattttcacatttaaaaaataacattatctcctcttatactgcttttattttactgaaatgtattcagtttagtctgaccagcagttctcaaaatgtggcatatggacctgtgagaatccttgaaactttgtcagagagtctgtgaggttagaaccattttcataataagatgttatttgcatttttcaccatgttgacattttcattgatggtgcaacataaaatggctttcaccttagtatgaatcaaggcactagcgccaaactrtgctagtagccgttatattttttaccaccatgcagtcacagtttttaaaaaatgacagtttcacttacaaatgtccttgataaagcagtaaaaatattattttatttaaatctcaacgcttgagtatgggtttttaatattttgtgtgatgaaatgggaagtactcataaagtgtttcttctatacagtgaagtatgatggttgtcttaaggaaaaccacttcagtaattgtttacgttgctagttgtctggcctctttcagggaagataccatttttacttggaagagcaactgtcaggcaaactatgattattcagatttgcatacgtgagataatttctaagaaattaaatgaaaataaaaagtatagcacacttattactttaagggaaaaaagcagtatttgttgtcaatgataaaattccatgtttcaagcaaaaagaattttagaaaacttgtatttaccagctggaatgacagcttctcagtacttaaaaacttttctgatgagattagtggtgatatcagaaaggtttgcaaaaatgtaaaacagtgcaagtgttctcactcaaatttttttgttttagaaaatatcgttttttggtttttgtttttagaggtgggctcttgctatgttgaccaggctggccttggactccctgggttcaagtgatccttccacttcaggcttccaagtatctcaagtagcagtaaccagtgaaaggaggtggctctcgtagatatgagtatactgtgtagacacatgtatgtatagcacttagcatgtctgaggaaatgcagtatgactggagtgtagagtttcaggagagagaaaacctaaatataggagagagagaaaacstaaatataggtttttttgtttgtttttaataaaaacatgttaatgggcaataggtttgttatttttaaatgaattaagacacgagtatttttaaatttctgtttaattcctgaaaaaccctttggggttctcaagaattttctagtgtaaaggkgtcctgagaccaaaaagtttgagaactgcttatctagactattctcagaagcttggctgctcaggaaagaagagaggtgggtgagtagctaaaagttgatgtagagtcaagggaggtcacttctcagaaggaagacttaaacatgaggtgccacatgatgatgttttggttaacaacaaattgtgtatactatggtagtcccataagattatactactrtatttttactatgtattttctatgtttacatgcacaaatacttaccattgtgttacagttgcctacagtattcagtacagtcacttgctgaacaggtatgtagcctattgtcaaaaggctataccatacagcttaagtgtatagcaggctgtaccatcagggtttgtataagtattcacacagtgacgaaagtgcccaatgatgcacttctcagaacatatgctcagggccaaaaaagcctgtggagagggaggtccctgaacaagttgagagattggctccaaagaacagtaggagggattagccttgatactattgatattggaaagagaatgagtgtggatacagatacttttttgggagtagaggttggaagatcagggtcttactgccttatggcctcttatcctgcagtggtaagtgaggttaactgaaatggaagaggtgacgacctcatagatttgaatagagtgctaaagacttctaaaagccactgtgtgcagtggaagatgttgttgacccaaaacattcattaagaatccaggccaggtggctcatacctgtgatactagcgctttgggaggctgagacaggaggatcgtttgaggccaacagtttgagaccagtctgggcaacatagtgagaccctgtctctacaaaaaaataaatcaataaaatttttaaaaagctgggtgtggtagtgtatgcctgtagtcccagctactcaggaggctgaagtagcaggatcgcttgaggcccaggaggtcgaggctgcagtgagccaagattacactactgcacttcagcctgggttgacagagcaagactttcttaaaaaaaaaaaaaaaaaaaacccagagcagaaatgaaaaacctgtgaattagcagtgacaaatagtgaacagtaatattaattttttgttgataatttagtagcttggatacaggaactgatagagcagatggttggattaatccaaggttaggattttgctgatggaataagaggataaaaaggttgaagatgttaacaaatagtgatttaagtgatagaagttgtagctagagtaaaatattaaaatctaagatttcaaatrgagcaagtccaattctttttctttaatcaatatttctgggccaggcgtcgtggcacatgcctgtaatcccagccactttggaggctgaggcaggagaattgcttgaaccagggaggcagaggttgcagtgaaccaagactgtgccactgcactctagcctgggtgacagagctagactccatttcaaaaaaaaaattctgactcccagttttctggctaatgaatcagataccacagatacacagtgatagcatttgtttaggttatattttttaaaactttgaggyagccctgtcaacataccatgaagctcagaaataaactgctacccaggtagcttctttgagtgtcaccttgagtgacaaactgtaacaagattgtgtctgtcattggggcctattatataatcacacttgatttgtggcctctattgtcttttctagcttagagttgacttgaatctcttgttcatctgaaatggttaaaaccagctttcttcattatcctggagaaggctaaagttctgagggctttcactgtcttaaggagctagttatatgagaaagctcttggcttggtccatggtatttaggaaggaatgctgtttggagaagaacctttttggagccttgcatttgattgttggtgaggaggagacaacagagatgtgtggggaataaagttgggctatgggggaagtatttggagtgatagataacaaaggacacaacgttttttaaacctcctttgatgctcatcatttcctttttggtaaaatgggggtaacaaaagtagtcttctcacatgactgctgtgaggattaaatgggaaaattataagcagagagtagcaaatattattattattgcatttaggcttaattattgtccaaagaawataccagcatgatgcataagcaactttcaactcctttagccattttctgaaatataacaattaatgatttttttttaaaatcgaggtcacattttaaactgtagaacccattgtgaccaacagccatcccatttgagggtatctggctgctgccagttggctttaagatgtcatactgccctcaaatggaactttcaggatgtctacaggtccctttactagttggtttcaatgagcttttttcaaagtttttctgggttgtaaacagacggataaacatgaaattccaagcaacctagttcaagggcctccttcctttaggtaatgaaagtttgatgaattgtcctactgtttctaaatatgtggttartcatccaagaaaaattgttcccttggccagaggctgcatttgtgtctagggcttgggttagtatgggttaaagatagccaagactattgttctcaagcacaggcaactaaggtctcttactgataaatttatatatacattatacacctgcaaactttattttttatatataactagattttatttataggtaatctttatatcttttatcttaacccaatttttaatttaaatggagatgtttattaattaaaattagtttcagagtttcagggatttttgagraattttttgttyggaggctgatatgttacagaagaaaggttatatccactgactgatgtcttttatagatcactcctacagtgacagcacagagatggtgaaaatcattgtgcacactgtgcagagtcaggaccgtgtgctcaaggagctgtttggtcatttgaggtaggaaaattgcttcatttcctactgaaaaaccaggatacgtttatcttgttcctctcaaagtacaaaagccctctttggtaaagtatacttacccaggaagaattctgaaggtaccttgggtagcttggccatagctatctgcatttatgtgtccttttgtatgcattactttggagataagtcattaaatctgatgctgattgtggttcatttcctcmgctgggttttgggaatatggtgtacagtcttggggcatgtgaaagtgtctgacactgatttaatctctccagcaagttgttgggctgtaagcagaagattattgatctactccctaaggtggaagtggccctcagtaatatcaaagaagctgacaatactgtcatgttcatgcagggaaaaaggcagaaagaaatatggcatctccttaaaattgcctgtgtaagtaattattaatgaattatttaatgtgacatkgagttgctattattccttgcaaaggggatttttatcagcatgaggtgggccctcttgaagacatgtatattttgcattgggatgacatccatgttccttgcttggtgtccagactagcaattgagatgcaggacttattatcatctctcctttccaatttctctgttgttatactcctcttagcccttgactactgtggtattccaacctaacttggggatagatgtacctgcctagataatgaaattgaccatctattcaactgggttttttttttctttcttcaactaaaatggtataagatgagtggatatatttggttttagtcaatgaagaaagggtccaaggacaggttactaatggtgtgtaaaggtgggaayagttttgtactgaaatactctggttgtgcatataagtagtaacrgaaatgtaagtcttaggaatatgataagaaattgtgtgaatcaacagagatgcttgcctgtaatcttttgatgtttttttcttttccttcagacacagagttctgcccggtcccttgtaggatccagtctagaaggtgcagtaacccctcagacatcagcatggctgcccccgacttcagcagaacatgatcattctctgtcatgtgtggtaactcctcaagatgggtgggtttactttgtaacaatagatagctgtgttttcatagcagtggtataggaatgaggcagtagttgttaaggtagtcttctgtgccttcagaccagggttgagtcctgactatccctttgtaataatcttaggcaacttacttgacttttttgatgttcatatttcctcacctgtaaaacaggaatgtctcatagaactgctgtggaaatttgattagacaatgtatataaagtgcttgggaaataaatgttcagcaaatgttgcgtattattagctcaaatgttgcttattattagctaagtccaagttctaagtcctttcttttattggcttattactttcttttactcaaaccttactccttcattaacagtttatgagaaattatgctatcattttgcatttatcattttggggatccttgattacccttctaataaatttttgagatctattttataactttgtatttctaagattagacttttttcagtgttttaaatcagttttgcaagaactcagattccaagccctrtattttattaattcctactcttttgctaaaagctgaatgactatccatttctgttattttctcagcttaagatgtgccgtatccaaagccagtggctctttgctagcttgtgtattgtcgcttttctcacaactcatggagacctctacagcaccagcatttcctggaagctctgcccataattagttttgcagaagtgcagccatgttacatcactgctcaggaggtcatgcagttgcacattctgtactctacttttatgagagaaaagcacatggcaggaaggcaagctgatatcaggtattttatttttttaaagaaagcaagttccagggtatatatcttggggtcattatacatgtggcccaatgcagtacacctacaactgtagcacaggctataattaaatatatagactttacaaaatactccagtaatcagagttgaaggaagtaaaatttaatactttacttacttttttgcctttattaaaggcatttaagttttttagcggatgttaatgtttacaratgtcaccacaatacaggtaatttccaatttgaagtgtagttgcttgcaaaagtatatctgacagacattttcaatgtattttctagaaggaacacattatattttgttttgagacggagtctcattctgtcgcccaggctggagtgcagtggcacagtcttggctcattgcaacctccgcctcccagattcaagcagttctcctgcttcagcttcccgagtagctgggatttcaggtgcgtgccaccatacctggctaatttttgtattttagtaaagacggagtttcaccatgttggccaggctggtctcgaactcctgacctcaagtaatccacctgcctcggcctccaaaagtgctggaattacaggcatgagccaccatgtccagccagaatacattgtataagaaaattgatttcaattataatgtacctgtggtacttaactaccaaggattgggaaccgtttgaccataatttttccatctgttggataagagctgaatcagaatgtcattctaagctaatagtggctatcatccatgacctaaaacggactcttgttaggggactgaagattggcaaagggagaagctagaggccatatagaagaggaaagcatgaaggtagaaaccacaatcaggactgccttcaaatatgaacttccagggatacttcttggttctgggtagctcccccaccacactgttttcttttgctgtcctcaggaatcagcttgcttgtttcgtttcattgctatcatctgtagtttctaatgagtttttcactttctgtgatctctacagaacagattttacttttctctcttctcccctacatttgtgtctgtgaagtatgcatgctggtgtttttactacttttaaggaaagagaagtatttagaaacaaaaacgtatttcatctgtctttgccacaaggattttttcctccctagttacattttcacgggaaaaacaagttgtacataagtgcatcttacatttcagaggaaagtcagactggagttatagtggacttcttatcattagttaggtagaggtagaggcagcagcctggtcttaacaggactctgcctctgtagggagggatgaggaaactaaagactacaggagtcaactgcactggggtactgggttacaggaaggctagtgatcttgctaacctagaagactagaaagtagaggaaattcatatgcccttttcctgagtttgaaaaggctttgttctttcatctcacagggagacttcagcacaaatgatagaagaaaatttgaactgccttggccatttaagcactattattcatgaggcaaatgaggaacagggcaatagtatgatggtaagttttgtgtggatatgggtgcctgctttggctatgttgggtgcaaaaggtttaactttccatgctagccttatctggcatttgggatgcatatgggaaatagaagaactcaagaggaaagagcatttggggaatatcctcaaccttaaatccttatctgccgttactcagggatatactaggattatgtcatcaattatcttcaataatagcatttttggtcaaattaaatgagtggtaagcttcttcacaatgtgaccattgaaattgaatggtttgttctgtacctttttgcttcagcaatcaattttctccattaagatgggacttgtactttaattcagatatggtacctcccgaatagaaaataaattatgttaatatagttgtaataataagtgtgtgttaagatttggttactataaactactgatttgttaaaacttgaggaaattaccataaaatgtctactgaatcaatttttcctgcatttagtcttaatgtcaattctgtayatttcctctttcattaagaaaaatagcagtggccaggcatggtggctcacgcctgtaatcctagcactttgggaggccaaggcaggtggattgcttgagcccaggagtttgagactagcctggccaacatgggaaaccctgtctttataaaaaatataaaaattggccaggtgtggtggcacacacctgtggtcccagctacttgggaggctgaggcaggaagatcgcttgagttcaagagtttcaggctgcagtgagccgtaatcctgccattgcactccagcctgtgacagagtgagactttgtctcggggaaaaaaaaaaaaaaaaaggataatggtggccagccatatgacatgtacctgtagtccgagttactagggaggctgaggcagaaggattgcatgagcccaggagttcaaggctgcagtgcattatgattggacttgtgaatagccactgtactccagcttggcaacatagcaagatcctgctctcttaagaaaaaaaaaaaaaaagaaaagaaaaggaaagaataattgtttacttcaaatatttatgaaaaaaactctgaaatttttttaaatcaggaaataaggtaaatgaaatgatttttcaacttttgattatgaaatgtccaaacagaaaacttgcaaaaatgaacacccatatacttataacttatagtcaacatctaattgtaactttttcatgcctggttttagaatcttgattggagttggttaacagaatgagttgtcacttgttcactgtccccaaacctatggaagttgttgctatacatgttggaaatgtgtttttcccccatgaaaccattcttcagacatcagtcaatggaagaaatggctatgaacagaaactacatttctactatgatcagaagaacatgattttacaagtataacagttttgagtaattcaagcctctaaacagacaggaatttagaaaaagtcaatgtacttgtttgaatatttgttttaataccacagctatttagaagcatcatcacgacacatttgccttcagtcttggtaaaacattacttatttaactgattaaaaataccttctatgtattagtgtcaacttttaacttttgggcgtaagaccaaatgtagttttgtatacagagaagaaaacctcaagtaataggcattttaagtaaaagtctacctgtgtttttttctaaaaaggctgctcacaagttctatttcttgaagaataaattctacctccttgtgttgcactgaacaggttctcttcctggcatcataaggagttggtgtaatcattttaaattccactgaaaatttaacagtatccccttctcatcgaagggattgtgtatctgtgcttctaatmttagttggctttcataaatcatgttgktgtgtgtatatgtatttaagatgtacatttaataatatcaaagagaagatgcctgttaatttataatgtatttgaaaattacatgttttttcatttgtaaaaatgagtcatttgtttaaacaatctttcatgtcttgtcatacaaatttataaaggtctgcactcctttatctgtaattgtaattccaaaatccaaaaagctctgaaaacaaggtttccataagcttggtgacaaaattcatttgcttgcaatctaatctgaactgaccttgaatctttttatcccatttagtgtgaatattcctttattttgctgcttgatgatgagagggagggctgctgccacakactgtggtgagggctggttaatgtagtatggtatatgcacaaaactacttttctaaaatctaaaatttcataattctgaaacaacttgccccaagggtttcagagaaaggactgtggacctctatcatctgctaagtaatttagaagatattatttgtcttaaaaaatgtgaaatgcttttatattctaatagtttttcactttgtgtattaaatggtttttaaattactttcttgatctctattcattataaaaatcagattataataaaacagttgaatatggcttaggaaaatatgaaggttccatgaagtggaattaagagcatagaataactgtactttccttaggaataataggacttatggtaaaggtagtattgggcaacttctttaagagtgttttcctctgaaatgtcctatcaccactatctacatctaaaaaacatgctcgattcttgccctataaactgatgtcacagccccaccatccccatttttgctagtggtatcattttcctagtcaaccaaattttttagtcatcacatatcactgttcgtcatctattataataggcagtctctctcttgtttccctggttttagaagattttagtaataaacatttattgggtacctgttacttggagggtattaagctagatggcaagatctgaaacaacataggcagtatagtaaaagtgcttatctgggagtctgaacattacaagccatccaagcattgcaattattgttaaggattattttcaatggtcatgcattttctaatattttaataattggttaaagatttgttatagcgtgggggccgctgctggtgtgtggctggggttatgtcagggcagcctgatctatataatttgggcagatggtgtgagtcagaacagactattatagtgggatccccaaacttgcttttgatgcatgagttggaccactattttttggtgggtaacaacttttcagaggggaatggcagttgtgaattgtatacatttcattctttaagcaatattatgaaaaacttcagagaatgtctacagaaaacagggtatggagcaagttattttccattctttttgctttttggaagttaaaatagctaagctctgcaaatatcatttatttggaacagataaggtcccagacattcctagataataaaaatcaaatgaatgatacaggtaagtgtatttattgaagggtgtgggtagagtggtctgggaagtcttgctttaatgaagacggattgattctatttacctcttcttacttccactactaagtaaccctgggcctgcagtttcctaaccacttgacttccttgccaacagtctgtctccactttcagccgttttatagattcattggccctaaagcactgctttcccatacttccctacccaagagggcaggggtccccaagccctgggccgcggaccggaaccagacagtggcctgttaggaaccaagccggatagcaggaggtgagcggcgggcgagtgagcattatcgccttgagctctgcctgctgtcagattagcgagtggcatcagattctcataggcacgcgaaccctattgtgaactgcacatgtgaggtttgccggctccctgtgagaatctaatgcctgatgatctgaagtggaacagtttcatccccaacccacacacacccccaccccgtccgctgggttagaggactttacaaccctagtccaccttgtccagttatagttccacctctagcctttcaaggcttaaaccattaatgtccttaatttctcttgtattcatctatctcccaactatacctttttccttcccttttttatttttggcaatatgtgcccatggttttttaatttaaaacgaacagaatatgtagtgacgcctaccatagcactccttcccatcacacaagccttcaaggaaactgaagtacttactttggtctccctggaggattccctccgcctcccgccccatgtgcttagcaattctgttcctgtagtctggatggccttcataaagccctcactggaccagcattctggcacataataggaacacttaaaaaacgagagaatgatgccgttatatctaatatcttcctcttctgaactttcacagcactttatttgcaacaagtttagttgctcctgaagggcaggatctctgccggaagcaagtgcgtgccacacagtggggctccgcatacactgcaaaaggacaaataaaccgaacagctaccgtttgagagtgagcgagtgggttctctgcacaagaacaaaccaaccagtcccttgtccgaaagggcgtctccttttctctgcttcgctgctcactccagactgcgggctgtcctcttccgaagcagttaaccagcagtgtacagaaagcgacttgcctccaaaggagcctgcgcggcccgcggctaggagaattttgtcccatgcgctccccgtctcactagccgcgggccggggctacgccgtgtgcgtccccgcgcagccgcagtgctgggcgagtgggcggggccggctgttggcggcggttggctcggcgcgggagtcggctgcacgtgcgggcgggggcgatgcgtcactgatcggtgaggcgcggccgaggggtcggctttcctcgcgagcctgcggctgggcttcttctcagttagtgccttccacccgggagcgacccttgggagagggagtttcaggaagctcaccgagcaggggcggcccactggcctccgggggcggaggagttggcaaggggtcagcgggctcagccagaagggaagaatgaggggacaggggtactggactccccggctcagcctgcgagagagcgccaagtttccggagggagagggtagaaactggagggggtggacctgtcactcacgggactgagggtccttttctcccgctcccaggaggaacgagaatgaatatgactcaagcccgggttctggtggctgcagtggtggggttggtggctgtcctgctctacgcctccatccacaagattgaggagggccatctggctgtgtactacaggtgagcggcatgtgcagtcagttagggctctagagcagattaaaagggtactccagagtggagtctgggaagttgttccctctgcaacgttcgggggcgcatgtcccatctctagggagagcacgggggtcgaagcgggcttttgcggagcaccctccagatgttggacagttttagtgctatgttcgttttgttgcagagattaagtctccctacggttattcctatacacagcaaactcaattatttgtagaaaaatgaagaaggaagaaaggaagtagtcactctacctctaactgaagagatggataaattatagttcgttcaactgtacaggctttagtttgccgctgtagatgctgtatgtttatggttgtttcttagactttttcatttaaaagcttccagtgtctggttacgtcttgtaacaccatgatgactgtgatggtgcttatgtccctggacctccagggacataagcacaacactgatgggccatgctcctccctccttactgttgctgttcaagttggggacaggagtggtgtgggagctgttgctctcttgttgagctcgcttagcttttccttcagcctaattaccacaagttccttttgatacagactagtaagagaggccagtttgtggagaaattgggataatggtgtattcaaaaagagcgtcaactttttgcttgtttccactatccctcaaaactgatatttctactttcaaatccatcctgaatcctagaaaaagagcaattttaatggtatatcttagcagatggagctctacataagaaattacagattagtccagatttccttccagtttaaaagcattgtctttctgacagtaaaaccagagaaaggacatttcaaggaatgactcaaagaattagtaatgaacctcaaacagttcatctttccttgttattatgaccttgcaaatgtgtttatattttcaagaccggtagctaagttctatgaatttacaaggtgcaaaataggactttgttttctttgctccccaaatgcctcctttttataatttccagggcttgctttcatagttttcacattccaggatttggttaacaagcccttatgctatttatttgtatagtcttgtcacccttcatcttttcatgctaattttttgtttttatatagaaattttatgttcccagtattttaattaccttgtagatagatcgaaagaattataagcctcagaaattttctctttacttcaaagtttgcattgtctttttttcaacctggtgattaaatgtattatatattttgatttggctcttgttatgtactattaatgtacctctactgaaagccattagaattttttaaacaaatatttctcagaaggttaaagaccgaggagaatcctttgaaccttagagcagtgctggagacccagaggtacggttggttgagcttatgaaacaaggtgtaacattggcagtttaatttgatctttttccctttttaggtgtggaggtattttaagcagttgttcattatgagcaattcatattagtgaggctttagtaggtcagcagcatgagcaagagtgagtatttattatagcattttagatttggaaagataatttttctttttataattttgtcaaattgaaacatctttttgcaggggaggagctttactaactagccccagtggaccaggctatcatatcatgttgcctttcattactacgttcagatctgtgcaggtgagtgattcctaggggaagcctccataccagatagacaggcatgacaggagttaccacacttgtgggtggagatagatttccttattgcttaagcagatggtggtatttacttaaatgcagaagttaacgttcagagtacagttgttacaacacaagttatgatgttaaaccacctcacttacttgaaatgaattaaaggtatgaaccaggaagcttggaaggactgacttctaccatctatatcgtggtatatagcaaattttctgttgctgctgtcacaataaaagtaagaattagaaacacaactagacatacaaaccagtgattatgtggtttagaacagtgtttagtttccatagaggcaggctcctgggctactgttaacatggaggatcaaaatttttatacacagcctttctgcctcatgtttttttgcctggtatattaagcacaattttatgtggaaccttagtgaatgttatattttgatggcatcccgggatatttgaaataagtgtctaatcctcgaaaagtgtcttggccatgggagacaataaaataagtatctttcaatgtaacaagatgacaaaaccaggattaggctgtgaccactttcgcaagcccagtgtgatcataaatctttggattcagaagtttgtctgccatctgctgctaatttttcaggactcaggaaaattctgtgttatttaatcttgtaatcttatgtctaggcttcctgctaagtgagagtttaattataaattcttaaatcccctaggttttcttcctgtccccttttagatggcttagggaaagaattgtgtctactgaagtgaaatgtattcttcccctaatcagactgatttccatatgttgttccatatttattttacccattctttccttagttcatgccatcacttctttatctgccatctcactctccattccttctctcctgtctaaatcttgccaggcttttaaaggctcatcccagattcttcctcttctgatctatagctcttaaagtctatattgtaaattttggccctttgtcttattttctttaatattgttgtcttgcattgtttgctaagtttttttatgtgttttctttccagaaaggctccagttttcttaaaggcaggagttgtaacacatttatatttctggctttctatttatggtggaagttgttaaattgagctgatttctcaggaagcaatgtggtgtaatgaacatggggacccagcgttaccgccagttggtggcatgactttggaaaaattgcttaactgtcatagacttcagttagtcttctgtgaaaggaggaattttaattacataacctcatcaacagccgaaacaatctataataatgttagcaatggcagcattagacccttaaaaatcaagactctaaggcccggcgcagtggctcatgcctgtaatccgagcact

SEQ ID NO: 5640 - DNA, 86081 bp, Homo sapiens
gtgaagttcctgccaccttgggggcccctgtgtgagaagctggcaggcctcccgagtggcacgggcagcacaagcatgccagaggaggctgtggccacctcccttccggcccggcgcccctctcagactgccaggggattaaaggccttttggcctttgtgtcgggctctgagcccctggcagtttgtacaacaaagtgctgccccgacagattccttcctgtgtgctgtctgtcgcctgtggacagggcactgggtggcctgggggtggggcagggcaccttgatcctgtgtctggggcctgggttgcagccgagtaggggaagcacttgttttggggttacctaggagcctgcatcctggcagagggggatggggaccttgtctgggttcatgtccctccccagagatttggggaccatgggtcacattgtctgctggttccttggcagtgggcaggggaaggggcactgaggcagagcctgtggtgaccgtggcagggaggcaggtgggcaggcaggagctcttttgtccccccgcccctgcactgtctctggattttgatggggtgagctcactccatccccacatgcctggagcctggccctgggcagctgcagccgccctggggactgtgcagtgctcagaccttcctgcctagctgcgggggcagtcgggggctcagtcccaggcttgggctacaaggagggtggggtggactggctgctgaaggcatgtgaacaatgtgtctggagaagcccaaagccctgggttggtcccagagtcagcctctgagcaggcagacaactttgagccataggacccaattctattgcccaccccttgctagggtcctgcccactcagccaggctcctcccttcatcccagatctggaggcgaccccaggcctgagcccacacctcacactccgcatgcatcacccctcaaccacacctacccctcacccctaccatgcaccctctgcatgatactaatcctaatgcttattaagcacttactgtataagtaattctagtgcttattaagcacttactgtataagtaaacgcctcactaagtgccttacctgcttgatcccatttacccagccgattctctctgagcctcagtttcttcatccagaaaacggaaataataataacacaagctcacagtttcttgaccgaaagcctcagagtcagatgtgttctggaattcagaatttttcaagtttgagaaggtgacatagagcatgtgcccagccggcatgtgacatccccattggagtctgggggtcacaccccatgatcaaacaacggtaatattgctacagtgaaacacaggactcttccctctgagtggagtgaacacactctgaatagcttcatgtcggttcagttcagggcttggcacccaatgagcttgctataaacttttttttttaacagagtcttgctctgtcgcccaggctggagtacagtggtgcaatctcggttcactgcaacctccgcctcctgggttcaagcaattctcctacctcagcctcccgagtagttgggactataggcatgcaccaccgcgctgggctaatttttgtatttttagtagagatggggtttcaccctgtaggccaggctggtctcgaacttctggcctcaagtgatctgtacctgctctccgtatctgtacctctccctccttctctccattctgtgccccactcctgtrgttttctcctccgttcttagtcctttcctaggcagccttgtctgcctctttatcctcacccaggccaggagaggaggatccagcctgcattcattgtccctaatgacacaacttggacctggagttccatgtgaccctcgttctcaccaggagggcctggacatagcccacctctgggattgggtgcctcccagaagccctcgcccacagtcctgccagtgttcaaggaatgcctgcccactgggggtcaccctgcctgcatcccagccccaagcaattgttctcagcctgttagaacaattctctggcctgggcccggttgagtcagctgcctgcacaccgccaaaccaggaactgcagggtctggaaaatccccctctctgcttagctccttcctctctggccgaggtctgacccctagacccctcctctccagctgcccgtctggctccaacacatgcctgaagtgctgggttcctctgggaggaagccgggctccctcrccgccggagaygggctggagggcaggaaacctgggttctatttctgaccttggagctgctaatggccctccttgggacctgaggcacatgctgcacagtcccaggccactgccagctcaggcatcccatggggccattctgagagctggtcaggttggggacagggactggccaaccctgggctccctggtattgctctctgcttaggcctcatggccagcccagaggtccagccctgcctcatttcctggtgagcagaaggcttggggtgggatgccagctcctcacctgtggtctgggcagacacgtctcccggggctcactggggaaggggagcattcatacctcctcagcctcctccaagggtcactgtcaactcaggtgatactaggctgaggaaatgcattgcaaagtggcatgcagtgtggctgagaggctttgcaagagtgactcccagtgatctcatatctgcttcattgcatacccctggtcacagaggtgatatagcacagtggtagctgcttaggtattggagcccgaccaccagggttcaaatctcagccctgccacatgccagtttccacgggtaacctgactttctctgctctctttgccccctttctcagtggagccccataagacctataacctggtttaggagtgcctggtgcatagtaagtgctcaataaatgttagctgttattattcttcaagcagatcctggtctttccctttctgggtccaaggtccttctatggtcaagtcccaagttccttttggctctttctgggagcctctttcctgtctggttccatctgctctcccagatgtgaaatacagagctgctggaaccttttgatcttcagctttttacaaatgaagtctctgctcttgctgacttattccttgctatgggcccttatctgaccctggatcctcagaccctagggtgggggctgcaagcaacagcagactggcagatggagggacccgtgctctggagtcctctggtggagtgtggggcacttctgtccaagtcccgacgtgctctggcctctctttcccctctccctgcagatgtgtgttcctggctttctttccatgttgaatctcactttgctatttcctgtctggtcccaaggccacccccgccgccacccgctgaccagctccctgctccctgggaaaagctctggaccttgctcatcattcaccgctaggttttcctttccagacggcagtgtctaggagatgctgggagtcgcagtgctccaggcatgccctccataaccttggttgcaatgagagggggattggcattgacagagccccccaccaggttgaggggacccctcaaatctcctctaaccagagtcagtgcccctgcaccagccccagcctcatacccacgttgggtcagtcaggcctgctccagccagtgggaacactgccctttaccccacccagggaaggaggcagagcgcctggtaggggctggtcttacggttctaaccagggactgtgggaatcccctggacatgcacaactaagaccaccctcctgggatggaaaaacctgactcactgtctctgagaaggagcccaggaatctgcatttctcaccagctcctggacgttctaaagcacactcctgaatgcgcatcccacgggcacagcctagaagtccacaggccagcactcaggaggacagggagagggcagggagaggagaaggaacaggaggcaacatttgccgctggattgttgggggtaagggctttaggccaaagcaggaataagatgtggacaactcagaccttccccaaggtctgagagcaccgcaaacacaaagatgaacaaatggcacccagccactcccccatccagggagctcacagcctaggacaggagatgcttatagattgcacagaggtaggtagtgcctccccaaagcaagtcatcttcacagagtgactggaattcataggtgatgaattccgtttttgtccgttcatttattcattcattcaagtatttattgagcacagggtgcagaaaaggtggagatgaattcatcacagcccttgccttcaaggtgcttccattccaacggaggtacagacaataaccttgtgagcccagaaccagactggggttgaggtcactgtgaacagcaaggagtcgggacaaagagagtttctttctagtcatccttatttaggcataaatacacacaacaaaatatacccattttcagggtacagtcagtaatgagatatgtatgcccagggaaccatcaccccagaagtgtctcttgtgcccccttcccagtcacccccagcctgcccttggtcccaagtgactactgatctttctgtcactatggattagactttcacccctaagggttcatataaatggaatcgtatagtttgtagtcttgtgtgtctggcttctttcagatccacacctatcaatcagtggtttgatcctccttattcctgagtaggtggaggaggtggtatttaagttgattttggaggatgcattggagttcgcctgagaaacaaagagaggaagggcattccagcagagggcccggcgtgagagatatggactgtgggagcagtaggggtggggagggaagggggcctggctggctctttgtttttttctcctccttggcctttgctctggcttggacctcactaccttgtctagcccttgtgggtttggttttcaaaagcgagaccatttccttctggcttaaggccagggcagggcctgaggccctcatgccaggccattgccagtctgtgcatacttgtgcttgtggaatctggggtccagccatcgtgaatctgcacacttgagggccacggggttcccttgggctcccctgggtttgttttcctctaagttatttggtaaaactgctttggaatcatccggatcttgtctagggggaagaggcactcattgcccggacccacacctgagaaggcaggtgttatggctgctggggcccttctgctccggcccacatagtttgcaggccccaaggtggagcttatcctgggctcggcagcagcctgaggtcacgtggagttgacaccacgcctgtccccattcagcccagatactgagctctgcctccgcgctgctgggcccagggatgagcctgtcagtgtggctgcatgtgccaaagctaattctccaacacagtggaatgtgttccctgcagcctggagacgggcaggccagagtgaggcaggaagaggagccaaatggcctggggaggagctgcctggggaggcaacggctttgagcagctcgcccttgacttctgcctgtgtccccacccatgctgaccctggccagccttccacctgcctgtgccccccatctgcgctgcccgaggccacccctttacccgcccgcatccccccatccactcactcatgtcctgggtgtcccttgccttctccaaaggaaaaggagtctttacttaccaaagtgatttacattttattgtctgctttatttgaggattcattcggaaatagcagggttgggctctgaagcctccaggggctaatgggacttggggaaactgaatcaaaagggttcagccccagcctggctcactgagccatactaagtcaaatttaaccactaaggggcctgaaggtgggattctgggtccccctggaagtgaggggaaggaccgtggggctcagtgggagctggagagagtgactcaatcagctctcgtttgcttacaggtgacccatgggctgagggcatacgatggcttgtctctgcctgaggacatagagaccgtcacagcaagccaaatgcgctggacacattcgtacctttctgatgatgaggacatgctggctgacagcatctcaggaggtgagccaaggatccaaggctgggagcagaggggtggggggtgagactgtgcttcttcccactggcatgggggaggagggtgaccgaccattccgagctttctcaaccctgtcccactgtatactaggtgcccagaacagtgcctgacacccagtaggtactcaacaaatacttgttgttgctgattacatctcttttttgcttatagacgamctgggcagtggggacctgggcagcggggacttccagatgggtaagttgctgcaggcctcctgcaggtctccctcctgtcccccagggaagccccagagccagtctcctgggctgagggctccttgggcctgccctggggtacaaagcaagaagaagtgggtgtgatctcttaacctgctgagtgacagttgtgcagactgattggcaggtccctgcaaggctggtgtggccaggtcctgtgcttgcccatgccacaggcacaggtatcagggcactgggcaggtaaagcccagttctgctggggactgacagccagtcagctgtttcacattcaaagcaaagttctcacctcccagggcagctcagctgttgagtccttccccagagccctcctgggggcacagagctggggatcccaggcaaagacaagtggaacagaggggctctgtggaatcgggcattcaggcaggcagcagggcatgcagagcacagatcgagcctgacgctaggcttgggagagaaccttgccttaaggtgggtcatcrgctgggaagcaagggttcctagcttagggaggcaaggctaggctcttggagggaggagagtcagcccccaccctggtcagactggcccagcactgggatggggacttatagtccctgcttccttccactctgggatactgggtggagaaggacctaccccaggacaaggccctgtggctctttatggttcctactgccctctctgggaggcagctcctgggacaatctgtgaccagggccaaggatggagcaggtgctcaggtcagaccaactactgggccatcccgtggcatccagggctgccttcaccctaggcaggccttggccaaatctggcctgggcctacttcaggggtggagtcacctccctttagctgacatatccggggccttcaaatgccagtgggtagcatcctaactgggtcagtgtagacaggagggtaggtcactgggtaacctggtcctgactgtgacctcccrgagcctggacttggggctctgcctgaaggttttccatttccatgtgtaggtctccacgaggctgcaggatgcctgsgagctgggtggggcttgggagagggagtgtcaggtgggccccaggcacacatggcacgtcccgtcctggaatggcctatgctaatgtgtccctggagctgcctctggccaagccaggcttgcctctgagatcaccctgtccattcatgaaccatctccagcccctccccgggggctgcccactgcagcagctctgccccagctgggcagtcctggccagcccacctgcccttcctgagaagcagctgtgagggcagacgaggccagagggggaagaggtggggaacagggcacagcagctgtagggggcccaagaccagggtaggtgcctttcctcgcaagtgggaacaggtggggcctcagaccctccaggccaaaccctggctcctgccagctgcccttggggcaggtccaggcagctgggctgaatgccagtcagggaggcagcaggtgtgcctccctgatcctggggtcccagggtgcccactcagacttgaccaagggcagtgcccccactgcgcccatgagccagagccatcctgcctgtcatggggccatgcctagcctctggcccagtcccagaccctggactccagcccctgagatggctcttcccctcctccccctgggcatggctgtggctccctggctcagctccagccccctgtgtgtcaagacccgtccctgatagcctcccctccctaggaccccttcccacgtctcctcccccagtttctttccatgtwctgacctgtctctttctgtcttcccccatgcccgtgtgtcctgctctgacccttgtcggcatgtctgtgtgtgtcccctgtcctccctgccctgggccctcttccccactccttgagtgtctgtctctgcgcctcctccctctgcctcatcctgttcttctccctctctctggctcaccatctctgcttctgtcgccctctgtctttccctctctcccctctgcctgttcttttttttttttctttttccctctgcctttttcttcacctttgtcttaccttttctctctcattctcccccgccccactttctttatctctgtctctgtctttctgtctctttgtgtctccctctctcttgcaatgtctctgcctctctctctgcttctctccatctcgtctccctcgctgtcaatgtcccttcttgcctccttctctgtctctactctgcaggctcagggcagcccctgggccgcccgcccgtggctggcatgatggtctcggagcctgatgaggagtcccctctcagtaagtgacccaggccctggccaggtgggagcgctgctctccctctgcctccctccccatcctctctccccactcttccttttctctcctttctccctgttctcttcctccccaacctgcactttgctgcgagtcacacaagaggctcagaggcacctccctgcagagtccaggggctaggccagccactgcccctgcccaggacacagccaggcccaccctgggcccacagatctaaacacagtgggctggaaccctggcgggcgttctyccccatggggtgttgacgggcagagatgggtgcagcagccctgcagggaccaggccctgcattccagaggccacttgtgtccaccccagcacaggccaatcctgggcccacccgagggacccacagggacccagggctggagttcgggggcctgggtgtgttgcagagagttctgttgagcagggatgggaatcaggagttggtgagtagcctgctccggggccagggctagtcaggtgtgcagcccccacttctaccctgagtgcagggcagctgtctccctctcccggcctctggctccaagggaactcaccagatagggtgagaggagggagaggactggccagagagcacccctattccaaggcagcctcgcccctgctggctgcaccagtgtccttggctctggaggctggttcttttttccttttcttttctttttttttttttttttttgagatggagtctcactctgtcacccaggctggaaggcagtacagtggcacaatctcggctcactgcaacctctgcctccctgattcaagcaatcctcctgcctcagcctcccgagtagctgggattacaggcatgcactaccacgcctggttaatttttgtattttcaccatgttggccagcctggtcttgaactcctgacctcaagtgatctgccggcctcggcctcccaaagtgctgggattacaggcgtgagccactgcrcccagcccgggggctggttcttgaaatagaggtggcctcaccttctgccccagtgctcaggcaccagctgcagggtgggaratgggaggtgttcacccagacctgcccttggtctcgaagaacgaagcggggtggggtcaggctgaagggcctgtgcccttcccaggccctagtagaaaggggctttgtggagctccagtccccttccccaggagcgggcacattcctgggcagaggcccggcctcctcgcccgcgctgggccgtggggctgaggccaggggcttgggtggggggactctcaatgggcctctgtgctggctcacaaggggcctctgtggctgagccatggcccccacactccagcccacagagccccgcccacccggcacccaggagcctagcccagcggttcagggcaggcagcgccagggctttcttcacctgagccacagagcaagaatgtcctgtgcacctgcgggcctgatggacagagtaaagcgggaggaggatgggcctggcagtagcacagacagtgccactccctgctctgccacctacacaccggatttcagatttttggattagggatgcttggcttgtatatgactcatttgtcactcttattcattcatatctatcacatacatgaattcacaaatattgtgaaacgtaatgagcataaaatgtctcatatatagtcggtgcttaagaaacgatagatgtactttgggaggccaaagtgagaggattgcttgagcccaggagtttgagaccagcctgggcaacatagcaagaccccatctctatcaaaagtcaaaamattagctgggcatggtggcatgcacctgtaatcccagctactcaggaggctgcagtgggaggatagcttgagccttagagtttgaggctgcagtgagctgtgattttgctaccgcactccagcgtgggtgacagagcaagaccctgcctaaaaaaaaaagaaacaacagatgcatgtgtatgttcacaccagtctgagatgaatttattcagccatcactttcaaggaacccgctgtgtaccaggcacgcggcaggcactggggatgcgggcgtgaatgaaatcccaggttcccctccatcaagcctagagtctggtggtggagagaggaccacagcagcttcgattcttgggcggtttgctgtgtgccagktgatgcatctgagtacaagggcctggtgcatgtgagcacaatgtcatgcactcctcgcagcaacccaggtggtacatgcagtcaatatccccattaggaaacagaaactcagagccgaggtcagtgcctgaggcatggctgaccttagaactcacaattgttactgtgatgtgaaacctggcagaatctatgcagtacacggtggaaggtgctctgctagggaaagcagggcactgtgggagcccaggggagcggtctctaccccagccagggcagatcaggaagatcaggagacaatggctgagccaagtcctgaggaatgagtaggaactgrccgaggaaggctggcagagcctttcccagtcacacgcaggtaatccctgtgccaggccaactccctctgggagccaccccttcttgtccagccttcctctgaactgtgggggtctcctcttttgcactagcacttggtttctggatcaggccatttcccctgttagttaaagcccctcagtcaagttggggccttggcattgacccctgagcatgtatacctacaggcagtcctgggtgtagcagtgggcacacaggtgtcagcctcgagggaggcctctgggggccatccccccaactctgcctgaatggtccaactgcctaaggccactagatgccaggctggggctctcaaaatgatcctccttcgattttccagtttatttccgagccctggtgaatttcactcgctccatcgagtacagccctcagctggaggatgcaggctccagagagttycgagaggtgtccgaggctgtggtagacacggtgaggtgaagggggtttgggaagctcgcgggtgtggcggggcaggaccgaggatggggtgaaggcctctggggctgatggcactgtgtccctccccagctggagtcggagtacttgaaaattcccggagaccaggttgtcagtgtggtgttcatcaagtgagaaggggctccctgggggctgctgggggacttgagcgggtaacctggagggggctgatgaggatgggaaggaagcctggcaccgcggaaaggcctatgggatgagtcgctgtgggtggaaattcaggaattggtcgggggatcattgggacctttagttgcccttctttgggtacaggctgtcccggaacagggcctgagcgtcggggcgggagcctcatggaggagctgagaacacaggtgtctcgctgaccctcctctcctgcctgtctccatccccagggagctggatggctgggtttttgtggagctsgatgtgggctcggaagggaatgcggatggkgctcagattcaggagatgctgctcagggtcatctccagcggctctgtggcctcctacgtcacctctccccagggattccagttccgacgcctgggcacaggtgagcctatcctggtgtctgggatcgcctcytccagactcgtggggtcccctttcagtgtctctgccataggctcccaacttgggcttgcacaccactagaaacagggagctcactactcctgagtctgccccatcgatctttacacaatcttggcttggtagagcacagactgtttcctctagcacatacccrttagacccgagttctgctccttccttctagacctctgcacattgacaataggtaatcaggcctttatttatcctgtacttccaagtccaaaacacattagtacttaataataatgagcaactgtttactgagcactgactgcctttatttccagcctccgggtcagtcttcacagcaattcctatgaaggagatgttattcctcctgtttcagagacsagggaactgaggcccagaaaggaaaatctaaatttgtccagaatcagatgggcagatagtgaawaggcgaggatttcaaacaaactcggtgtctgtgacagtcttgccagaacctgtgatgacagaagcaggagaaactgaggcacagagagactaggaaactggtccaaagccacacagcggttaggtgcagaatcctggcctttgtactctgggtcagcccagatttccttctactgtgcctttggtctcctgttttaacctcctgagtctcttttttttctctagaccgaacagccctagttcatccttcacaggtgtggttctyggccctgtctccatctcagttccctgtctctgggaagaccctgactcagtggaactcagaatggaacaaactccatcccctactatggtgtagcccaattaggaaaagacagtgaaaccatcacctcccttgttccgcacctcaattaaagccaagcgtggtggtgcgcgcctgtagtcctagctactcaggaggctgaggcaggaggatcaccggagcccaggagtttgargctgcagtgagctaggatcatgccactgcactccagcctgggcgacagagcaaaaccctgcctctaaaacaagacaaacaarcaaaaacccttaattattgcacccagagatcaagcttgctcttctgcatcatcaggcccaggtctaaagactgctgggggtccagccctcctctctcacttttcaataagtcctcctggctagggatggtggaatgtggcccagccctgcagccctcagctcccggctcccaggtggaacagccactgatcacatcttcctttccagcacagacccccccacccccgccggccgctgtggcggtcgcagtgacaccaggtgagagtgtaagccaggccgaggcccagccaggttcctagagaagttaaggttggagaggaggccgggtgcrggggctcacgcctgtaaccccagcactttgggaggccaagacgggaggattgcttgaggcaaagagttcgagaccagcttgggcaacgtagcaagaccctgtctctaaaaaaataaaaaagaagagagaaaaaaattttttaaaggatggagaggaaagaagggtgtgggcaagatggctggctgggcacagcccaagacagctgggcactcccttctcccctccttctttgtcctcactgggccaggctgtggcctgcatgtgtgtggtgtggtggttgcatgcgtgtggcatgtcaactgtgtgtggggtctgttttagagatgggggaggccactgccgcatgtsccatgccccacgtgtgctgtggatgtgtctagtgtgtgctgcttgccctckttgtgcctgccagaaaccgagctgcctgacacagggccctggakcccactccagccacacagcacctacagcttcccgcacctgcctcctgccgcctctgactccagtctgcttcctttccacctgcagtgccccagttcccaagagcctgcacggaggccgagtttgcctgccacagctacaatgagtgtgtggccctggagtatcgctgtgaccggcggcccgactgcagggacatgtctgatgagctcaattgtggtgaggggatgtccggggccaygagtggtttgggtgccargggagggccagggtcctacacctgggtcttggagcccatcaaggactatgagggtttggtgcaggcagaggatgggggcataggaagggtgatgacagagccaggcagggggtggcagggagtggtgttggggagtacagggtgggcctggggagggttggggacaaggagcaggtgaggagccatctgcttctgccaaatgccaagcggaatctatccacagaggagccagtcctgggtatcagccccacattctctctcctygtggagacgacatctttaccgccccggccagagacaaccatcatgcgacagccaccagtcacccacgctcctcagcccctrcttcccggttccgtcaggcccctgccctgtgggcccmrggaggccgcatgccgcaatgggcactgcatccccagagactacctctgcgacggacaggaggactgcgaggacggcagcgatgagctagactgtggtgcgcaccggcaggggtgcaggtgggtgcggggagcaggaagctggcccgggaggatgctgctgacccctgcccggtctcctaggccccccgccaccctgtgagcccaacgagttcccctgcgggaatggacattgtgccctcaagctgtggcgctgcgatggtgactttgactgtgaggaccgaactgatgaagccaactgccgtgagtatccgagggtccagctgaggcccccttgccctgcccaggccgcttgctcctgccccgccttccactcctgccccgcccctaccctgcccctccgctttcccccctccccagtcccccaagcctgtttgtttgctctccctggctgagtgcggaaggccctggagacacaccccaaggtttatctctaaccagagccgtaaggccccttggccctgagctggcctttggtgaagctgtgtggttagcctgcctgtggttcgtgtctcgtcatttctttcctttatttttgttaccatgaagcttctctttgttttgtatgtgggtcggatgaatggctaggagggttctatgtgccaaggtcccttggtgatgggtccttggtgtatgtatgcaagtcagagccttacccacccatctgtccaactccccagccacccatgcacccacctatacacccattatccatccacccagcccttcatccatctatccacccatccatctgtcgtccttcttccctcccatccatccttccagcctcccacttccccacccttgtggtatccatcttttccagtcatggacattacgggcatcctgacagttaaataggagggggaggctggagaggcagcgaccacatcaggtggtatcctgtatgtcctgtcccgcaagaagcctgatgcttgwtagtgcaagattaaggataatcttcaggctcttctctgtggtcctgggtggtgtgtctgggcgcgtgtccatgttcctgctgtgagcttgtccagcttctccttgccttccttcccctgcccactccacagcaagccccggggagaggctgcaccatgccacagactggcagagtttgcgaacgcctttctgtggctctaagcttgcctgatagcaccagccccttgggagagataaagtaattgggggctttagttggaaggcccttctcaggggcctctcctggggaagtcaaaggaaggacaggtccttgtggacagcacagaaacagagaacatgaaagctgaatggcctcgtgggctcctgagagtgtggggaacagaagcgcctgagctgcgcccacggctacctcctggtctcctctcgcacctgctctgtggatgcgcggcttccgctcctgcatggctgtgacttctctgtccctgtctgtgtctctctcaagctccatctccctgaggaagaacaytggtcaccagccactagagaggcctagcagggcccagcccttgtcccgggccacttccagcctctggccactccatagagggcctgtcagtgggagcacagaccgtcgagcccctcaggggaccacactgtgccaggcrttctggtagagaagggtgggcggggcattgctggcgcccagagatgccagccccactggtggtgcctttgacatgggtcttgtccatgtgagcaagatagcrcttctgtgcctctgagcgtggctgggtgaygctgtggttgtgacagtgatgtgccagccataactggcatggggaatgcaggtggagtgaggggtgggggccgggtaatgtgatgagtkgttcgatgacagctggtggccgcatcatgctggctgtgagttggacagtgttgtgcagcaggggctaggcatggcgagggccgctgtgggttatgtgggcaagatgagagagtggccctggggatgcccagggaggatggacggggtgggctattgggaaccacctggctttgtccccagccaccaagcgtcctgaggaagtgtgcgggcccacacagttccgatgcgtctctaccaacatgtgcatcccagccagcttccactgtgacgaggagagcgactgtcctgaccggagcgacgagtttggctgcagtgagcagggagctggggtcgagatgcgggccctgggctgggttctaggggttctgtccacagcctcagcctccacccttctccctcctagcccctcggagccctccttccgctcctccttcctttgcccccgacccctcactcctgccctggtctcctcagtgcccccccaggtggtgacacctccccgggagtccatccaggcttcccggggccagacagtgaccttcacctgcgtggccattggcgtccccacccccatcatcaattggaggctcaactggggccacatcccctctcatcccaggtgcggctctgggcccaggtggtggggtgggaatgaggggcagctggtccagagccctaggccagatcctaccacttgtcttggggctcaccagggtgacagtgaccagcgagggtggccgtggcacactgatcatccgtgatgtgaaggagtcagaccagggtgcctacacctgtgaggccatgaacgcccggggcatggtgtttggcattcctgacggtgtccttgagctcgtcccacaacgaggtactgccggagggcaggtgtcaccgggtgtgggggcrgagcygggctgcccaccacagccggctgcagcccccgcccatgccgcccagcaggcccctgccctgacggccacttctacctggagcacagcgccgcctgcctgccctgcttctgctttggcatcaccagcgtgtgccagagcacccgccgcttccgggaccagatcaggctgcgctttgaccaacccgatgacttcaagggtgcgttggcgggcgggtgagcgctgcgggaggtgggaggtgggtacctctgtacccagggggcacagaggatagatgcggacagagggggccaggtttcgggaaggaatgtgagtcgctgaagaaacactgagccctgtcaaaaaagcatttcggggggaaaaccaagatgtttaggaagagccaaatccccccttgctacctacctgcttcaggttacggcgaggacgggccctggagccagcttccagcttcagatcctgacgtggacgctgtccacctgtgtcctgggtcaagttacccactatctcgtgtctgtttcgtcatctgtaaagtcggggggtgtggaataataactacctcctaggggttggtaaggacttagtggagtcacgtatgtaagcctctcagaattgtgctcagcgcattttcagcacccaggaggtatttgctaacgtcacagtcattgtcctcattctgagagacagaggtgccagtgtacccagattataggagcccaggctttggcatctccttggcctgagggtggcctccagctataccacttactgcygctgtgtctttgggcaagtctcttggcctccctggtcctattttcccaaagatagaggcaggcagatggactcagttctttctggcactgagaggcagaatggcaggatggctgagggcatgagcccaggcactgcctggactggggctcaggtcccagctctgtcgttttccacgtggcatcaagcagccctcaccctgctgagtctcacttcttcgttgcagaggattaaatgcatgtagagagttagctccaaagcactcaacacattttatgcccttttgttggttgaggaacctaaaaatgacttgtataaaacttagttacctggccaggcatggtggcttatgcctgtaatccaagtactttgggaggctggggagggaggattgcttgtggccakgagttcaagaccagcctgggtaacacagagagaccccatctctacaaataattaaaaacaaaaaatctagccaggcrtggtggcttgcacctgtagtcccagctacttgagaggctgaggcaggaggatctgttgagcctaggaggttgaggctgcagtgagcyatgatcacaccattgcactccagcctggacaacagagtgagaccccatccctraaaacaaaacaaaacttagttacttcccaaagttgtcccccagtatatttacaatgctaatggccgtggccaccatttggtgagcaggcagttggccctgtggcttgacgtgacagtcaacgaactgccaaaaacccttgcaaggtcagggctgatttcacagttttaagatgagagccccagggctctgagatgttgtggggcttccctgggttcacacagcagtttagagggggagctgaacccagggctgtctgattggaatctgggtggtccaggggagggagtggtgggaattccagggtgagcaggtggcctgtgtgtggatggtgaccaggagggaggaggcctgaagacatccccggaaggcagggaggaaagaggattgagtaacctagacccggggctgtgctcggtcattctgcgggtgaggagctggattcccctgtggttgcagggggttaattcaggatgagggggagaagctattggcagacagatgtggactctgtataaggaagaacttgctaagagtcaaagttgtccagagccgggagggacggcctttggaggttgtacgctctccatccatgacggctgcaccatccaatgtggcagtcactggccctgtgtggctctttaaattgaaatacaatgattcattcctgagcagcacaagacatgtctccagtgctcagtggccacatgttgctggtaccattacttttaatggcaaaaccaaaccagcaattactttttcaccaacctaacagctaccgtaatgaagagtgtaggtacaggatattttcactccaccgaaagttctctaggatggagctgtcctagagatctgggaggatgctgtcaagggaattcccatgtagggtgactgtgtgtgtgtgtgtgtgtgtgtgtgtgtgtgtgtgtgtgtgtacatagaagagggttggactagacgacccrtcataacaacagcaacaataagagctagccattttatatcaatgtgctcattttagcttatacctctaggaggcaggctactttaagcaccatcttacagataaggaaactgaggcccttgcccaggcttacaacacacctggacttggtctcctgttcctcagccctgtgtagmtctcctgcctgcagggttgttccagccctgaaagtctgtgggtctcttagcaagaaagaccctgagaagtctggctgcaaagaatccccttgtcctttctttaccctgtggttcccaaatggttcccagctatcattccatggcattgactttcccagagcatgctttgggaaatgctgctccagtatttgggaaggaggaaaaaactgcattttctttttcttttctttctttttttttttttttttttttgagacagagtcttgctctgtcacccaagctggagtacactggtgtgatctcagctcgctgcagcctccgcctcccgggttcaagtgattctgctgtctcagcctcctgagtagctgggactacaggcgtgcaccaccatgcctgtctagtttttttatttttagtagagacgaggtttcaccatgttgggaaggctggtcatgaactcctggcctcaagtgatctgcccgcctcagcctctcaaagtgctggcattataggcgtgagccaccacacccggcaaaaaactgcattttcttcactttggaagagagatcaaagttttctcgaaatcaaatttccactagaactttcccacctttctggattgctgcccctcaagatgggtgtatcaggcaggcccagrctgcagccctcagcctcccccttgccacccacaggtgtgaatgtgacaatgcctgcgcagcccggcacgccacccctctcctccacgcagctgcagatcgacccatccctgcacgagttccagctagtcgacctgtcccgccgcttcctcgtccaygactccttctgggctctgcctgaacagttcctgggcaacaaggtgaggggcctgggctgccaccctgggtggggaaagaattcctgtgggctctgctccttctgcagttggtggacaacaaggcagacttggagggaaaggtgttaccatgccccgatgcagccccctgtggcagcggctcatccattcagggcaggacctctcccctgcactgttggcttgggaagaagagctggcctcccctcctcccgggagccctccctgaccactcccccatgcctgggctgggttctgtgcctccgcactggcttccctgggtaccctgtgcactgcatgattccacaccctgccatggaccaaacaccctagagtcagggcctgagtctcgcccatctcggtttccctgtgcctagctcagtgcctggcacacagtaagtctcaggtaggcagagtgagggaggagctggaagactataggcacctyataggcacgaggtgtcaagtgtgcccacagctgcccgtgctgatccaccctgttgtgccaggtggactcctatggcggctccctgcgttacaacgtgcgctacgagttggcccgtggcatgctggagccagtgcagcggccggacgtggtcctcrtgggtgccgggtaccgcctcctctcccgaggccacacacccacccamcctggtgctctgaaccagcgccaggtccagttctctgaggtgggtggcgcctgagcccttagggctgggagcaaagggggatttaggctgggtaggcactgatgtgtgacccctgccaccttyacccatacccaggagcactgggtccatgagtctggccggccggtgcagcgcgcggagctgctgcaggtgctgcagagcctggaggccgtgctcatccagaccgtgtacaacaccaagatggcyagcgtgggacttagcgacatcgccatggataccaccgtcacccatgccaccagccatggccgtgcccacagtgtggaggagtgcaggtgcctgagccggcagggctgggaaccacagagaccctagcaaggatagaggagaaacggcagggcctcaccgtccttgcagcgactcttttggtcctgtccccacagatgccccattggctattctggcttgtcctgcgagagctgtgatgcccacttcactcgggtgcctggtgggccctacctgggcacctgctctggttgcarttgcaatggccatgccagctcctgtgaccctgtgtatggccactgcctggtgagtagtgccagcagacayttgaacactaaaataggagaagggacaatgtgtgagattccctgtgttcatgagctcagcacaagcctccagaatgactgtcatgactgccagatgaactatcatgacctctggatgcaataacagaaatataggtcaggcgcagtggctcatgcctgtaatcccagcactttgggaagcctagatgggtggatcacttgaggtcaggagtttgagaccagcctggccaacatggtgaaaccccatttctactaaaaatacaaaaattagccaggcgtggtggcgtacgcctgtaatcccagctactcaggaggctgaggcaggaaaatygcttgaacccgggaggtggaggttacagtaggccaagaccgtgcccctgcactccagcctgggcaacagagcaagactcagtctcagaaaaaaaaaacaacccagagatayagcatccagacaagggaggtgttggccctcctctccaccctcatcagactaatcctggagartgccaaatgaagaagcatggcctgcagagggcaactctagggggaagagcccttggggtgggaccttatttcttaggaatagtggcgagagctgggattgtggagctgacagaagaaaaggctcaagcagggcagcattgtcatctccaaatccctgcaaaggtgtcgggtagaagaaacagactctggagagcagaactggccagtgggtgcagattggaagagggtggcaggtttaggtcaataaaaagcaggcatttggaaccatctatgggacaggctgccgtgtaagatgatgagctccccatcatctataagtggttgcagttgatgctcccctgtctgcaaagctgtgcctccagcgtgatggggaggctgagctagacagcctccaaggtcccccgcagcatctggcccagttctgctctagaagttgagccataccctcctccttcttctagaattgccagcacaacacggaggggccacagtgcaacaagtgcaaggctggcttctttggggacgccatgaaggccacggccacttcctgccggccctgcccttgcccatacatcgatgcctcccgcaggtcagccccagctccgggtyrgggggggtttggctggggacagtgcaacaggccagagaatattctgggcagggaggcrggagacttggattcagatctctacctgatcactaagttatcccatgctcctggacctctctaggcctctgtttccttttctgtataatgggccccctgacttcctacagttgctgtgaggctgccgggcagggagatggcgtcatgcctcgtggcacactgtgtctgtgtagacagcagtcatttcccagggtgggaggagaaagcctgaccccagccctgccccatgccctgtccacttgatacctgcagattctcagacacttgcttcctggacacggatggccaagccacatgtgacgcctgtgccccaggctacactggccgccgctgtgagaggtgagggagagccttgkgggctgcaggaagggggctcctgggtggggtcatggaagtgctgatggcggccccctctctcccctagctgtgcccccggatacgagggcaaccccatccagcccrgcgggaagtgcaggcccgtcagtgagtatggctgccaccatcccctgacacccacctcccaacccaacctgggctgcacaccaggcaccctccctccctgccccagctcatgaaccttggggagccactgttcctctatctgcccggaccacgtatatcccattcccacctgccctgccaacactcgttttgtgtcccagaccaggagattgtgcgctgtgacgagcgtggcagcatggggacctccggggaggcctgccgctgtaaggtacgcgtgccatctgccacccacccaggggccttgggcccagcaccayagctgggaggaggaagaaggaagctccgtcctctccatagatccttggccagtgggtggtaacccagtcagaggctggtggacctggcccaccggccttccgtaccaggacaggtggcctggcrttgggaaggagcactggttagggagtcaggtgaccacagttcaagtcccagtcattctttatgcagcctttgtatctgcattgtacctttgcttttgccatactttgtccattgtcacattgatacaatgatatagatattagtgtccccaatttgtgaatgaggaaatggaggctcagagaagggaggtcacttgcgttaggaatgggagcatcggccgggcgcagtggctcacgcctgtaatcccagcactttgggaggctgaggtgggtggatcacttgaggtcaggagttcaagaccagcctggccaacatggtgaaaccccatctctactaaaaatrcaaaaattagccaggcgtggtggcgggcgcctataatcccagctactcaggaggctgaggcaggagaatcacttgaacctgggaagcagggttgcagtgagctgagaccgcaccactgtactccattgtaggcaacaagactgaaactccgtctcaaaaaaaaaaaaaaaaaagaatgtgagtatcaagtgtcggtgtaaaaaagaatggatggattctggagtcaggcactcctggtcttaaatcccagagtggatgggcaagctgagtaactttgtgcaagtcatttcacatccctgagcctctgtttcctcatgtgaaggatgaaggtatcacctacctctcaaggtccttaggggagttaaatgaggtgrtgtcgaatggaaagcagaacagtgcgtgaaacactccataaatagaagcagcaattatttcaatcaagtcgctgtatttcaagtctaaatttattggtgaaccccctggcagccaaagagaaaagggaaaaatgcttgcctaagtgcttgttaagtgggaattactattcagatggcaatgacgcctcatacatgtgctctttcttttcttttcttttctttttttttttttttttttgagatggagtctcgctcccatcgygtaggctggattgcagwggcgcgatctcggctcactgcaacctccacctcccggtttcaaacaattctccttcctcagcctcctgagtagctgggattacagctgtgtgccaccacgccaggctaatttttgtatttttaatagagacagggttttgccatgttggccaggctggtcttgaactcctgacctgaggtgatccacccgccttggcctcccaaagtgctgggattacaggcgtgagccaccgcgcccagccacatgtgctcyttcagtggctcccctgggtcttgggttcttatctggactgagggtggattcggccagagctccaggcagcctctcccatgggctstccttcagctccaactctgtgcctgcagaacaatgtggtggggcgcttgtgcaatgaatgtgctgacggctctttccacctgagtacccgaaaccccgatggctgcctcaagtgcttctgcatgggtgtcagtcgccactgcaccagctcttcatggagccgtgcccaggtacctctgcaaggtgggcgggcaggaccgccaagccctgggccggatggaccaagcgccagtcccaggccacrgcccccatcccagccctttctcctcctcccagttgcatggggcctctgaggagcctggtcacttcagcctgaccmacgccgcaagcacccacaccaccaacgagggcatcttctcccccacgcccggggaactgggattctcctccttccacagactcttatctggaccctacttctggagcctcccttcacgcttcctgggggacaaggtgggtagtgggtggaaaggcaaaggaaactccaggcagcaggaacagcgcaggcaaaggcttggaggcgggagggtcgtggtgccttgggagaatagtgagatacactgcatggaaaaggtggctggagcagtgacagggcccgaattcaggcctccgcaagctcctgtctaaccctggtcccaggtgacctcctatggaggagagctgcgcttcacagtgacccagaggtcccagcygggctccacacccctgcacgggcagccgttggtggtgctgcaaggtaacaacatcatcctagagcaccatgtggcccaggagcccagccccggccagcccagcaccttcattgtgcctttccgggaggtgagcaatactgtcccctgggggtaggggtgcgggcaggcccttgctcctgcctctccggcattcaatactccaggacgtcaggggctgagcacatgtgtcctctccttggcagcaagcatggcagcggcccgatgggcagccagccacacgggagcacctgctgatggcactggcaggcatcgacaccctcctgatccgagcatcctacgcccagcagcccrctgagagcaggtgtctggagccrgggcaggaggaccagcatgggcttggggaggggctccatctaagcggtgcagtacagcacagccacttacagactgtgtgacccttttgtgcctcactttccctgtctgtaaaacggagagtcttaacaatrtctcccatacaggctggtctggggccaggctccctagaaagaagcctgagacggggattggggtgcatgtgatycacaagkagagggacgcaggagrggggaggggccatgcagggatatggtttcaggtcaagtctagccccagcctcagcccacagggagctctggagagtcattcgcsggagagtgatcgttctttcaggcccgtgggctcttgtagcctgtatcagcctgtcattggggaccccaggggaacgaggtggtataacctctccaggtgaggaagggtgatggtttggagtaagttgcaggtaacagctgtttgccacggtcctcgcagcctctggagatctggacagggccccagcagcactgtgacagggctgtcgggaggactaataagaccctgccagyggaggactccaggcgtgcctggcacagagccagcactcctattcacgctgggtcttgtcacgcccagggtctctggcatcagcatggacgtggctgtgccygaggaaaccggccaggaccccgcrctggaagtggaacagtgctcctgcccacccgggtaccgtgggccgtcctgccaggtgagtcmtgggccccacgccagcccagccagccccctccatggtgcttcccrctccttctccatgagccctccacacctccccagccctggccatccagtgcccctacctgaatgggccgtgttcggaagtccctcccactgccatctttctgcccccaggactgtgacacaggctacacacgcacgcccagtggcctctacctgggtacctgtgaacgctgcagctgccatggccactcagaggcctgcgagccagaaacaggtgcctgccaggtaagtcccgccctccttccgcccaccccagcaatctgtggcctctggaggcccagcctcaactcacatcctgctcctccagggctgccagcatcacacggagggccctcrgtgtgagcagtgccagccaggatactacggggacgcccagcgggggacaccacaggactgccagctgtgcccctgctacggagaccctgctgccggccagtgcgtccagtccctgcctgcacctgcccttccctgaaatgtctaccacccgctcccacacccscttcatccagggcccttctgagaggcagtggttaaatcctggccttactgcctgctcagtgtcacttggtgtgagatacacttcactttcagggcctcagctgcctcatctgtgaaatggggtagtccaccctcctcagccccttgtgtgagagttgaatgaggctatgcatgtggaactcttagcacagtgccaggcatgcagtggcactgaggacacatgagttcacatgcctgttcttcccctcccctctcccctggtcctgaaggaggatcgggggagaggaaggagccactgcgttcctgactagaaatctgcccccacactcagggctgcccacacttgttttctggacacagacggccaccccacctgtgatgcgtgctccccaggccacagtgggcgtcactgtgagaggtgaggcagggggtggagagggtggggggatgcgcacagggggtgtccctggaatcctcaggcagggcccagcgctcccaacccagaggaatcagggatgcctctcgctcttaacctygcacaggccccagaagacagtcagctcccctcctcgggagactcaacctctagcccagaattcaagaccctcagacacacatcctagcctgcggttcaccttcagccccctggccccctgccccagccaggccagagtcttcccacaaaacccctgcttctttctgaaactccygggttcctacctgccccaattcactggctgtgcggtccagggcrcrtccctgctcttcyctgcccagtttcccygtaacatgggcgagtcaggctcttcttttcttccagtgcatgaggccattgaattcaatatggggccctyagcccagccctggggttctgcttcccttcatccaaaattcatcagaggctttttctctctgcaggtgcgcccctggctactatggcaaccccagccagggccagccatgccagagtgagtaggattggggaggtcattggggtcgggttacccagagtccytagggcggagctaggacagaagcctttactcccctttggctttgcctgtcygagcctgtttcttcatctgtmaaatggggataggagaaggccccaccaccyccgagggctgtcrtgagagtgttgagtactcacatcagaaatcagagctcccgctcwgtggtgagcagagtggagggaagaggggtgctgggtggcgggtttggggctccagccatggctttcttccacctcaggagacagccaggtgccagggcccataggctgcaactgtgacccccaaggcagcrtcagcagccagtgtgatgctgctggtcagtgccagtgcaaggtcagtccgaatccctgtccctgcggggcctgctctgcccygctgcccagaccctgcggggaaatcaggcagcatctggtggaagccgagacctgggcatggggggcagggcatgggggacagggcaggggctgcccggggctgctggaagtggccagggaggctggcctcaggctgctgggggtgcaggagacccactgagtcccctgcctgcctccttccatccgtctacccaggcccaggtrgaaggcctcacttgcagccactgccggccccaccacttccacctgagtgccagcaacccagacggctgcctgccctgcttctgtatgggcatcacccagcagtgcgccagctctgcctacacacgccacctggtgagagcctgtgctgcccagccccaggcggwgttgccacctgctgcctgttactgtccatctgagcactgagcccagcgaccctcatccccgcctcagtaccctcacatgcccccattatttctctcrcagtcctgatctcaacaggaccccattcygcaccttaacaccctcccgtgccccatcccccaccaaggcaccccggtgctcaggctgacgccccctcctttttcccctgccagatctccacccactttgcccctggggacttccaaggctttgccctggtgaacccacagcgaaacagccgcctgacaggagaattcactgtggaacccgtgcccragggtgcccagctctcttttggcaactttgcccaactcggccaygagtccttctactggcagctgccggagacataccagggagacaaggtgggccccagccaagcaccagggtcagccgtgactcagacatgagttcacctctgcgccgtctctcagcaggcaggcacctgccacctgcatggccatatcgtggttaggcacgtggcttttgcagtcccatagacattggtytgaaccccagctctgccgcttgccagccagacaccatttgataaacctcaacttcatggtggctgaggggattggagatcgtgcctggcacataataagtgctcagctgttcatgacttttagctttcatgcagttattctacaaacagatctgggagaggccgggaaatataaagacaagtgagacacagtttcagtgtcattcacrtgcccgctccgacttcactcatccacactgctggctctgtgcttgtgttggacacagtaattctcatgataggtcatgtgtgttgagctctcactatgtgctaggcagcatcctttacaaatcacaaatcacaactrtgtgagacaggtcctgctactgccccatttcataaataaggcaagaggggcttggtaacttacccaaagccccgcagctgggaggtgggaatgccgggatccaaacccaggtcagaggctgcccttcaaatgctctgccaaaggccagagcccacacctgtaattccagcactttggaaggctgaggcgggaggaccacttgagctcaggagtttgagaccagcctgggcaatgtgacgaaaccccgtcyctacaaaaagtacaaaaaattagctgggcgtgttggtgcatgcctgtagtcccagctatttagggaggctgaggtgggaggatcgctggtacccaggatggggaggttgcagtgagccataattgcaccattgcactccagcctgggtgacagagtaagaccctgtctcaaaaaaaaaaaaaaaaaaacaaatactctgccagtcagaggtgaacctgtctttgctactccagaacagggtctggtggaaaggtggtgatgatggtggtggcgatggtgtgatggtgttgtsgggggcaggggctcaggggtgggctctgggacagcctgcccaaatgtgttcttgagcagcacgggcatccggtggcacccacgctctggggttggggttgccctatccctgttcgttggacacagccaggtactccaggcttctcccggggctggctgccttctggtcccttctcccctctcccttctggggttcgctatctcctggcctccctgctgccctgtcctgcaattctcagacctatctctgtctcctgtcctggcatttccctgcgccccacagggggaggcgtactttgcgcggatgcgccgrgctcaccaggtaggcccaggacgtgcgtggtgtgaagttggtgtggtggggcgtggtgccttctcgggtgctcccagccctgcgtggggagatgcgcagtgcccaaggcattgggggtctgcatgaatccaggcggtgtcccatgaccccagggttggagccaggagggtatgtgcctcaccttgcctcacctgctgtgtggtctggtcctggtgccaactgtctgaagtcagaatggcaactgaggtagcaaggagactaacccgatgctaatccacatgactgtatctagccccccgggttcccctggccttgcctctcaagcaaccaccatgaaccctctgtgtgcatgtgggcggcctggagttaacccttgggtgccagcctggagagggggggcatgcatctttcttcctaattagtgtgggcctttctgactaccatgtccgtgggtagaggaccctgcccatggctctagctccaggactttgggaggtcttagctcgcctgctccctccatttcatcagaaccgcacatccctctcagaggagcagttgcgggcagccgtgacagctgggaggatcccagagcccccagagggcagggactgggcacagcgggcatcacaggtaactgaggacctggctaggacaggttgtacctagggccacagcgaggagaccagagagctgagtccaggcaggcacctgagcgaagactccagctttcctgggccatttcccctatgccaggccaggccccagcctgatgcctggtctgctctggtgtctcccctgggaaacattccagaaccatgaatggcttgggctgttgccagggcacacaaagagagtcaggccgaggagcaacaaccccgtccagatgcccctggggctgcctccagcacttctgcccctcccttgctgggcaccctttgtagggcttctcccatcagtcacggcccataggcagccaaacccatcccgggatatccccgcctagctcaggaggaacaagagggcagtgggtacaagggccagagtgccaggtatcagcacttgtgagcagacagtgcagagcrggtggctggctgggcccgtggggaggtgaagcctcacggacgtcctttctgtccctctctgctcccttctgccgctcttcggctcctggtcccccaggtggacgaggctcagagacggatggatgctgagatctggcagctcctgtccagctttgctgcccaaccccaaccccctccccaggggctctctcctcatccccagcctgcagctgctctgcgagcagcacctcctccttcttcttcctcctcctcctcctcttcctcagcttctctgtctttctcaccaggctctcaggtatgtgccaaggtgcccatcaagggatccccacccaccatgctttctagacttcagtcatttctgaaccaacttcaccaatttctgtgaactacttggactattatttctttccaattttctcttaaatcaatcatgtaccaactcaggctggttactctctttcaaatacatatgaaaggagccatcccattgaaattgtttactgatgtgctgtgtaaacgttggtccacaaaagagacccaccagatgggaggagaagccgacccaggccacgcccagagagagcagctggggacctgggccgggattgggaagaaagtcgtccaaagagcaaggccaggacccgcactgtcgggtgggagtggggggctctgtctctctgccctgccaccaggcctccctcccatgacggtccacccctgccggaaccacctccgccctcccacccccacccctgctcccctcggctcttaccacctgcccttccctcctagttctctctctcctacgaaggcttctctctgcttcctggaagcctctattactggcagctgccccgggccttcctgggggacaaggtaacaaggatttggggggattataggggtgtcatagaatcccaaaatatcagagggccctttgtcaaggccctttatgacacaaatggggagaccgaggctcacggtgggtagagacttgcctggggtctcatgttcaggtcagagcacagctgagactgaactcagctctgcccctgtccttcagcgggccctgacccctgacccctggcccctgacccctgtcagaggagctgtctcgcctgggagggtttctctagtgccttttctctgggcttccttgaccttgtgtctagatgctggcctagtttttggtacttcactcagtcattcaagaagcattaattatttactgtgtgctkcgtcgtgtacaggccgagtgggccctggcctcccagagctccctgtccatcccattatcattcctgtcaccatcagtatcattattattatcatcatgagtgctggcattggccttagatgagtattcatattgcctctattttgttccaacaatttcaagtacctcttaagaatacacatagcaggctgggcgtggtggctcacacctgtaatcccaayactttgggagactggggcaggcgaacacctgaggtcaggagttcgagaccagcctggccaacatggtgaaaccctgtctctactaaaataacaaaaattagctgggcgtggtggcgggygcctgtaatctcagctacttaggagactgaggctgtagaattgcttgaacctgggaggcggaggttgcagtgagcctagatcatgccacttcactccagcctgggcaacagagcaagactccatctcaaagaaaaaaaaaaaattcagcttcctggctgggtgcggtggctcatgcctataatcgcagcactttgggagactggggcaggcagaacacctgaggacaggagtttgagaccagcctggccaacatggggaaaccctgtctctactaaaaatacaaaaactagccgggtgtgttggcaggcacctgtaatcctactgcttgggaggctgaagggggagaatcacttgaacccgggaggcagagattacagtgagctgagattgcagcactgtactccagctgggcaacaagagtgaaactccatctcaaaaaacaaacaaaaaaaagaataggcagtcacaaggtacattcagagaagtgagacagggaggttgaggggtgaggataagaagcaatctgctggagccgagggtggagctggagtactgcagggttatcaagygtgatatgcattctcaaactgtgtggagtacatcaccatttgtgtcctatattacttaatcctcatgatacccttcaaagtgggtattacttttacttccatttccatgtgaggaaagtagggctcagagaggtgaagcgacttgtccaaggctgtatagccagtagagctagagtttgaacccaggtcattcagactgtggagtctgccgttttaatcactatgctggatctgggtacaatggctcacacctataatcccagcactttgggagactgaggctgaaaaatcgcttcaggccaggagttgagaccagcttaagcaacatagcgaaatgctgtctctaaaaaaataaatcggccgggcatggtggctcattcctgtaatcccagcattttgggaggctgaggcaggacaatcgcttgagtccaggagtttgagaccagcctgagcaacatagggagaccccatctctatttaaaaaaaaaaaaaaaagtgcctgagcaacatagggcgaccccatctctatttaaaaaaaaaaaggtgaaaaaaaaaataaaaaatttttaaaaatcactgtgctgtacacacctgcaacttgccagaaagtcagtcccagaaatggctgtgaactttctggcattcaaagcaagcaggaaaccagttattttatggttatttggttccactccaaaattccttaccatgccttgagctcatggagaatatccctgtagccatgtagcccagggccgtgtgtgtaatcagcaggtgtttgataaatgctggttagctgagtgaacacacaaatgaacaaagaggtaggcttgatgcagtttggtattgagatgaatgtctgccctggtggcagrggagagaaagcaaagtcctgtgggacagagctgggkagcctcagctgtccacgtgaaggtcctctgcagcagaagtaaggactccccagtcatgagcaacacagtgcccaagtccagtgggcttgtctgcaacaaagaatctatcggctcatgcaactgcagagtctaagcatgtatggtgtcaggcatggccttatccaggggctcattagggctttatcttggttctccagcttctcatctgactgcagaagggactttctctggcctggtagaaagagcataagtgcacgggttacttgtctatccctgatggggtggcaaagggcagtggtaggttatgcagattggccaggcctggctcatgtctccactatagaggaggaggggatcagggccctcagaccacatggtctgcatgtgcggagacagttgttctttatagaaaaccacggtttagtttctagaaagcaggaactggatactgggcaaacaaaaaccacctgcctaggaggcaaggcctccgaggggctgccgtcagccccacccccatggctgagaacttttgaagcttccgcagcctccccatggtggtcattgtcattacacttgtctgccttatgggaaattcctgtaaatgaaagcagacctggagtttgttcgccggcaccgtcaggcaatggggaatagagaaccttgcagagcaaagaggctgctcagcatcatcaccaccatgtctggggctacagaggaactgagaaatgtcctgtttcccaggcaaccatgcaccctggcctcttggtttgggcagggaggggggtgggggagtgtggcacaggtgcaaaaaggccrccagatgctccatccctcacctatatggtccaacactcacaccccaaggtcagcctgtgacctctgggcttgcctctttgcaggtggcggcctacggtgggaagttgcgatacaccctctcctacacagcaggcccacagggcagcccactctctgaccccgatgtgcagatcacggtgagcatttggacaccatgctgggtgggcagaagggcaggatggaagccaggggcaccctcggcatttgtcctttgtcctttccatccagcactcagttttctggcacaggctgggggagttaggcccatgcccccacatccctgcctggttggacactacccaagcagaggatcctgctgctgggagaagggggcagtgggcatgtgcctgactcctttgggcgcatgagcttgggagagcagagaggtgggaggctgggggttacagagaatctaggactggtggaggacaccctggcaccccagggacccctcggctccccttccaatcctgctggtgtctttccagggcaacaacatcatgctagtggcctcccagccagcgctgcagggccctgagaggaggagctacgagatcatgttccgagaggtaaggggcacctggccatgctgtgtctaaccccaccccaccctccaccctgactcagagcctggctttgatacccaccctgtctctcgctccccaaccttcacctggcagccctcagtcagtgcctgtaaggcaggatttggggggtggtaactgtaggagcagcccacaaagcccactgcccccgcccacgttgccacccccaacccaggaattctggcgcyggcccgatgggcagccggccacacgcgagcacctcctgatggcactggccgacctggatgagctcctgatccgggccacgttctcctccgtgccgctggyggccagcatcagcgcagtcagcctggaggtcgcccagccggggccctcaaacagaccccgcgccctcgaggtggaggagtgccgctgcccgccaggctacatcggtctgtcctgccaggtgagtgtgtggccagctccaccacctctgcacaggcacagaggcatcagcaagcaaatcagccggcgtcgccgcagccttgattaccatcataactataatgacccctgcatctgggccctgcatgtattcctcccgacagccctgagttacatatcattatcccctttaacaggtaaaaaaatagaggtgctgaggggtgagtgtgtcccaagggcacacggctaatgtgtggcagaaactaatttgaacctgggtctgattgactccaaagcctagcatgtcctaaccactgggcagtgcakcctcacgtttgggccacactctccgggggttaaaacccagttcatgcccttgagggggcccaccagagacagggagccaattcagaaacacagattaytccggcccaaagcacagcatagagatgcctcccagaggtgaacagtgtggactgggagagggcygtgggtgggaggacagactgagcagaagtggggaaggaggggcgccggcctgtgatgttccagggtcacccctgggaggacactggagggaggggttctgggtctgctggctgtgggtggggcacgttgggaacagaggccaaccttcctctctgcccctaggactgtgcccccggctacacgcgcaccgggagtgggctctacctcggccactgcgagctatgtgaatgcaatggccactcagacctgtgccacccagagactggggcctgctcggtgagctgcaagcgaggccaggacagggggtcagctcagctgggcctgggtgggggaccagggctggacaaggcaggcatcaatccaggggatcaggatcatggggcatggcctgtggttcaaagcacctgggtcagcaggccaggtcaccggggatggtggggtggccagagctatggaataacatccttctgtgtaaagaaaactttggttctttactatttttttctttttcttaaaaaaattttttttatctaatacagatggggtctcactttgttgctcagaaggtcttaaactcctgagctcaagcaacccacccgcctcggcctcccagagtgctgggattacaggcgtgagccaccacacctggcctttttactttttttttttttttgagacagggtctcagtctcgttctgcctcctgggttcaagtgaatctcatgcctcagcctcccgagtagctgggactacagacatgagccactgtgcctggcctcattacatatattttttataccttgacttttcagagtagcatgtatatagccccccagggtacgcagtgaaggggcaggtggttgacagccataacctaaacttggagcaaggaacaccctattgttgataccacaaacgtgaatctctttggaggagaatctgtaacccacatgtttttatgaggatgcacgtattttctttttcttttctttttcttttttttttcaagacagtctcrctccgtcacccaggctggagtgcagtggcgccatctgggctcactgcaagctccacctcctgggttcacgccattctcctgcctcagcctcccgagtagctgggactacaggcgcccgctaccacacccggctaattttttgtgtttttagtagaggcggggtttcacctgtgtcagccaggatggtctcgatctcctgaccttgtgatccacccgccttggcctcccaaagtgctgggattacaggtgtgagccaccacacccagcctcttttttttttttttttttttttttttttgagatggagtctcgcttttgtcacccaggctggagtgcaatggcacaatctcggctcactgcaagctccgcctcctgggttcacgccattctcctgcctcagcctccggagtagctgggattacaggcacctgccaccatgcctggcgaatttttgtatttttagtagagatgggatttcaccatgttggcaggctggtctctaactcctgatctcaggtgatccacccacgtcctgagattacaggcgtgagccactgtgcccggctgacaatacacatttttaatgctctgcccccaaatacctgagtgtatacctttcctttgctatcacaggtacttagggagaaaatagaattagcatcaccctttttgacagctatttggatggatgtactttttaatttatccaattccctattcatggatgtttaggtttgtttctagctttttttgcttttttttttttttttttttgagatggagtctcgctctgttgcccaggctggagtgcagtggtgcaatctcggctcactccaacctccacctcctggattcaagcaactctcctgcctcagcctcctgagtagctgggactacagacgcacaccaccatacccagctaatttttgtatttgttagtagagatggggtttcaccgtgtcagccagttggccttgaactcctgacctcaggtgatccacccgcctcggcctcccagagtgctgrgattacaggcatgagtcactgtgcccagcccattttgctttttataaacaccacggagatgagtgtccttgtaatgaaatctttgtgcccttccatgattctttctttaagatgagttcacaaacttggaatttctagatcaagggattgcaaccctgaaaggcttctggtaaatttggcctaatggctggtgcctgccctccttgtgccctgcagcaatgccagcacaacgccgcaggggagttctgcgagctttgtgcccctggctactacggagatgccacagccgggacgcctgaggactgccagccctgtgcctgcccactgaccaacccagagaacatgtgggtaccctagctcaaggcccaaggacacacttccactggggaatgagtggaaggcgttgcactggcttttggggcagaagtgaagggagcaagatggagattgggcttcccatgacctgacctttgcctccccgatcccaggttttcccgcacctgtgagagcctgggagccggcgggtaccgctgcacggcctgcgaacccggctacactggccagtactgtgagcagtaagtttgtaaacagaagtagggggagggtggaggacaaatggtggactcccaagtgagagccttaaagggtgttgctcagaaaagtctcttctaggattatgctccttccctgcctcaaacacttctaagacacctcattgctcttgggacaagcccaccctccttaggcagctttactgtagcagtctcatcccacttctgacacccaactctgtactttagctgggcttaactttttaaatgctttttctttttttttttttttaaactgagacagggtctcactgtgttgcccaggctggtcttaaactcctgggctcaagcagtcctcctgcctcagtgctggcattacaggcgtgagccaccatgcccagccactttttgaattcttgatgttcaggccttgcttatgctgttccctctgcatggaacagtcttcacccctaaaccacccgttcctggctaacttccccttagccttcagacccagcttcattcactcattcagcaaatttttatcaagcagctcctgtgtaccatgctgtgtgctgaggtgttggagataatggagtgaacagaacagattccaccccagcccttacggagtctgccacctaataagagatcagccctaatgggagataagacagggaaaaagtaattgtgcaaatgtgtatttacaaaccatgttaagttatctgaaagaaaagtacagcctgctctgaggtaatacgagaagtcccatcctcttggaagcctccctggctctccaggstgggccagtgccctcctctgcacccgcacagccctgatatgcttcctgcactctcattttcatgtagaatttccatgttgggttcccaactagtaagtcccacagaccagggactttatcacattcattgttgtatttccaacacctatagcacatgcctggcattcagtcattgcttaatggacatttgctggccaggcgtggtggctcatgcctataatcccagcactttgggaggctgaggtgggcggatcatgaggtcaggagatcgagaccatcctggctagcacatcctgcctctactaaaaatacaaaaaattagctgggtgtggtggcgcacccctgcagtcccagctaattgggaggctgaggcaggagaatggtgtgaaccccggagacggagtttgcagtgagccgagatcgcaccactgcactcgagcctgggtgacagagcgagaatctgtctcaaaaaaaaaaatggacgtttgctgaatgaatttctctggagaatagagaccttacctctctcatcacccaacctgctaacactcccttacactcccctttctcagttcaccagcaccctgcgttggggcctgtctggtccccaaagtgcttccagagctccgagcctcctcacctgacattgggtggcctgctgagcttctggctccccaagtccaccatgaggcactggggcccttgaggcctgacattgccggcccttgttcccccttacaggtgtggcccaggttacgtgggtaaccccagtgtgcaagggggccagtgcctgccagagagtaagtgggaccatggcccaggatggggacgatgggcaaggcagggagccctgggaatttgggggatactgggtctggggacagggctgagggtggggtaccccagcttttgggagagcagagatattgaagacaatgctgaaaggcccttcctgtcccggcccccacccccagcaaaccaagccccactggtggtcgaggtccatcctgctcgaagcatagtgccccaaggtggctcccactccctgcggtgtcaggtcagtgggagcccaccccactacttctattggtcccgtgaggatgggcggcctgtgcccagcggcacccagcagcgacatcaaggtacccatggccctaggctcctcagccccaagagccatcccagtgggaggggaggcaggggcctgtccctgccctagtgggatgctgtccttgyrcatggggctggatgtgagaaagagtgtatctgcaccaacaagctcttgtctcctccccaccaggctccgagctccacttccccagcgtccagccctcggatgctggggtctacatttgcacctgccgtaatctccaccaatccaataccagccgggcagagctgctggtcactggtgagtccctacgccccctgtaaccaagactgcctgtcctgggctgggctgcaggctgcagattcaggcagatggtgcattcacctgctgggagggggcagtggttgcccgaacaaggtcagcagccatggagatgaggagaggtggcagattcaagactcattttagaggtaggatcagcaggacttgactggtcggtgagggcaaaagaaaagggtgggccgggcacggtgggtcacgtctataatcccaacactttgggaggccaaggtgggcagatcatgaggtcaggagttcgagaccagcctggccaacgtcgtaaaaccctgtctctagtacaaatgaaaaaattagctgggcatggtggtacacacctataatcccagctactcgggagaactgaggcaggagaattgcttgaacccgggaggtggaggttgcagtgagccaagattgcgccactgcactccagcctgggcaacagagcaagactctgtcttaaaaaaataataataataatgcacctcagagtcaccctgccctgtcgtccagggaaaagtgagacagggatgggagggcrtccataaaggctgtgtcaycaagcagattgccaccgtgagcagttgttgcttagtacaaccgaggaagcttttaaagggagccggtgtaaaacacgcacctcaaagtcaccctgccctggggtccaaggagctgcagtatgtctaggccagcttctgtcagtcattgactgagacctattctgggagcatcaagtcccctgcacatctgtcccacccatgggtgtgcactgtgggctccagtggcctgagaaagccctcaatgcaaagaagtgcagtggctggcagaagtcaggcaggtgggcacggggggtgggaagcgtggctaggccaccagcagcacaggctacaaacaggtcagagagaatcgcaagtttgttttggacgtgttagagtctgagatgtttgggaagatatctcattgagtccaccaggcaggcatttgggtatgtgagtctgaactccagtaagaggccccagccagagaaatgagtatggttgctgttggcacagggatggtgttcaaagctatgggacaggatgaagtcacctagggagagtgtggcccgaggacagggccccagcccagagtcctgaggagctccagtgtgaacatgtcaaatggaagaggaagggcaggaagagcctgagagagtgcagccatgaggcaggaagagacagggggcatcatgggaatcagagggaaaagggctttcagggcagcctccctgctgggaagtcacataagggcagagaaatagcccttggaggtcatgctttgacaagagcggttttcagtggagagaagrgatagaaaccagattggaaggaggcgacacatgggtgggaaggcagcgagtgtggacaactcctgcaagagtcttggctctgaagggaggccaggaagtgggtcattgactgcgagagcrtgaggtcaagggggagttttcggaaatgggaaatcctagaatgcactctggaccgaagtgatcgcatgagaaggaggagacgctgatgttgcgagagcagaagaagccccggggaggggtggcactcaggcgcagcagtgggatggggtgagggcaggagaaggggcctgtccttcagggaccagtatctagagagctggtagatttgagaggctgggaaaactcctgacttgtcgtttctattttctccataagtgtgtgtcagcgccactagctaagaaagtggaagggtggttggagaggctggaggagatgggaggaggtgtgaaatagttgtttttgggggatagaaactcaaaccagacggagaaacccagttggagtggggtgtgatgtgtcaggagctcattgtggtctgtgatcaggaactggagccaagtggacccatggtgtgatgttccccaaccacatcctgtggccactctgtgctggcaaggagggtggggatggtggggttcagccagaatgggggagggaggtgccagggggtagaatgagagctaggctggaccaggaaggaagtgatgcctagaggttatggagaaagacaaagtggccacaggaccggggcctagccagcaccggctcacaggggggcttcccgtccctgcagaggctccaagcaagcccatcacagtgactgtggaggagcagcggagccagagcgtgcgccccggagctgacgtcaccttcatctgcacagccaaaagcaaggtgtgcaggtcagggagtggggatggaggaagtctgtcytctggggtctctgagccccacccatgaccccctttcgccttgccctgcagtccccagcctataccctggtgtggacccgcctgcacaacgggaaactgcccacccgagccatggatttcaatggcatcctgaccattcgcaacgtccagctgagtgatgcaggcacctacgtgtgcaccggctccaacatgtttgccatggaccagggcacagccactctacatgtgcagggtacacctcccatctatacctgattctcccaccctggctctcccccattcccaccagaattagcacagcatttcttcattctgctgatcatttctgagcacctgctgcatgcctggtcctggtctaggctctgcagaagcaggggagagaagcatgtacagtatctcggtcctcctgaagtacacgtcctaggcagggagaccataagcatgggaataaatgaacaagcaagataactacacatggcgatgagtgccaggctaggaatgatgagaaagcaagaaacaaggtgggagaaggccaggagcggtggctcacacctgtaagcccagcactttgggaggctgaggcaggtggatcacttgaggtcaggagttccagaccagcctggccaacaggtgaaaccctgtctctactaaaaatacaaaaactagctgggtgtggtggcaggtgcctataatcccagctactcaggaggctgaggcaggagaatcgcttgaacccgggaggcttaggttgcagtgagccgagatcgcgccactgcactccagcctgggtgacagagcaagaatccatctcagaaaaataaataaaataaaacaaggtgggagaggcaagggctactctagatagggcagtcagggagggcctctctgaggaggtgacacctaagctgagacctgaaggaaaggtaggcattgagcaagttagagagttggcagagtgttcttggcagagggagcagcacatggcaaggccctgaggcaggagcacgttgctatgtttgaggaacagcagagaccacgtggctggggctgtgggagggaggacgggtgtgggcagacgggagagcatggagtatgtggtggatcagggtaggaattttggattttattctaaaagcaacagggagtcatggacaggtctcaaggtgggaggtcacaaggtcctgttgacatttcccaagctccctctggctcctgtgtgcacagatggccgtggagggctagcctggaagcagagaaagtaggcagcaggactgttgtgtgagtcagacgacactccccaccctgagtgcatgttccttttcctcccttgtcagcctcgggcaccttgtccgcccccgtggtctccatccatccgccacagctcacagtgcagcccgggcaactggcggagttccgctgcagcgccacagggagccccacgcccaccctcgagtggacaggtgagrccgtgatgggaatgacattcaaggcctgactctcctgggtgtgggaggggaggggcaggactctgagcaggcttggtgggtgctgaccccacgtctactcrtcagggggccccggcggccagctccctgcgaaggcacaaatccayggcggcatcctgyrcctgccagctgtcgagcccacggatcaggcccagtacttgtgccgagcccacagcagcgctgggcagcaggtggccagggctgtgctccacgtgcatggtgagaggccgggctcagggtgggggccgggagtgtgctcagcccagggcgtgttctcacaggactctgtctgcagggggcggtgggcccagagtccaagtgagcccagagaggacccagrtccacgcaggccgcaccgtcaggctgtactgcagggctkcaggcgtgcctagcgccaccatcacctggaggaaggaagggggcagcctcccaccacaggtgaggagatgggcccacccaggaggaggaggcccacaggctctgcagagagtcccagccaccttccctccccsttcacgccccaccccacctcctcctctgtggctcccttcacctccaagatggtggtctcctgcccctgcatcccagcagggagcccctgccgtcctcttggctgcctggcgtttgtcctccttcatgccccactgggccctaatattggccctgcacctgcctctcccttttatgccctatctgtccccctggccagccgttgtccagctgcctctggggcagctgacccatctcacccrcggcaggcccggtcagagcgcacagacatcgcgacactgctcatcccagccatcacgactgctgacgccggcttctacctctgcgtggccaccagccctgcaggcactgcccaggcccggatccaagtggttgtcctttcaggtacggactctctgggaayggaggggtggggagggcaagccagggctcccctggggcctgctgacccctactctggccccagcctcagatgccagcccaccgccggtcaagattgagtcctcatcgccttctgtgacagaagggcaaacactcgacctcaactgtgtggkggcagggtcagcccatgcccaggtcacctggtacaggcgagggggtagcctgcctccccacacccaggtatgtgggccctgagcctatggcaggggacccagggtgcaggggctgtggcggaggcggggcctgtacgctgggcsggggaggcggcacactgccccacacgttccaccagcagaagccaggcctcatctccctccctcccagtttctagcatgggatggctcggagcagagccagtgagagtttgaatgaatcactgaggctgagggagtggtgacaatagcccccgtccctgtcctcacgtacctctggctcctcctggcccaggtgcacggctcccgtctgcggctcccccaggtctcaccagctgattctggagaatatgtgtgccgtgtggagaatggatcgggccccaaggaggcctccattactgtgtctgtrctccacggcacccattctggccccagctacaccccaggtgaggagccaggtgtggctrggccggggctgagccctaggagctcccaaggaagatgcctgtggcttcttcagtgggaccaggacaggggggcattccaggcaggctttgacccttcagcgcctgctcagagagagraggaggttgagtggacgggagggaggttaaggctggtccagcttacctgggctccctatgagtgactgtttcagaatttgtcaggaagcagcagaatgtccaggttgaatactaagctgggagtcggctgacctggttcaaatcccagatctgccccttagcaaccttgaactagcttttaacttttggggcctcagattcatctatgaaatggagcagtactgcccacctgcttggtcatggtgtggtttttttattattttattttattttattttattttattttattttattttwtttttttgagagagagtctcgctctgtcacccaggctggagtgcagtggcgcgtgatctcggctcactgcaagctccgccttccgggttcacaccattctcctgcctcagccttctgagtagctaggactacaggcacacccgccaccaggccggctaattttttgtattttttttagtagagacggggtttcaccgtgttagccaggatggtctcgatctcctgacctcgtgatccgaccgtctcagcctcccaaagtgctgggattataggcatgagccaccgcgcctggccagtcatggtgtggtttaaatgagacagtgtctatggaaagtacttgtgagcacacggaagacgtcctgtagaagggaggtgtctcactgtcatccgcatccttgggcgcagcctgggtagtaaagcttgctggttccctatgggccagaggagctcatcatcaagaagtcatgggtgggtcaatgggcctccagcttgtggttagaggctggggagggaagaagccatattcggctggccatgtggaggcagaagggtgtggccctagtcccagaaaggccrcctgtcggccgtccccactagggcctggtcacagcccagagccttctgccccagggctacaggttacagcccaagagttcaggcctctgagcagccgctctgtgtccagtgcccggcagcacccggcccatccgcatcgagccctcctcctcacacgtggcggaagggcagaccctggatctgaactgcgtggtgcccgggcaggcccacgcccaggtcacrtggcacaagcgtgggggcagcctccctgcccggcaccaggtatggcagccccccrggaccaccttgctggaggggcyggatgggactgttccagccccctcccaacccaccccatttgcacacagacccacggctcgctgctgcggctgcaccaggtgaccccggccgactcaggcgagtatgtgtgccatgtggtgggcacctccrgccccctagaggcctcagtcctggtcaccatcgaagcctctgtcatccctggtgagtgactcccagtgacatggaaagctggaggaggcagagaggcctccggggtggtgagatccaagggacccctcttgmtgacagggcagaaggcccacaccggagctggctgcagggccctgcccaggccgactccacctgtcagagtaaccaycgccttcccgtcacactttgctttggccacatgactcctcaggcrtcccctcccacctcctcttcctctctccaactcatctctgccctcatctctctcacttcctcactcccctctgcaaggcrtggcccatgccctggtcctcccatcagggttgctgagctgagggcatcaagtccaggcccccagatgcctgaaaagctggatctggccttgaaaccctgggctgagctagctgcagggtgggcaacccctgccctctcatctcaggagcatctacaactctcactcccatccccactgctgcaggacccatcccacctgtcaggatcgagtcttcatcctccacagtggccgagggccagaccctggatctgagctgcgtggtggcagggcaggcccacgcccaggtcacatggtacaagcgtgggggcagcctccctgcccggcaccaggtacagggcaccaagaatgtgggacggggccatggacagtgggttgcaggatcctggcccctaggctgaggggctggcacttcctagatcggggggacagcggtggggcatytgctggcctccgggaagcccccctcacacctctgcccacggctgcccaggttcgtggctcccgcctgtacatcttccaggcctcacctgccgatgcgggacagtacgtctgccgggccagcaacggcatggaggcctccatcacggtcacagtaactgggacccagggggccaacttagcctaccgtgagtggggccaccaggctgggctgggatgcagagaacaggctggagtggcttcagagaacaggagtgaccggtgaccatcttatccctcagctgccggcagcacccagcccatccgcatygagccctcctcctcgcaagtggcggaagggcagaccctggatctgaactgcgtggtgcccgggcagtcccatgcccaggtcacgtggcacaagcgtgggggcagcctccctgtccggcaccaggtatgggactggaggacagacaggccaagaagaggaagcgggtccctgggtggcggaggttattgggggagggctagaggctcccctgagatcaggaagccctggaccccattgcacagatgtatagtgcagtggttagaaaccagaatctaggactgacyaacctgggtgtgaattctggctccaccacttagcttgtgacctcggacaagttacttaacctctctgtgctatagtttcagggcctataaaatggtaacaatggtacgtaccagccgggcacrgtggcttacgcctgtaatcccagcactttgggaggccgaggtgggcgaatcgcctgaggtcgggagttcgagaccagcctggccagtatggtgaaaccccatctctattaaaaatataaaaattagccgggcatagtggcaggcgcctgtaatcccagctactcgggaagctgaggcaggagaatcgcttgaacccrggaggcggaggctgcagtgagccaagatcacgccattgcactccagcctgggcaacagagcgagactcagtctcaaaaaaaaaaaaaaaagtacctcacagaattatcttaaagattaaaatatatgcaaaatcctcagagcttaggctcacagaaagtactctaagctgttaatattttactataatgccrttagctattgttgttaccatattttgtagaatttaggataccactgattkcgagatcygctatgattttatgtacctctaagaaaaagcttctatttgtaaggttattcattgtagatgcatcttgattttggagacatcgaaatgtgtgtctagaattgatgggatgtggtgtgagtgtgtacccagctcactggggctcctctggtctaccaccccgctgctggacaagagtcccccttccccatgtgaaggacagggaaactgatccagagctgatggccaggccttgggggtcagagtgaggcagggttgcaggttataggaacaggggtctcctgagggctccctctgactcacccccattctggccagacccacggctccctgctgagactctaccaagcrtcccccgccgactcgggcgagtacgtgtgccgagtgttgggcagctccgtgcctctagaggcctctgtcctggtcaccattgagcctgcgggctcagtgcctggtgagtagctctcagggagggcagrgctggggacccagggtgggaggccccccactcttgcaacggcaggatcaggaggccaagccrcagactgcacctgccttgagaccaggagccccatctcatctcacctcctagccrgctattgaccctttgccctctgtccccagcwcttggggtcacccccacggtccggatcgagtcatcgtcttcgcaagtggccgaggggcagaccctggacctgaactgcctcgttgctggtcaggcccatgcccaggtcacgtggcacaagcgcgggggcagcctcccggcccggcaccaggtaggaggcaggagctcaggaagcctgaaggaccctgtagctgcagtacaagagcataggcttgaccgggcrcagtggctcacgcctgtaatcccggcactttgggaggccaaggcaggaagatcacgaggtcaggagtttgagaccagcctgaccaacataatgaaaccccatctctactgaaaatccacaaattagcckggcgtggtggtgcgcrcctgtaatcccagctactcgggaggctgaggcaggagaatcgcctgaacccaggaggcggaggttgcagtgagccgagatcgtgccgttgcactccagcctgggcgacagagcaagactccgtctcaaaaaaaaaaaaccacaggctttgaactcaggcatgttcgagttcagacactgttccgctacttgcatgctgtgtgactttaggccagtcacttgtcacttgattctctgaccctcagtgtcctatgattttatgtacctctaagaaaaagcttccatttgtaaggttattcattgtagatgcatcttgattttggagacactgaaatgtgtgtctagaattgatgggatgtggtgtgagtgtgtacccagctcactggggctcctctggtctaccaccccgctgctggacaagagtcccccttccccatgtgaaggacagggacagtgatccagagctgatggccaggccttgggggtcagagtgaggggccaaatgggctcatgctgcctacctcatctcccctgtagcatgtcracaaacactggtccccacttttctctggtgccaagtctcagtcgtccctggcatgggtgaggtgggacgctagacccagtcctgacactggggcggtagataggaagggagaaggtggttttccctggaagagtttccatcgagttccagcwggctgggctgggagtggcaccagggaagggaacaggagcttggcgtgagccgcagtgcccagctctgagcctgcctcctccctcctgaccctcccaggtgcatggctcgaggctacgcctgctccaggtgaccccagctgattcaggggagtacgtgtgycrtgtggtcggcagctcaggtayccaggaagcctcagtccttgtcaccatccagcagcgccttagtggctcccactgtgagtgtctcgggggtcatgcaaatggtggagggctgggggaccccgactgcaccctcagcagctcccacaccctgccttacatctcaccctcccagcccagggtgtggcgtaccccgtccgcatcgagtcctcctcagcctccctggccaatggacacaccctggacctcaactgcctggttgccagccaggctccccacaccatcacctggtataagcgtggaggcagcttacccagccggcaccaggtacagggccagcaggtggggagggcaaaagcagggcacrccagcccccaatgggaagaggggggactctcagcacctcactctgtgctcattcagtcattcaamaaacattgagtatccttgctggatgggtcctagaccagtgctgagaatacagaaataaggctccctgacckcagggagatccacttctgcaccaaatctcactgaaaagctgctccgggycatgtcctgtgcctgacactgaagattccagatggaatgagacagttgcctgctctcaggcagctcgcaggctgtgggagccccagcaggatactgtgtcaacactccggagggccttaacaggctttctggaggggtgacaaaaggctagacgtccaccccagcccagagacaggccacatgccatgctgggagcttcacgaaggccactgaggaggcaaggcagggaggcccccagagtccaggggcagcggcagcagtgcccaagatgtggaggagctgcccacacctactgccatacctcctgccayctgcttcctgcagatcgtgggctcccggctgcggatccctcaggtgactccggcagactcgggcgagtacgtgtgtcacgtmagtaacggtgcaggctcccgggagacctcgctcatcgtcaccatccagggcagcggttcctcccacggtgagagcagagagggcagggggtmcagacaagtggcgcagagggtggcagagaggtccccggtgccatcrctgttatctcamtctggctgcgtggtccacacccgtctgtccccagtgcccagcgtctccccaccgatcaggatcgagtcgtcttcccccacggtggtggaagggcagaccttggatctgaactgcgtggtcgccaggcagccccaggctatcatcacatggtacaagcgtgggggcagccttccctcccgacaccaggtacagagtggagccacagcagcgggggtggaaccatggtctcctggggtgagcagagcaggctccctgtctcacggattgggccctgggtagaccgatagcagcctcaacaggctgagcaggaaggcctgagccagctggtgaccccagcgtccctccactccctctccctctccttccccatccgcacgyccagacccatggctcccacctgcggttgcaccaaatgtctgtggctgactcgggcgagtatgtgtgccgggccaacaacaacatcgatgccctggaggcctccatcgtcatctccgtctcccctagcgccggcagcccctccggtgagtctgcctaggaaagggacgagggatgcaggcaacagtgttccctggggagaaggaactttcaggtcagagtcctcagacytggtggtactcaggcaagggccagcrgaaagatgcgtgggttcagtggctacggctaccccatttctaacatttcaaattctcartagccacgtgtggcttgcagccactgacttggcctgtgcagataaaaagcatttccatcatcacaggaagtttacgaattttgtgagggttaagtgagttagtgcatgtaatgtgcttagagygtgcctggcatgccagaagtgctttataagtgttaactattattatcatttttttttttttgagagggagtctcgctctgtcacccaggctggagtgcagtggcgcgatctcaactcactgcaacttccgccttccaggttcaagcgattctcctgtctcagcttcccgagtagctgagactacaggcacatgccaccgtgcccggctaatttttgtatttttagtagagacaggatttcaccatattggtcaggctagtctcaaactcctgacctcaggtcatccacccacctcagcctcccaaagtgctgggattacaggcatgagccaccatgcccggccaagtgttaactattagtgttactctggggggtgagattttctatggcagagggtcccaccaaccctrttcccaaatctgacaacggctgtgccgactcactgatctctgttcccccagcccctggcagctccatgcccatcagaattgagtcatcctcctcacacgtggccgaaggggagaccctggatctgaactgcgtggtccccgggcaggcccatgcccaggtcacttggcacaagcgtgggggcagcctccccagtcaccatcaggtatgcagctggcaggaaatggtgggagagccgctggatgtgggggccctggctagctttgccaagagggagacctaggagccccygtggggtgcagtacccccctgtgtcagaggttagaccctggccccaggccttcaacagttccagactggcacctgactctgttcctctgtcctgtcccctattcagacccgcggctcacggctgcggctgcaccatgtgtccccggccgactcgggtgaatacgtgtgccgggtgatgggcagctctggccccctggaggcctcagtcctggtcaccatcraagcctctggctcaagtgctgtccacgtccccggtgagggtccctgcagtgggacgggaaggccgggggagggaggaagggacagagaccagggggcagaactggcagaaggaaacactttctggcactcggcgagaactgccgctctgattccagacttcacctcccgccacccrcacggtcccaggaccaaggagccggctcaggtggagtggttcctgtccctctccacggcttgcgagcataggctttggactatgctcatctgtgcatgagtcccagttcctctggccacacttggagatgttgcacaagggacctcagctttccacctgtcactgtcccttatctgtaaagaaggggtagtagtactcttgtactctactatctaattatagagttcccaaaagcctgggactgcacctctgcgagtattggagggtgatttacacatctttattagagccggtgtggtagctcccacctgaatcccagcactttgggaggccgaggtgggcagattgcctgagctcatgagttcgagaccagtctgggtaacatggtgaaaccccatctctactaaaaatacaaaaaattacctgggtgtggtggcgcctaccgttagtcctaactactcgagaggctgaagcacaagaatcacttgaacccaggaggcagaggttgcagtgagccaagattgcaccactgcactccagcctgggcaacaaagtgagactctgtctccaaaaataaataaataaataaataaacatctttattagtactggtggcatataagggacaaaaaaacacatcaagcctgtccttatttcttggaaatctttgcttacaatggggctaagtagttaaggttttttttgttttgttttgttttgagacggagtcttgctctgtcgcccaggctggagtgcagtggcatgacctcggctcactgcaatctccacctctggggttcaagcgattctcctgcctcagcctcctgagtagctgggattacaggtgtgctccaccacgcccagctaatttttgtatttttagtagagacggggtttcaccatgttggtcaggctggtctcgaactcctgacctcatgatccgcccagcccggcctcccaaagtgctgggattacaggcgtgagccaccgcgcccagtgtgtagttaaggcttttttaaagtgaatcagttgaaaggaaaatgtccagtaattaatagcacagggggcacatgctatgcagaaatcatgataaggggacacagattgctaagcagtaaacatgatccagcacttcttaggtgttggaccctatcatatttacacatattagttcattttatcctcacaacagccctttgaggtagatggcattgttctctccattttacagatggggaaactgagactcagagaggtgaagttgttttccaaaggtcatacaactaatcaatggcagagctgggatttgaacccaggcagtctggccccagagtctgggttcttagccacattctatctgagtctgccaaacattagtggtctagtggtctgtgtggaagtgtctagacctcagccctggccccactggtgctgggagcatgggaggaggaggagatggtggggccattgcctgggggcggggctgggggaatgagaagtgcctccacctcccaggctagcccagctgctccaggcctcaatggaacgggaagggaaagaagccatgtcccaaatggcctctggtcctagtatctgggccccaggggaagggctgagggcatcarggtgscatctcagctcactgacctctcccctgtgccccagccccaggtggagccccacccatccgcatcgagccctcctcctcccgagtggcagaagggcagaccctggatctgaagtgcgtggtgcccgggcaggcccacgcccaggtcacgtggcacaagcgtggaggaaacctccctgcccggcaccaggtaaaggagctggagaaggatgcatgcatcctccacacctgcagtggtcctgcctgaatccagcgttgaagggaaagtggcctcagcaactggggcttgtgggaaatggcagcaggaggtcaatggaatcaggaagttgagagcgggctgggcacagcagggccaccaccagccccacagcaccttggtgcaaaatagaaaaggacatctctggctgggcgcrgtggctcatgtctataatcccagcactttgggaggccgaggcaggtggatcacttgaggtcaggagttcaaagccagcccggccaacatggcgaaacgaaaaacacaaaaattggccaggcatggtggcagatgcctgtaatcccagctactcaggaggctgaggcaggagaatcacttgaacccaggaggcagaggttgcggtgagccgagattgcaccactgcactccagcctggatgacagagcgagacactgtctcaaaaaaaaaagaaaaggacacctgttactcaaggctcttgacttcctcctgccggagaaaccatcataataaacatgccctccacaatgcggactgtcaaaggggtcgcctccaacakgatgcgcctacatatytgtgcatggcagtcccagggtgtgggtaccagaggcctgggcatctgaaggctcccagctcaccctccccgctctcaccccaccttggccaggtccayggcccactgctgaggctgaaccaggtgtccccggctgactctggcgagtactcgtgccaagtgaccggaagctcaggcaccctggaggcatctgtcctggtcacaattgagccctccagcccaggacccattcctggtgagtgatagggagcagtgggcgatgccagagcacaggcgcggggctccttcccagctctgctcctctcctctctcccagccgggcacttattgttgcctgcaggcggggtttcctaccacggaggatcaagccaacccaggtgttcccaagtctgacaatggtcccgtcccctcaaccagggggaccccagccctgagtttcaggaggacccttgagtccccagggaaaggagacccttcttaggttatatcagccactctcaagccaccgcgcccccaggatcaactggagctggtcttcactgccaccaccttcagcccctgccttgatcccyggagcctggcctctctcacccaccccctgtgcccacagctccaggactggcccagcccatctacatcgaggcctcctcttcacacgtgactgaagggcagactctggatctgaactgtgtggtgcccgggcaggcccatgcccaggtcacgtggtacaagcgcgggggcagcctccccgcccggcaccaggtacaggggccaggatggggaggattccaggtcaggcaagrttagacctgcagttgctttctgtacccaaacctcaygcaaacaccagcctgcttggggaccccaggggataaaatacgtttgsgggacgagttcaccagcctgcaaatcaggagacctgggtttttctcttggctctgcagctgaatcctttcctgggcctcagtttcctccactgtaaagtgagtgggttggacctctaggattctgtgaatgaagcttccaccagccctaccagctgrgaccctgagcttcygagagaactcttgggtaccggcacagttgggcttggggacattccttgtcctggggactttgccctgataactgtcccctcgctgctctgacagacccatggctcccagctgcggctccaccwcrtctcccctgccgactcaggcgagtatgtgtgtcgtgcagccrgcggcccaggccctgagcaagaagcctccttcacagtcaccgtcccgcccagtgaggggtcttcctaccgtgagtatggcagatgccatgggcaagrggggaagggagggccctgaagctaagcccacccctgctgagcccagccctctgcccctttggccccaggccttaggagcccggtcatctccatcgacccgcccagcagcaccgtgcagcagggccagratgccagcttcaagtgcctcatccatgacggggcagcccccatcagcctcgagtggaagacccggaaccaggagctggagggtgagccaggctggtgggcaggtgggcaagctgggggcaggcatgggggtgccgtcatccccactgtgcaagggtggggcagaagtctggacgccccacattcatggtgtggccctgagtaaggcccttcccgtctctgtatggcaagagcgctggacccaggagtttccaaggcctttgttacyttctgctatctgcgactccatgagctagacacamccaggccggagggattggggaagtgggcccaggggcacaggctggcagcaccaagacacragaaggaccaggtcaatcctctctcaccctcccccatgcaacctcacagacaacgtccacatcagtcccaatggctccatcatcaccatcgtgggcacccggcccagcaaccacggtacctaccgctgcgtggcctccaatgcctacggtgtggcccagagtgtggtgaacctcagtgtgcayggtgaggggacgttgaccctgtggggctctgccctgtttccagcmctgattctcagctcagagcctccaagtttaaatcctccttccaccattgactctgtcttgggcattctccctctctgagcctcagtttccacctcagtgcagtggggagacaggtgcccacccagcagttactaagctggaggccatggcagtgtgggtgagcagcagagccctgcctgtgtgtcagtggttgtcattcctyygcacagggccccctacagtgtccgtgctccccgagggccccgtgtgggtgaaagtgggaaaggctgtcaccctggagtgtgtcagtgccggggagccccgctcctctgctcgttggacccggatcagcagcacccctgccaagttggagcagcggacatatgggctcatggacagccacrcggtgctgcaggtgaagccggggctgcctctctgggtctgaggcccagtccatggcccagccttgagcgggtgcttggaggagatagtagtggatgggcaggtggtgatgagtggatggagagaggaagggaggaatgggatgggatgggtggatgacgaatagactggaagatgagagggaagagagaaggaaggtaggagaaggaagaaagaatgagtgggagggtgggtcgaaggccaagtggatggatggactaatggggtgtcatgagggtgagccctcaagcaaccagatgggacagctaaaaaccaaggaaagggccaggcatggtggcacgtgcctgtaatcccagcactttgagaggctgaggcaggaagatcacttgagcccaagagtttgagaccagcctgggaggccaaagtgggtggatcacctgaggtcaggagttcgagaccaccctggccaatatggtgaaaccccgtctctactaaaaatacaaaattaggctgggtgcagtggctcacacctgtaatcctagcaatttgggaggctgaggcgggcggatcacaaggtcaggagattgagaccatcctggctaacatggtgaaaccccgtctctactaaaaatacaaaaaaattagccaggcgtgatggcgggtgcctatagtcccagctactcaggaggctgaggcaggagaatgatgtgaacctgggaggtagagctttcagtgagcagagatcgtgccacagcactgcagcctgggtgacagagcgagaccctcaaaaaacaaacaaacaaacaaaattagctgagtgtggtggcacatacctgtagtcccagctattcaggaggctgaggcgagaggattgcttgagcccaggaggcagaggttgcaatgagccagatggtgccactgcactccaacctgtgcgacagagtaagaccctgtctcaaaaaatraatatataaataagtaaataaatagataccaaggcagggtagaggaaayagggaagaccaagccagagctggggctgacatcagcgtccccactgagtccccacataaccagcctccttgctttctcccagatttcatcagctaaaccatcagatgcrggcacttatgtgtgccttgctcagaatgcactaggcacagcacagaagcaggtggaggtgatcgtggacacgggcgccatggccccaggggcccctcaggtccaagctgaagaagctgagctgactgtggaggctggacacacggccaccttgcgctgctcagccacaggtgtgaccaagggctggcacatagggctggcagggcagggatgccctggggtctgaaatgtagacacatgtgatctagagatgatgtcatgcccaggggtggggagtacggggagaccrtgttgctagcatcccccagtgatggccgaggaacccaactggggtccccatagagggacaggatcacccagggcccttcctcaccatrgccaccctctgcgggtccctgaggtagcccagtgacttctgtcatcttccactcgactccacaggcagccccgygcccaccatccactggtccaagctgcgttccccactgccctggcagyaccggctggaaggtgacacactcatcataccccgggtagcccagcaggactcgggccagtacatctgcaatgccactagccctgcygggcacgctgaggccaccatcatcctgcacgtggagagtaaggcctcatcccttctttgtctgcaccaaatggagatctgagccccccgactaggctccaccccacacagaaccccaggaaccccatccagaggtctccaggcgctgcagggtcctggagcctgccctgcccgacacccacaccctggcctgggacctttgctttccttatccccagtcctctgggctcaccattcagcttccctggacactggatccaacgacctgctgccattctgacctttgccctccccaatcctgacctctgtgtccccccactcaggcccaccatatgccaccacggtcccagagcacgcttcggtgcaggcaggggagacggtgcagctccagtgcctggctcacgggacacccccactcaccttccagtggagccgcgtgggcagcagccttcctgggagggcgaccgccaggaacgagctgctgcactttgagcgtgcagcccctgaggactcaggccgctaccgctgccgggtcaccaacaaggtgggctcagccgaggcctttgcccagctgctcgtccaaggtaagcagccccggctctgcgtggaaggggatcacctttcctcctggccctttgatgacccagctaggcagactcgggtgggaaggcctccctccataaccccacctggaatgccctcatctcccctactctccagggcccgaggcaggcttgccacctccaggaagccctccatcatgtgtgctcagctcctctagctctcacggctgctccccacctttggcacagccctggcactgccaaaggaaaccattctgtgtacataagcaccccagcctgcctcccctgccaggcagtgagaatgctcagggcagggcctggacccaggcatctcagcagccctgggcttaattgagggcaacaaggcccaggatgggctgggtaaatgcttgacagggacaacagtgaatgagtgacaggagcacccaccccagcacgcccagggcttcagtggatcttcagagagcccagcatttccatggcctcctgcatcaatgatacaaatgagggcttttgggccccaaacttaaagcagcacagcatgtagcccactggtcaagagcctggactgtggactcagacctgggttcaaagcacagcttggccatttgctggctgtgcaaccttggccaagtcactgaacctttttgagcctcagtttctttcttttttttttttttttttttttttgagacagaatctcactctttcacccaggctggagtgcagtggcatgatctcggttcactgcaacctccatctcccgagttcaagcctttctcgtgcctcagcctcccgagtagctggcactacaggcacgcgccaccacgcttggctaatttttgtgtttttagtagagaaggggattcgccatgttggccaggctggtctcgaactcctgacctcatgtgatccacccacctcagcctcccaaagtgctgggattaccggcgtgagccactgcactcgtcctgagcctcagtttctttatctgtaaagtggagagaacaatgccaaccatgtaggctgagttggaaaggtacacagaggtaaacacagatgtaaaactgtggctcgcagtaggcacttagtaaatggggacagtatgcatcagcccccgcctcccatctgtcccctgcatgtgtaggtgtctttgccatggccaagtccctggattctcttatttaaactgcaggcagaataggctttgctgtccttccttaaaatgtctgagtatggccgggcgcggtggctcacgcctgtaatcctagcaccttgggaggccgaggcaggcagattgcctgagctcaggagtttgagaccagcctgggcaacatggtgaaaccccrtctctactaaaatacaaaaaaaaaaaaaaaattagccaggcacggtggcgcacctgtagtctcagctactcrggaggctgaggcaggagaatcgcttgaacccgggaggtggacgttgcagtgagctgagatcgtgccactgcactccagcctgggaacagagcgagactccgtctcaaaaaaagtattgagtccctcccactcttttcgtggcctgccctccccacccagaagcgaggagctgtggaaacagagcccagcgctccacaggcccttatccatgttggtggaatggcagctgtgtgtgcagatgaatgaatctgccactgaacggtcttttttccctggtcagagaggctatcaggagaacattccttgaatgttgggctgggggtttcctgggtccctggaggggcatcagggacatcacacacacatatacctgcagaacctcatacatgtccccgcaggccctcccggctctctccctgccacctccatcccagcagggtccacgcccaccgtgcaggtcacgcctcagctagagaccaagagcattggggccagygttgagttccaytgtgctgtgcccagcgaccggggtacccagctccgttggttcaaggaagggggtcagctgcctccgggtcacagcgtgcaggatggggtgctccggtgagtggggccgggggcaggactggacttgggcagcatagcccagggctcacagtgagcagagttaaagcacctgccccagggkgcgcaacatgaagcactgtccttggacacatcactttacctctctgagcctcagtgktctcagctgtacagtgggttatataagactgaatgaggtccaggcacggtggctcatgcctgtaatcccagcactttgggaggctgaggcgggcagatcacctgaggtcaggagtttgagaccagcctggccaacatggtgaaaccctgcctctactaaaaatacaaaaaattaactgggtgtggtggtgggcacctgtaatcccaactacgctggaggctgaggcaggagaatcacttgaacccaggaggcggaagttgcagtgagccaagatcgcaccattgcactccaacctgggtgacaagagcaaaactccatctcaaaaagaaaaaagactgaaaggagattgtctgaagcacttgcacagtgcttggtgcttggaaggccttcagtaaacagtggcccattcatatttattattagcggaggaaagagaacaggccctggggccagaaatacacaaatgaccccagatctcagctctgctacttgataactgtgtaatcttgagccctagaccataaggtctttgtctaaaatgagtgtggtgccccccaacctgcctgcctacctctagtggttattgggaaactagaatgcaacactgcgtgctgttctacatcagtttttaatgcccacacaattgcaaagcattcttttttttttttttttttttgagatggaatcttactctgtcacccacgctggagtgcagtggcgcaatctcggcttactgcaacctccgcctcccgggttcaagcgtttctcgtgcctcagtctcccaagtatctgggattacaggcgtgtgccaccacgcctggctaatttttgtatgtttagtagaaacagggtttcaccatgttggccaggctggtctcaagctcctgatctcaagtgatgcgcckgcctcagcctcccaaagtgctgggattacaggcgtgagccaccacgcccagcccaattgcaaagcattctatcagttgttttcaactccctgatgtcttattattttttctttatagaatccagaacttggaccagagctgccaagggacgtatatatgccaggcccatggaccttgggggaaggcccaggccagtgcccagctggttatccaaggtaggagggtggcttcaggcctctgctaagagcagggaacagagatgagaaaggcagagaggcacaaggcccagaccctgttccctaggaatccccctaaatgtgtcagaataaagagaattattccattttgccttgcttgtgtctagcatagagtaaaaggggcttgatacatatttcaagggagggaagaaggatatggatggagtgtgtgagtgctcagatgaaccgatgaagattgaatcagtgtgaaccgggcatggtggaacgcacctgtagtcccacctactcaggaggctaagctgggagcattgcttgagcgcatgaattctaggctgtggtgagccgtgatcacacctgtgaatacaaccaagaccctttgtctaaaaaaaaaaaagaagtggacacgtgagtgagtaaatgcataagacctgacaagtgagtgtgtttgtgagtgaatgcatgaaaaagtgaatgaggagtgaatgaatgctggagcttcagtgctcacctttccttgggcagtctatggcctccctcgggccaggcctgcagtgactgatctcactggacctctgcctccctcctccccagccctgccctcggtgctcatcaacatccggacctctgtgcagaccgtggtggttggccacgccgtggagttcgaatgcctggcactgggtgaccccaagcctcaggtgacatggagcaaagttggagggcacctgyggccaggcattgtgcagagcggaggtgtygtcaggatcgcccacgtagagctggctgatgcgggacagtatcgctgcactgccaccaacgcagctggcaccacacaatcccacgtcctgctgcttgtgcaaggtgaaggccagtggggacttttgttgggggacagtgagtggggcaggggcttctcctgctgccatcttctgcctgcccgctctgctcttcctttctgttcacttgggacattttccattgtgtgtgtttaaggggcaggtttcataacaggtggcagcagcaggggataaaagtgagattcccccagggcagcctggaatgtacagggagagagctaggccatagagcatcaagaagaaaaaagaaaccttgtcctcatctgcagggagtgcctgctctgctgggagagacctgcagcatagtctgagggcagagacataacccagtcaacaaacagacctaatagagagtaaaacaaggacaacagatgcagggcagacacaaacactgtgtgttctttaaaggcaattcctttttaccccaagccctgtgacttgcctccaaacttycttacctatactgcccctagtgtgcacttctcaggtccccaaagggctgcacaattttttgmccaggcrtgttgaagaggtctcaggctgtggagtgaaatggatctggccctgaaccctgactctgcccgaccaggagcaaacagccgcttttcccctctgagccataatttcctcatctgtgaaatggaatgtagtggcttccttcaaggggtggtgtgaagatgaaatgaatcagggtgcaggctgggcacatatctgtgactgtcatgttgatggcctatgtctcttccatgcctctcagccttgccccagatctcaatgccccaagaagtccgtgtgcctgctggttctgcagctgtcttcccctgcatagcctcaggctaccccactcctgacatcagctggagcaaggtaagtgctggagagggaaccagcgggcatgacttgggggctgggaacagatctgaagcgtctcagtgtccccaggatgtggcacaggcttggccaagagcaaacgctcaatgttggaaggtgggcctgaggcacagatgggaggtgggcccctggagccrtgggccarggccagggccctcagtgctagtgcatttrcagctggatggcagcctgccacytgacagccgcctggagaacaacatgctgatgctgccctcagtccraccccaggacgcaggtacctacrtctgcaccgccactaaccgccagggcaaggtcaaagcctttgcccacctgcaggtgccaggtaagacaccacccctaagaattggcagtgccctgcccactccctgactggcagggtcttcagctgtgctctctgctggcagagcgggtggtgccctacttcacgcagaccccctactccttcctaccgctgcccaccatcaaggatgcctacaggaagttcgagatcaagatcaccttccggccygactcagccgatggtgagcaggagggttaatttgcggggtgggctggcctgggttgagggacctygtggagtaactgccatcatggcaggagccctggctgcccctcagtcctgccccaatccctcagccctccctctccagaagcccccagacctctgggcctccaccctggtgtgccttctcttgtgcctcccggcttctccatccctgcctctgtgatatctccagcctcctcgtggctcctctgccaccggggcatcacccccagtcctcctgtcccagcttcctttccccatctctgctccttcctccctcctctgcctccatctcaccctttcctcctctctttctctcgtctcttacgggtctctgactttcactgtccaggcctccttctctactcgggtgagtctctgcctccctctcccccttgagggagactccagtgtgtgtgaagcaaattcagtttctttctaggggcgctcagtaaggcccttgcgtttggggcaccagccctgagatagtgagaaggccctggctgtgtgaggagtgccagagggagggacaggttccgagagtggacaggctcaagagcttgggtggtttctagggtgggggaggacagggagcctgtggctggaagggggccccttacacagtggtgcccacccagggatgctgctgtacaatgggcagaagcgagtcccagggagccccaccaacctggccaaccggcagcccgacttcatctccttcggcctcgtkgggggaaggcccgagttccggtgagacccccagcctccccacctacagggggactggacacagggctttggtctggcaagtgctaccctgggctccattatacaaaggagatctggaggaaggagaaaatgtggccgttacccttggtgaccacccaatctgctagagtaggaatagtatgccagtcaggtggaggagggtgcaacctcagacttgggactgctgcaggccaggattcattcattcattcattcattcatgcatgcatgcatcagttatttgctgaccaccccatgtgtgccaggcactgatacaggtaaaacaaaacagaccaaattctggctcttgtgggaagaggtgtattctcactggggaagaataaacaagccataaacagagaaacaaggtgatcacagggagagaggagtcctcagaggaacaaggaggccaggtgctaggctgcagggcgctgagcctggggtccctgtgggctgctctgggaaagctcccagcaaaaggatgtggggagagaagatccaggggatgggtcacggggagggacgacaagacagggacaggaacgggaacagccccagggctgggactgcaggaagtggtgacatccctcctctgggacccctctayccaactgggcccctagcccttcttacaaaccccctatccactctctcctgccccggcctgccccacggagcaggttcgatgcaggctcaggcatggccaccatccgccatcccacaccactggccctgggccatttccacaccgtgaccctgctgcgcagcctcacccagggctccctgattgtgggtgacctggccccggtcaaygggacctcccaggtgagacccaaccccatactgctamttccagccctcatcccgcccttgcccagcctctgttgccattcctgacttccccacctccccagggcaagttccagggcctggatctgaacgaggaactctacctgggtggctatcctgactatggtgccatccccaaggcggggctgagcagcggcttcataggtgagccccctccccacctccagctgaggctgggccttacctggctggctggaagagccctggagagcctgggagggcacctcagggtatgggctgggacaccctgccctgtgctcatcctgcccactcacctcccaggctgtgtccgggagctgcgcatccagggcgaggagatcgtcttccatgacctcaacctcacggcgcacggcatctcccactgccccacctgtcgggaccggccctgccaggtgaccccacaccccacayaccacctggctgccgtggcctccacccctagccatggctggcccctgtggggattatggggggtactgaatgttctcggccttacttctgggggctgctttgcagaatggcggtcagtgccatgactctgagagcagcagctacgtgtgcgtctgcccagctggcttcaccgggagccgctgtgagcactcgcaggccctgcactgccatccaggtacgcaccccgacygccagtcgctgtcgccccagggcctgcctcttccctttgctgcctccccatatccaccaccatctcaaccactggggcacttccacaccccccactctcacctgagcactctccactcctcccatgtacccatcccccatctctgctacccgaaggccctcaccccatcactgctgcttcccctcctccagccctgctgaccaaattcttaccactaccccgccacccaggcactcccccacccccagcccatcttttttttttttttttttttttgagacgaagtttcgctcttgttgcccaggctggagtgcagtggcacgatctcagctcactgcaacttccacctcccgggttcaagcgattctcctgcctcagcctcctgagtagctgggaatacaagtgtctgccaccacccctggctaaattttttgcatttttagtagaggcggggtttcactacgttggccatggctggtcttgaactcctgacctcaggtgatccacccacctcggcctcccaaagtgctgggattacaggcatgagcccccacgcccggcccccagtcccatcttattacccaggtgcccaccccattacccgccaccaggtgctccccctccaacactgtccagtctctgaagaacctgcagacacacagagtccctcgactgcttcccctgcagtcctccctgtggcctcttctggctcccgccttgctctgctcagttccctcctccaaggcctcccaggaggctggcctggccctcactagcccagccccccggggtgtgatgggcagacctctggcatcaggacccccctccctccagagtcacctccgtgtcttttcactggcctatgtgccccccagaggcctgtgggccsgaygccacctgtgtgaaccggcctgacggtcgaggctacacctgccgctgccacctgggccgctcggggttgcggtgtgaggaaggtgaggggagccaggcctgagacccccagggtcctagtgtcagctggggaggctgggtggggcactctgaggccatgatgggccctacggatgataaaacgattcccaagccagaggmtctcgaagtcacctggccacatgtctgcccagcctgagccccttattgagtgagggcccccaaagaggacccctgtcatattggagctcctcccagccccgtgtgcaagggcaggggggctcctgtgccactgcagctggtgccaactggtcctgagcctctgggcctggagagtgaggcaggcaagggtcccagaggaaggcagartagctggaccccacccgagggtccaggatccccactgcctcagctgagctgtggctgctgcaggtgtgacagtgaccaccccctcgctgtcgggtgctggctcctacctggcactgcccgccctcaccaacacacaccacgagctacgcctggacgtggagttcaagccactcgcccctgacggggtcctgctgttcagcggggggaagagcgggcctgtggaggacttcgtgtccctggcgatggtgggyggccacctggagttccgctatgagttggggtcaggtaagcacccagcaccaaatgcrgggctctgcacrccaagccttgtgcccccctcggctcttcaagccccagggaggcatgggaggataaatgcagggatcagggcaagtcccctcttcctgtgcatttcgtctctgtgtcacttgaggccartccctagccctctctgagccatgggctcctcatctggaatacagaaggctgtagggcattccccatctgctcagggccctgtttgtggtggagagggcagggagccccgtgtgcccccatgtgcccaaccctgcctggcatcctccccagggctggccgttctgcggagcgccgagccgctggccctgggccgctggcaccgtgtgtctgcagagcgtctcaacaaggacggcagcctgcgggtgaatggtggacgccctgtgctgcgctcctcgcccggcaagagccagggcctcaacctgcacaccctgctctacctggggggtgtggagccttccgtgccactgtccccggccaccaacatgagcgctcacttccgcggctgtgtgggcgaggtaagagcagcctcctcgggacaagcgggaggggaggggtgccaagccttgtgtccccctcggctctccaagcaccttggcattgggcccctccacctgcagccacccacgggccctgggccaggacactgtacctctgagcctcagtttcctcctctgtaaaatgggcatgatcacacctactttgaaaggttgggcagaggattgtctgcactgacggatgaatgtttctagcacacagtaggcactcaactcctgcgcctccctccccacaccgagaatccatgctaccactcagggcccaatgtgggctcccagctcccctctgctgcattcttctycctgctggtacacctgggtctctgcctcccaggcccctttagtccctcggtgtccctgtccccacaggtgtcagtgaatggcaaacggctggacctcacctacagtttcctaggcagccagggcatcgggcaatgctatgayagctccccatgtgagcgccagccttgccaacatggtgccacgtgcatgcccgctggcgagtatgagttccagtgcctgtgtcgagatggattcaaaggtgggaaagcctgcccagggcaccggaggggaggggcacaggtggtcagcgacacctccagcccatgcccacccacccactcgcctctgccctggcccacaggagacctgtgtgagcacgaggagaacccctgccagctccgtgaaccctgtctgcatgggggcacctgccagggcacccgctgcctctgcctccctggcttctctggcccacgctgccaacaaggtacccaggcctggcttctctccacttcatytctgtcttggggccccggagctcgacatagtacccacgggtgtctatgcccaccaactggaccctgcccttctccataggctctggacatggcatagcagagtccgactggcatcttgaaggcagcgggggcaatggtgagtacttgccatggcctcctccccagcttcagctcagctcactcttccagttaccccacaccctcaattctggcctgcaagcaaaacagctttatatgaggagcttgctgggcagagagacagaatgaagaccacagccatgtggagctagggcctgccccacacttactggctgggtgaccttgggcaggcctttgaaaccactctgacctcagtttcctcctctgtattcatgtattcagtcaacaaactattgttgcccatccttgccctgagagcagtaaatataagatgcataaagcaagaccctcattcccaagaattccaccgtctactgaaaagctaaggaaacagtgaagagtgaatgctgattgaatgtttacggacactgtgctaacccctttacagacacatctcttcttatgtatcactaatataataggcgaggcagtggtatagtgggtaagagtatagacttggagccagcctgcttgggttcaaatcctagctctcccacttactagctgtggaactttgggtgagtcgcttaacctctctgtgcctcatataaaatggagatgagtaacatctttccctaaagatttggataaaattttatgtgagagtaaaattacttagtgcatttttttttaaggtggagtcttgctctttcacccaggctggagtgcagtggcacaatctcggctcactgcaacccccgcctcccagactcaagcgattctgctgcctcagcttcctgagtagctgggattacaggtgcctgccaccacaccccgctaatttttgtattttttgtagggatggggtttcaccatgttggccaggcctgtctctaactcctgacctcaggtgatccgccccccttggcttcctaaagtgctggattacaggcgtaagccaccgtcctaaagtgctggattacaggcataagccaccgcgcccggccacttagtgcattttaaatgcctagaacaatgtgtggtacagagtcagtacagaatgttagctgttgttaatattatgttcagctggccgggcacactggctcacgcctgtaatcccagcactttaggaagctgaagcgggcagatcacctgaggttgggaatttgagaccagcctgaccaacatggagaaaccccatctctactaaaaatacaaaattagctgggcgtggtggcacatgcctataatcccagctactccggaggctgaggcaggagaatcgcttgaacctgggaggtggaggttgccatgagccaagattgcatgcaccattgcactccagcctgggcaacaagagcgaaactccctctcaaaaaaaaatactatattcagctgggtatggtgactcacgcctataatcccagcactttgggaggctgtggcgggcagattgcttgagcccaggagttccagaccagcctgggcaacaaggcgaaatcctgtctctacaaaaaaatacaaaaagtagctgggcatggtggtgctcatctatggtcccagctactcaggagacaggcaggaggattgcttgagcccaggagttcaagatcaacctgggcaacacagggagacctcatctctacaagaaatttaagaattagctgggtgtggtggcacatggctatggtcccagctgaggcagaaggatcacttgagcccaggaggtcgaggctgtagtgagctacaattgtgtcactgcactctagcctgggcaacagactgagaccctgtctcaaaaaaataaaaaataaggctgggtgcggtggctcacacctgtcatcccagcactttgggaggacaaggtgggtggatcacctgagatcagttcgagaccagcctggccaacatggcgaaaccccatctctactaaaaatacaaaaattagccaggtgtggtggtgcacacctgtagtcccagctactcgggaggccaaggcaggagaattgcttgaacctgggaggtgggggttgtagtgaaccaagattgtgccactgcactccagcctgggccacggagcgagactccatctcaaaaataaataaataaaataaaaattatctatatataatattcattcatagggttgttgtaaggattgagttaaatgcagtggtgtctgtagctggatgggacgctccccgcacagccacatcataggtgttaggtaaatgtcagccgttctcctcatcatttggtggagggtagcagagggtcccctactcttgtcccctgccagagctactgtggccagtgccggcctgtgggatgggtcatgagcagatagggctgggggggtgtggagccacacacagtatggacatcctgggccagtcactcgcccaagcctgcctgctcttctgtaagatggagagaacaccaaggctctgaaccatttattgccacagtccaaggtgaccaacggtcccagtagctccggactgaggggtttcttgggatgtgggactttcagggctaaagccagacagaatttggcaagtagaatggcgggtcacccgacacggatcctgttgactacacaaaataaaataaaataaaatacattgatttaaggaaagcaattatgctgaagtaaagtaatcaaaacatgttttaagtttcctgacttgctatatatgtgcttctttattaacacatcaaataacaagatctggtgatctcagtagctaccacaatttcaaagcagcaatatgtgtaaatgatattttgaaatatttgcagctactgtcatgtgataagcaaatactagtaacaaagttgcaggtcctaccactgctactttggtttcttgcctacatctcattgaaagaactgctcaatttcagtgagaagtgagtgaaattgaggtgtaatgctttcccatccaaggtcataggctccctgaattctgttggcagcccccgtgggtccccagggactgcaggctcggagccccctagtcctgcatgttggcgtggaggtgggggtcaggggaactgacgggggattttgatgcctgatgcagcaggtatggcaccaccctcctctctcccacagatgcccctgggcagtacggagcctatttccacgatgatggcttcctcgccttccctggccatgtcttctccaggaggtgagactggcattggaagggcccatgggcctaatggggaggatgggaatctgggacttctgtcccctcacccgctcttcctccgcagcctgcccgaggtgcccgagaccatcgagctggaggttcggaccagcacagccagtggcctcctgctctggcagggtgtggtgagtgtgggtatccggctgggctcttggggctcctggggcaggaagctggcttcctggtggccggagtggtggggggaggggaaagcagagccccctggcctcggcagcctctgctctccaggctggggaccccagagaccctgtgcttccctggcaggaggtgggagaggccggccaaggcaaggacttcatcagcctcgggcttcaagacgggcaccttgtcttcaggtaggtcctggcacctggcccttcctctcccttccctggtcccagcaccccaccccccggtcctgccccagctcatacttcttgggcctggatgactgcaggtaccagctgggtagtggggaggcccgcctggtctctgaggaccccatcaatgacggcgagtggcaccgggtgacagcactgcggtaagggaccctgccgggcactcgggatggggcccagcgttctggagtggggcaggacgccccctaccatgggcagagaggcaggtattgagctctgtggagacagaacttgaagccaggggaggggagaacccaccagccagggctcrggcttccatctcggactgaactccgctgggggcaggcgagtgccccaggagtgggaggaaacctgggtgcagaaatgaggaagctgtgtttgtggggcccgatctctcgttcagcgggggaaagaaagagcttgggaaacagggacagacttctgagtctggagtctcgatatcagagggaggggactctgtcgtggggccggggagraccaggaagtttgtggaaaggggcctgacccagttccactgcagggagggccgcagaggttccatccaagtcgacggtgaggagctggtcagcggcmggtscccaggtcccaacgtggcagtcaacgccaagggcarcrtctacatcggtaagtctggggctccttctcagggcaggggcaggaacggcactcccttagggctagagctcgcccagccttcctcgcctcctgggctgctggagcccacaggccctgtcctctcacctcccggcaggcggagcccctgacgtggccacgctgaccgggggcagattctcctcrggcatcacaggctgtgtcaagaacctggtgctgcactyggcccgacccggcgccccgcccccacagccyctggacctgcagcaccgcgcccaggccggggccaacacacgcccctgcccctcgtaggcacctgcctgccccacacggactcccgggccacgccccagcccgacaatgtcgagtatattattattaatattattatgaatttttgtaagaaaccgaggcgatgccacgctttgctgctmccgccctgggctggactggaggtgggcatgccaccctcacacacacagctgggcaaagccacaaggctggccagcaaggcaggttggatgggagtgggcacctcagaaagtcaccaggacttggggtcaggaacagtggctgggtgggcccagaastgcccccactgtccccctacccaccgatggagcccccagatagagctgggtggcctgtttctgcagcccttgggcagttctcactcctaggagagccaacctcggcttgtgggctggtgccccacagctacctgagacgggcatcgcaggagtctctgccacccactcaggattgggaattgtctttagtgccggctgtggagcaaaaggcagctcacccctgggcaggcggtccccatccccaccagctcgtttttcagcacccccacccacctccacccagcccctggcacctcctctggcagactccccctcctaccacgtcctcctggcctgcattcccacccsctcctgccagcacacagcctggggtccctccctcaggggctgtaagggaaggcccaccccaactcttaccaggagctgctacaggcagagcccagcactgatagggccccgcccaccgggccccgcccaccccaggccacatccccacccatctggaagtgaaggcccagggactcctccaacagamaacggacggacggatgccgctggtgctcaggaagagctagtgccttaggtgggggaaggcaggactcacgactgagagagasaggagggggatatgaccaccctgccccatctgcaggagcctgaagrtccagctcaagtgccatcctgccagtggcccccagactgtggggttgggaygcctggcctctgtgtcctagaagggaccctcctgtggtctttgtcttgatttttcttaataaacggtgctatccccgccaggggcctcctgagtctttgatgagggcttcactcagtggagcctgtggatggggcagagcagggcaggtgagatctgggggtgaagcaagctggcttgggatcagcgaggcccccaggcccccaaccctgtgaggcaggaattgtcctattttctagaggggcagctgagtctcagagggttagggggcctgtccaacatcagacagagagccagggggttagaacccaaagagtctgaccccagagcctagtatcattcccatgtgcccgaagcccctctagggatggcctccctgatcctataaggctgggccactcaactgcagccccctggggagacctggctgggacatgggtagcacgtggtacaggctgtgctgcagtggaggcagaggccacgggcaccaggttgccaggccagccagctgggagagcaacagcaccagaggaggcccaggaggaggccagcagaggccaggagcatcgaggaggccagcgccacccctcagagctgggggcctgtgggaagagaaagtccactcaggcctcggcctgggtcctctgccccgtcyccatcacctagagagggacaggtatgattttggtgggaagagtaggagcaaggtgtaaccttccaaagctgcgtcttgtctcgtggggtccctgcctgctggggaactcctctcagctgcaatccagagggatcctgcagacccgagagctggggagggagtcagggatctggaggtatgggcatctgtacttcctgtctggctgggcaccggagagggacctgcatgggaaagaacagaactagcacactgagaactgccctttctgggacacttgtgtgtttcattcaatcctcacaagacttccctgagtttgtcactctgtgtttccattttacagagaggttgtcacttgccgagttcaattagctggaagtgataggaggacttgaactcacatggtctggctccagggcctaaggtctatgagtggagctacttcccaaggaagagggtgtacatgtactgagcattgaggcagggtctcactctgtcgcccaggctggagtccagtggcgcaatcaccactcactgcaacttctgcctcccaggctcaagtgatcctcctacctcagcctcccgagtagctgggactaccagcacgtgccaccatgcctggctaatttttctattttttgtagagacgggatctcactatgttgcccaagctggtctcgactcctgagctcaagcaatccacctgcctcagcctcccaaaatgctgggattccaggcgtgagccaccatgcccggccatgagcattttctgtgcatcaagcaccacactctgtgctgggcccgttacctatgtatgccactcacagtttacaacaactctgaagggtgaggtttatccccatttcacagataaggaaactgaggcatagaggttccttcttccattcatttgactagtatttcttgagcatctcctatgcccccaggcatggctctagcaactgggggatacaaccatgagcacatgacaaatatgtcttcatggcactgggagtttagtgtggggagaaacaaaacacatgaatagaatttatgtctaaaggagatagatgctagtgagaaaaattaygcatgttggtgggggcagggctgccgcttttcttttcttttctttttttttttttttttttgagacggagtctcgctctgtcgcccaggctggagtgcagtggcaggatctcggctcactgcaagctccgccttccgggttcacgccattctcctgcctcagcctcccgagtagccgggactacaggtgcccgccactgcgcccagctaattttttgtatttttagtagagacggggtttcactgtggtctcgatctcctgacctcgtgatcctcccgcctctgcctcccaaagtgctgggattacaggcgtgagccaccgcgcccagcgggctgccgcttttcttactgtggcaaagcacataacgtttaccatttaaccatggttaggggtacagttcagtggcattaaatatattctgatagagtttggatctgtgttcccacccaaatctcaggtcaaattgtaattcccagtgttggaggtggggcctggtaggaagtgattagatcatgggggtggatttctcatgaatagtttagcaccatccgtttggtgctgttctcaagatagtgagttctctcaagatctggttgtttaaaagtgtgcagtgcctccccactcactctctcttgctcctactctggctgtgcctgctcccctcgccttctgccaagattgtaagtttcttgaggcatcccctgaagctgagcagatgccagcatcatgcttcctgtatagcctgcagaactgtgagataattaaacctcttttctttataaagtacccagtctcaggtgtttttttatagcaatgcgagaatggactaatacgcactcacattgtgcagccatcaccgccatccatctccagaactttgtatctgcccaaacggaaactccatcaactccgtcaattccattaactccatatcctccttgtccccacccccccagcccctagtgaccatggctctacttcctgtctctgtgattttgactattctaatatacatatgtatatgcttataaagaaaatttataattttcttataaatttataaagaaaggtaatttataaatttataaatttataaaggtaatttataaagaaaagaggtttaattgtctcagttctgcaggctgtacaggaagcatatctaatatacatattagaatataataataagttactaataataactttttttttgagacagtttcgctcttgttgctcaagctggagtgcaaccgtgcgatctcggctcaccgcaacctatgcctcccgggttcaagtgattctcctgccttagcctcccaagtagctgggactacaggcatatgccaccacgcccagctaattttgtatttttagtacagatggggtttctccatgttggtcaggttggtctcgaactcccgactacaggtgatccgcccacctcggcctcccaaagtgctgggattacaggcgtgagccaccgcacctggccagggttgctatttttatataaaggagtcagggaagaacttaaagagacccaccaggaagcaaaggaacgagcttgcaatgcagatctcagaagaaaagtcttctggtagaggacacagctactgcaaaggccagaacaaagctggagtgtggaggggaggcggggccagggagggggtggggcagggaggaggcggggccagggaggggtggggcggggggcggggccaggaaggaagaggcgaggccaggaaagaaggggcagggccagatcgtgcagggcctttgagcccgggcgaggctttgcctttgctgaatgtgatgagggttttgagcaggatagtgacataacctgatttactgttttaaaaggtacctctggcggggaagcataactccccactcaagtgggctatacatagtgacttcccaagaatacagtggggaaagatgggaccaaaagtaacggtggagaaatgaggcagacatcagccaggcggtcaaggtcagcgtcaaccaccgtccaacaccaaacacccaacaccaaagtcatgtttggtgtgatgtgatgtgatgaagatggcatttcacctctgtgaactgtaactctagtcttttcatgagaaaagtatcaaataaatcccaatagtggggcatcctacaaaatccctgagcagtactcacaactgtcaagatcattaaaaacaaggaaatcctgagaaactgccacagccaaggggagcctaaagaggcatgatgactattaatgaatgtaacatgaggccgggtgcggaggctcacgcctgtaatcccagcactttgggaggccaaggcgggtggatcacttgaggtcaggagtttgagaccagcctgtccaacatggagaaatcccgtctctactaaaaatacaaaaattagctgagcgtggtggtgtgcacctgtaatcccagcactttgggaggccaaggcgggtggatcacttgaggtcaggagtttgagaccagcctgtccaacatggagaaatcccgtctctactaaaaatacaaaaattagctgagcgtggtggtgtgcacctgtaatcccagctacaccggaggctgaggcaggagaatcgcttgaaccagggaggcagaggttgcagtgagccgagatcacgccactgcagtctgtctagcctaggcgacagagcaagactctatctgaaaaaaagtaataaaataaataaataaataaatgtaacatgagatgctgagtgggatcccgggacagaaaaaggacatgaggtaaaaactagggaaaactgaacaaactgtggactttagttaataatattacttcattaattaaaacaaatgtctcatactaatgtaaaatgtcagtaatagcacccaaactgagtgctgggtatatgagaattttctgtactatcttctcaatttttttgtaaatctaaaactgccctaaaaaatgaagttcatgcaatcccagcactttgggaggccaaggtgggaagatcttgagtccaggagttcgagactagcccttgcaatacagtgagacctcatctctacagaaaacacaaaaattagctgggcatggtggtgcatgtgtggtcccagctactctgggggctgaggtgggaggatcacctgagcccaggaagcagaggttgcagtgagccgagatggcgccactgcactccagcctggataacagaatgagaacctatctcaaaacaataaataagtaagttcatttgaaaaaaagaaaaagaaaaagaaggctcccccaggcttccttcttcctgtgttgtcagaggcaaaggacagaaggagggagaccagttcagaagttattagaacaacccagacgagagctggtggtggctcagaccaggtgatggcagagcaggtgtgagaagggtcagagtctggagagctttcaaaggacttgtcactggcttggttatgggttataggctatgggttaagcggggagtaaaagatgactcagtgaggcctgggcagctggaatgtgaagtcgctgctcagcgagagggaagcaggatgcagggagggctgtggacaaggagtccagtatggggcaagttaagtttgagatttcgcctatacatccacgcagagatgctgagcagggaggaggttatgtggctgaagttcaaagacaagtcccacaggtgatacgatataaatgagacccacaagggaatgagcctggatggaggacaaggggacataggacctgggtctcatggcacaaagcatacagcatcagggaaatgaccaggaacctgcaaaaaaggctgagcgggggatggggaaggtaagtgtgtggggttctgggaaactgcatttcacccctgttcaactgtacatggcagccctacctccatcccactcctaattgggtgtggtgggcaggtgggacatctttagatccccaggaaggttattcctgggtgatttgttctggtcccttccaccaaccctagccctcctatcccactcccctgtctacagagatcattcctgctcattttactcactggctttatgaccttgggcaagtcacttctctctaggcctcagtttcctgatctgtaaagtgtgggaatcagactggattgatggttttcaaagtatgtcttgagggtgacactcagggccctcagagagacatcaggcagccagggccccaggcccaccatccagttaagcagaggatatctcctttgaatgtcttgggcctccatgccaggtcccatttagcaaaagtttccaccactaaagcatcatttggaatccgccggatgagatcatctgcagca

SEQ ID NO: 5641 - DNA, 112486 bp, Homo sapiens
  misc_feature (1)...(112486): n = A,T,C or G, or insertion/deletion polymorphism (see Tables 1-2)
atcacgctactataaagacacatgcacatgtatgtttattgtggcactattcacaatagcaaagaattggaaccaacccaaatgtccatcaatgatagactagattaagaaaatgtggcacatatacaccatggaatactatgcagccataaaaaggatgagttcatgtcctttgtagtgacatggatgaagcaggaaaccatcattctgagcaaactatcgcgaagacagaaaatcaaacagcgcatgttctcactcataggtgaattgaacaatgagaacacttggacacagggtggggaacatcacacactggggcctgtcgtcaggtggcgggatgggggaaggatagcattaggagaaatacctaatgtaaatgactagttaaagagggcagcaaaccaacagggcacatgcatacatatgtgacaaacctgcacgttatgcacatgtaccatagaacttaaagtataattttaaaaaaatgtaagagaaaagaataccaaagttaattgcaaggatccttaataagaactacttacattggaagcaaaccacagagaattgtaaggagtcatgtgacagagaggaccaggatgccatgaaaatggacttggctaaaaataggtcatttaacccttggctgactggcatctctctagattttcagttatacaatgttcaatctgctgtgcaaggtaattccatcttgcaaaggatttgatgttacattctaccacacatacaactgaattaaacttttacggaattggaaatgcaaataattgatcaaaataaatcaaacaagaaaagaataggaaggaataaccagtgatggaatatcaaatatgaatggaaaacagaataggactgctaaaaagaaaaaaagcttcagaagcacataatagccgtgttatttagaatcatagtggtgtgcaaatgacttctatcacatctcattcaataccagagcaaaagatgttaagtttattatgtaatgcccaccaaatagctagcttttgaaaaaaacttgtttctcaatttgagctaaccatttcaggctactgcatcaaaccaaagttattggcatcatgctaagctagatgtgttgactgaagtatgagattcacacttttgtaaatgaaaagcaatttgattaggcaatgttttcctaagtgaaagcaagttattagagaagtaaagaaacaaaagaatggctactccatatagcggagtttttgtttttttttttaagtgtaggcaaatgtttagtgaagatgatatttcaataagaaaattggtgcttgggacgtgcttccactaaatttgagatatcttagacaaaacaaagtcttattttcaagacattatttttatcagactgaagtcttggaactatttgatctagttactctatgttctcaactgtgttaactaattgaaaacaacattgttattaaaggtattcacaagaaaaattcagagttactgttgcatatcctttctctgtttcaaactgttttctcctaagcacccaaggctctgtgatgtctgaaacagttaatcattaattttaaaagataagcttatcgtggaattagaaaaaaaaactattttaaaattcatatggatccaataagagctcatatagcaaagagaatactaagcaaaaagaacaaagctggaggcagcacactaccccacttaaaagtatactgtgaggctacagtaaacaaaacagcatgatactggtacaaaaacaggcacatagaccaatggaacagaatagagaattcacaaaaaaagtccgcacatctacaaccatttgatcttcaacaaacctgacaaaaacaagcaacggggaaaggattccctatttaataaatggtgatgggagaactggctagccatatgcagaaaattgaaactagaccccttccttacaccttacacaaaaattaactcaagatagattaaagacttaaatgtaaaacacaaaattataaaaaccctgaaagaaaatctaggcaataccattcaggacacaggcatgggcaaagattttatgatgaaatcgccaaaagcatctgccacaaaagcaaaaattggcatatgggatctaattaaacaaaagagcatctgcacagaaaaagaaactatcagagtgaacagacaccctacagaatgggagaaaatttttgcaatctatctatcttacaaaggtctaatattcagaatctataaagaacttaagcaaatttacatgaaaaaaacttcattaaaaagtgaacaaaggacatgaagagacatttcacaaaataagacgtacatgtggccaaaaaaacatgaaaaaaagctcaacatcactgattacagaaatgcaaatcaaaaccacaaatgagataccatctaatgccagtcagaatggcaattatttaaaactacataaacaccagatgctggcgaggttgtggagaaataggaaggcttttacactgttgctggaaatgtaaattggttgaaccattgtggaagacagtttggtgattcctcaaagatttagaaccagaaataccatttgacccagcaatcccattacagggtatacatccaaaggaaaataaatcactctattataaagatacatgcatgtgtatgcttattgcagcactatccacaatagcaaagacatggaatcagcccaaatgcccatcaatgatgtactgcattaagaaaatatggtacatatacaccatggaatattatgcagccacaaaaaggaatgagattcagtcttttgcagggatatggatgaagctggaagccatcctcagcaaactaacacaggaacagaaagccaaacaccacatgttctcacttataattgggagatgagcaatgagaacacatggacacaaggagaggaacatcacacactggtgcctgctgggggagggcagtggtgggaggagtattaggaaaaaatagctaatgcatgccagggttaatacataggtgatggtttgataggtgcagcaaaccaccatggcacacatttacctatgtaacaaacctgcgcatcctgcacacataacctggaacttaaaattaaattaaattaaaagacaagctaaaagggttaacgaaaaataattagataaaaaaattttgattttcaaaatcctgaaacaagagttttaaatttgcttttaatatatattcaaatcctttaatactgttcccttccagagatgctgcttaatttcctctcttgagtgtggcttggacttaatgatgcatttctgatatggtctggctctgagttcccaccaaattctcatcttgaattgtcatgcaaattgtaatccctatgtatcgggggagggacctcctgggaggtgattggatcacgggtatggtacccccatgctgctcttatgatgctgagggaattctcatgagatctgatggttttatgaggtatttttccccacttcgatctgcaattctctctcctgccaccatgtgaagaaggacgtgtttgcctccacttctgccatgattgtaagtttcatggggcagccttctcagcaatgcagaactatgagtcaattaaacctctttcctttataaattacccagtctcaggtatttctttatagcaatgtgagaacggactaatacaacttctaactggtaatgctgacataagagtttgtgactctgggtgtagaacataaaactcactgcagcctcccccttctctctcaatgtctctggaatcatgagctctgggggaagccacctgctgtgccataagcagccctgaaggaaggtccatgtggctgagaactggggccttctgggaacagaaaacaaggaactagggcttttccaacagccatgtgacccatccatgtttcatgtgaatcctcagtcccagtgaagcactcagatgatgcaggcctaggctgacaactggactgcaaccttgtgagaggccctgagcaagaagcactcagggaaacctctcctggattcctgaccattggaacctgcgggagatgatgaatatttgccattttgagctgctaagttttacataatttgttatgcaatagtaaataactaacacattttcacaaaagaggatgtagtattacacattaatttgcatttgctctaaatttatcattattattaatattattgttattgagacagggtctcgctctgtcgcccaggctggagtgcagtggcatgatcaccatgcactgcagtgtcgacttcctgggctcaagggaccctcttatctcagcgtcctgagtaactgggactacaggcatgaagcaccacgcctggctaattttctaaatttttttgtagagatgggggtttctccatgttgcccaggctgatcttcaacatctggagtcaacaaatctgccttcctctgccttccacggtgctagaatcacaggygtgagccaccacacctggcctaaattaattataagacattacacatgtaacttagttttaaaaggtaaggagaatgtccatggctgaagaggatgcattttattaccattcacaatgatcactttacttgaacttcaatttccaactgtgtccaaattaaacacaaaaggaagatccaacccttgctgggctgattctttgatggcccccaacagccacctcccggtcattcactttcccccagttattcaagcaactctagtgtagatgctgctgtgaagggatttagcagatataactaagggcctcaattagttgactttaggctgggtttatcctgctttgactgtcctaatwaggtgagtccttgaaaggtctgtgttctttctgagcatagagatttgcagtgtgagagggattcagcatgaggggtttcctctaccgtgggctttgaaaatgaagaggctgtgtaggaaagaacactgttaggcaccaggaattgagcacagccctgcctattctctgtattgacagccagcaaggaacagaaacctcagtcttacaactgccagaaactgcattctgccacctctgtataagcctgaaggaggattcaaaatgaaaacacagcttttggaagcccagaacagggattctatccacatcttgcccagatttctgaccaaggaagtataagcagataaatgggtgttgttttgccagtcgtggtagtgcacgaatgaattgatgaattgatatgcacactaattacataaaataaaatatttcttaactttttcagtattttacattttataattttctgtgatgcaatttaatagactcatatttcattcattcagtcaagaaaaattaatttaatccctacaatgaaccaggtgtgccctcatatgcttacgtgcctgacattccagaagcttcacaagaccaaggtggagccagtggaatgttttaggtggagaaatgacacactctgactcacaggagcaggaccactgtgcagagaacagtcacgtagcaggtaatgggacagtgctagtgtcacaaataaggagtgacaaggtggtggggactaaggggagaggagggcctgagggatgagaggaatggagggaagggctggagatgcaggaggtgaggaaatggagcagagggaaagaattcgaaagcagcagaactcaggtttaaacacattgttttatatattttaatacatcaatctacagagccttgcagggtgatctttgcagttggcctttaataccttatgtgggtctgcctaaaaactaatttttttatgttaatcaggtttaaaaaatactaagtgttcatataaaatatacacaacacttagaagtggatacttcctaaaaacaggcagtgcatgagcactggtgaggggcattgtgactgcattgagtgcttgccactgtgagatgaataaagtccgtactggctcctggttacaacatatagtaacacagtggctaccttgtattaggagatgtcctggactcacacagaaactcagggctatggaatgaaggtaaatttaaaatactacaagcgggagtcacagatacattgtctggraaagtgaaacttaggagctttgtgattcctgttgtaatgcttttagacacatttatatgtcaagggaccaaagtcacatttttggccvattagattcctgatcatyaggagttaccaagattctgctacccactgtagttaataaacaaaaagcaaactggtctctattctatctcatgcactcaggcacaacttttccagatttaaaaaacaaacaaacaayaacaacaaaaaaccctgtctctacacctccattcccagggcaagctcactctctggcaacaagctccctggvgtgatttttcttctagaagagtccacggggacaggtaaggagtaggaggcagggagtccagttctgggacggggattccgtgatgcaaagtgaagagagaggvacggggcccattycgagggtttctccctggtttctcagacagctcctgggccaagactcggaaackttgagacagagcgcttggcacagaagtagcggggtcagggcgaagtcccagggcctcaggcmtggctctcaggatctcaggccccaaaggcggtgtatggattggggaggcccagcgctgggsattccccatctyygcagggtttctcttctccctctcccaacctgtgtcgggtccttcttcctggmtactcaccmggctgccccagttctcactcccattgagtgtcgggttyctagagaagccaatcaatgtagccgcggtcccggttctaaagttcccacgcacccaccgggactccgattctycccagtcgccgaggatggtgtcatggcgccccgaaccctgcttctgctgctctcgggggccctggtcctgacccagacctgggcaggtgagtgcggggtcgggagggaaacggcstctgtggggagtagctagggkcctgcccggcgggggckcaggaacccggttgcggtgccgggaggagggtcgggagvgtctcagccccctccttgctcccaggcttccactccttgaggtatttccacaccaccatgtcccggcccggccgcgcggatccccgcttcctctccgtgggcgacgtggacgacacgcagtgcgtgcgsctcgacagcgacgccacgagtcccaggatggagcmggaggggccggaatattgggaagaggagacagggaccgccaaggccaaagcacagttttaccgagtgaacctgcggaccctgagcggcyactacaaccagagtgaggcctgtgagtgacaccggccgggggcgcagvtcactacccstcyacatcccccacgraccgcccgggtctccccgagtctctgggtccgagatccacgccgaggcagcggvacctggagacccttbacccgggagaggcccaggagccgttacccggtttcattttcagccaaaatccccgcaggttggtcctggcgdgggcggggctcggtgggcggggctggccgcgggggcggggccagggtctcacacccatctagaggatgtctgtctgcgacgtggggtcggacgggcgcctactccgcgggtatcaccagcttgcttacgatggcaaggatthcatcgtcctgaacgaggacctgtgctccttgacagccgcagacacggcggctcagatcacccagctcaagtgggaggcggcccggggggcggaggttcatcctcacagggataggcacctattagatgtggtgtggttttcctctctactcttagaccctcagccagtatcactattggcattcctgagccactggctcagaatttcagtacattatctgcccgcgggacacacctcagaggkaaggggatgaagcgtggkccatgaccatggmaycccctggtcttatcaccacctgcacctcccaggggctgccagccacacagagtcatggacaggtctctacagacacaacttagtgccagcttggatgaaaccctctgaggaatggstgccatctttcaggatgtggtgcatgtattgaatcaaagatgtctctatagtgctgtgtttacagaaggaagaatacgtgggtccaaaaaccaagaagtagaagcaggtgtggctccatatctaaacccttatattcaccttcagggtgattttgcacttctcatctccaatatctgggctctgtaggggaggaggtcctggtttcccaaagggggcaccctggcaaggagacatttaaatgagagtccatggaaytayacyttatggctgcccccagggatgtttgaatagtatgtgtccagayacaagmaggtgagaagaggaggaggcagggctgctatcacacaaggagggcaggagatgtgtgtgtggaaataagagatccacttggagaccttatggttccccttgtcctgttgtaagtgtgagcagaatcatccagcaacccagcctgagagggtttcatattcaagagcccagaaccctcaggaaggaaggattgagygatactcayaggtaatgtcccaaggctgtgctcctgtgctctgacatcctcagcaggattggtgcaaagccctgcttcccatgggctgttcccagccagtgactggtcacagcaggcdttaaggcaagccattcctgggagacacgggactcctctgatggcyaactgtagctggaagdctcctccacggccttgctcaactctccttagattgcctgtgctctaggatgcgtcdaacaaactttctctccttctgtccagcacttggggtcacacttgcatcgtggtctgccgccttttccagggatttctggctcacttcccatattcccttacgggtgtgtcccctyataagatgtcgcagactttaagctcatcttggcatctgctccttgaaggacttggactaaaaattatttccatctgcatatcaataactcttattccaacctgtaaaatccttctctttatccaacttctgccacccccacagaatctattttacttgtgtgtgtagtatctctttgagttaacagatatttgttctattaagctactaaattttgaggtagtttgtgacacagcactwgataactattaaggctttcttaagtttccattattccatggatattatctacatatcttttaatcccttgcattttaataacattagctatacttgctgtttccaactctttcctcctatttttgaacattttaaattttgtctttctctgtccttccttccttctttcctcctttcctccctcagagctttctccctccctccatttttttcataaactccaagtgtttaggccaaaaggaagcattatttgaactttatgctaaaagtataatgccgtaatttataatataaaagtaaagaaaaggaagttgttaatggaatatgaaaaaatgcctagggtgattctatagccaagacagtaccttttaacatttaatttctgcctccaactgaatgttttcagaacacatgagcaacacaagctctttcccattcttggtacaagcacttgagaaatcaaattagccttatctagtatgattaatgtccatacatcatataatcccaccatctgcctcctgatcataccccctggggacattcttggctatgtgtccaggagacatgtacaccaatgtttatggcaaaaactrgaaacaatcacatatacatcaatgggaattaacaaaattgtcgtataataataaaaagtaaaacttcagcagcaacagtgaatgaacagcaccctcccacatcagagataactctcctacacataacatgcatcagcatcacagaagaatgcacattgtgtgagttctctgtacggggaagtttaaaaaagcaggtcaaactgtgatttggatatatatatacttattgtaaaaatctttagagacaatgaaaaggaatagtaaatacaagactcaagatagaagttccttttggggaatagaattggacaacagccgagggtggcttcataggttttgttttttatgccaggaggggatgtccaggtagttaagttacttgatcataaatctttatttatttatttatttatttattttcgagatggagtctccctcttgttgcccaggctggagtgcagtggcgtgatctcagttcactgcaacctccgcctcccaggttcaagcaattctcctacctcagcctcctgagtagctggaattataggcatccaccacgacacccaggtaatttttgtatttttagtagagacrgggtttcaccatattgtccaggttggtctcaaactcctgacctcaggtgatccrccaacttcggccttccaaagtgctgggattacagacatgagccaccattccyggcccacaaatctttaaagtgtcatttttcaaaatgcaccttgtgygccattcctgactgattatttggaaatgaaagagaaaagaaaataccaaagttcatctcaaggatccttagcaataactacacacgttaaaacaaagccacagccaattgtaaagagtcatgtgacagagaggaccagratctcatgaaaaatagccttggctagaaagaggtcatttgaccctgggctaattggcaactctctacattgtctggcatacagtgttcaatctgatgtgcaaggcaattgtatcttgcaaagaatttgagaatktgatatgttgctcacattttaccacacatacaagtggattaaacttttacacagtaaaaaaaaaaagcattgttgagcaaaataaattaaatgaaaagacataaaggaataactagtgatgaaatagcaataagaatggaaaacatgaaagagatgcttgtacagcaatgatagcagcacaaaagaacagtgtttttcagaatcatactggagtccaaatcacttctaccacatctaattaaaaaacacagtgaaagatgttaaactttcataggatgcccactgaatagccagttattgaaaaatcttgttcctagattggagtaaacaatttctgcytaccctagccaaacaaattattgtcatgatgctaagctagtgtatagacagaggtgtgagattcacatttttctarctgcaaagcaccctgattaggcaaatatttttgtagatgcttgagtaagaaaattggcattttgggcattcttaaaccgaattagaaacttctgaagagaaacaaacrtagttaygattgtaaaggcattattgtatggcaccaaagtcttgggacactttaatttagctactgtattttctcaactctgttgcaacttatcaaagagaatattaatattaaaggcatttacaaaaaaaatctgagatattgttgtatcttctttctctgtctcaaatatttaatcaactttacagaagagaattttaaagtattaaaaaaagtcagatacaagaagtatttgatttacaaaaccctgaaacaataatgttaattttgcttttaacatgtttataaattctttgatactcctcctttccagaagtgcagcttcattccctccctgttcgtgtrgcctggacttaatgactcacttctaactgatagagtaatgctgacwtaatagtttgtgattctgggtgtagaacataagactcacygaagtttctactttggttctttctttctctggaatcatgagccctgggggaagctggctgttgtgtcataaggaggcctgtggtccatgtgactaggaagtgagtcctcctgggaccagacaataagaagctaaagcctcttccaaaagccatgtgagagattcttgtgtcttgtgaatccctggccccatttgagccctcagrtgattcagccctggaagacaactagactgcaacrttgtgagaggccctgagccagaagcattcagagaaacttctcctggattcctgaccatggataactgtgggagatgataaatatttgttgatttgagctgctaagttgtaggtgacttgttatgcagcagtagataactaatacagcttcacaagagaggatgaatcactgaactttttcatttgctctaaattcattataagatattaaacatgtcatttgcttttaatatttaataaaaatttccatggctatataagatatattttattatcattaacaatgatctattttttgatcttcaacttgtatgttctatttaaacatgaaaggaagatccaggctatgctaggctgattctatgatgacaccccaataaccacccttggttwctcaggttaccccagttactcagttgacactaaagcaggtgctgctgtgaagaggttttgcagatatatttaaagtccccagtcagttgactttaagatgaggattatcctgcttagacggtcctaatcaggtaagctctgaaaaggactgggttyttcctgagaatagagactcacagtgtgagagggattcagcgtgaggggcttcctccactttgggctttgaaaatggagggatcatggggaaagaacactggtggccaataggaattagaagccctccccactgtctactctgatagcccgaaggaaacagggaccttaatcctacaattgccagaaaccgaattctgccaacaaactctrcacaagcttgggggagaaccccaatcttaagatgaggatacarctttgcgaaactctgaacaaagagtctatcacrttaggcctggatttctgatgaaggaaatgtagacaaataaatgggtgctgttttcagccactaagtttgtggtaattggttatgtactgccaggaaataaataaacagattcaaaggataagtatatgacattttctccaccggaatgaattcatgaactgatatgcatagtagttgcataaaaccaaatatttcctaacttgctttgcattttccatttcatgatttttgtgtgatacaattttgaacacaattatatttcattcattcattcaacaaaaattaacttagtgcctactatgtggcagatatacttttatattctgtagatacaactttgatcaaarcaacccaaagcccctgtgcttgtgccttccattctagaggcttcttgagagtaagatggagccattagaggcttttaagtgaagaaatgamacaatctgactcacattagcaggattgctgacctttgtggggagaacagtcatgggcagcaggcragggacagagctagggmcacaattcagtagtgacagagtagtagagactaaggggagaggagggcctgaaggatgacaggracagagagaagggctggagaagcaggaggtgaggtaaaggaacagagagaaagaattctaaagcaatggaattctcagacttaaatacagtgttttatagatttttaatgcatttatccgcaaagcctggcacagtgttacttgcaccttggtctttaatgcattctgtggggctgtctaaaasctaattgcctctctaagataaaaaggttaaaaaaggccgggcrcggtggctcacgcctgtaatcccagcactttgggaggccgaggcgcgtggatcacaaggtcaggagatcgagaccatcctagctaacatggtgaaaccccgtctctaataaaaaattacaaaaaaattagccgggcgtggtggcggtcgcctgtagtcccagctacttgggaggctgaggcaggagaacggcgtgaacccgggaggcggtgcttgcagtgagcgagattgcaccactgcactccagcctgggcgacagagcgagactccgtctcaaaaaaaaaaaaaaaggttaaaaaagaataccaaatgtctcaataaaatatacacatagcttagatgtgaataattcataataataggcaagtgcatgggccggccattatagctcatgcctgtaataccagcattttgggaggctgaggcgggaggattgcttgagcccaggagttcaagaccagccagagcaatttagggagacctcatctctacaaatattatttttagaaaaattagccaggagtggtggcacaagcctgtggtgccagctacttgggaggctgagggaggagcattgatcacatgagccaaggaggtmgaggcttcagtgagtcatgagcgtgccactgcactttagccagggtaacagagtgacgmcctgtctgtaaataaataaaaaataaaaaaattaataataaagggagtgcatgagcactggcgaagggcactttggctgcattaagcacttgcaattctgaggtaattaaattctgtacaggctcctggttgcaatatacggtaatacattgtgctttgtattgagatgtcctggactcgcacacacaaactcagagctatgaaataaagatactgtaaaaatacaacagaccagagtcacagatacacagtctrggaaagtaaaacttcactttgtgagtctaattgcaatgcgtttagacatatttatatatartggggccaaaaatcatctcttttacaaattagattcgtgaccattcaggggctaccaagattgtgctacccactgtagcacaatcggagacccacsccgaggctgcgrgactcgtggagaccctcgacacaagaaccccaggtgcctatacccgattccattttcagttcaggcccaaatccccgggggattgatcggggcagaggaggagctcagtggctgaggctgaccgcgggcttggggacagggtctcccacctccagtggatacacagctgcgacctggacccggaccggagcctcttcgcgcggggatgaacataccctacgatggcgccagttacctcgtcctaaaccaggaactgctctcttggaccgcagcggahaaggcggctcagatgttytggaggaggaacatgcagagctgctcaaaacctacctgccsggaaggtgggcggagtggctcagcaaaggccttaagaatgagaaggagagbctgcaatgcgcaggtaccagaggccacgggkcgcytccctgatctcctgcagatatccctgagccaycttccaaaagaaggggaggaaaatgggaccaacgctaaaatatccctctccctcttgtcctgaggcagaagagtcctcctgggtttctaaatcctataccagagagtgactgagggcccgccctgcactctgggacaattaacggatgaagtctctgcgggaaaggaggggaagacaatccctggaatactgatacgcggtmccctttgaccccccagcagccttgggcaccaggaattttcctctcaggccttgttctctgcctcatactcaatgygtgtgggggtctgattccagstcttctgagtccctcggcctccactcaggtcaggaccagaaatctctgtttccgcctcagacactagaactttccaaggaataagagattatcccaggtgcctgtgtccagaatgytgtctgggttctgtgctcccttccccaccccagdtgtcccdtccattctcaggatggtcacatgggtgctgtgtctcatgaggaatgcaaagtgcctgaattttctacctcttgccctcagatcccctgaaggcacaggtaacccwccaccccatctccaactatgaggccacgctgaggtgctgggccctgggcttctaccctctggagrtcacactgacccagragcsggatggggaggaccaaattcaggatgcagagtttgtggagaccagacttgcagggtacagaaccttccagaagtgggcagctgcagtggtgtcttctggagagaagcagaggtacacatgccatgtgcagcaygaggggttgcctgagcccctcacactaagatggggtaaggagacgaatgagvggtcatgtctcttctcaggcaaagcagaagtccttctggagcctttaagcagggtcrgggctgaggcctgggggtcagggcccctcacgttcacctcctttcttagagctgtcttcccagcccatcatccccgttgtgggcatcattgctggcctggttcttcthgttgctgtawtcactgtagctgtrgtcgctgctgtgatgtggaggaataagatcccaggyaggaaaggggtgagctctgagtttccttcttccattggtggatttcaagccccaggtaggagtwggctcatatcttgcctagttgtgaggcaccatctccacacacatttaccctgttcagaggccctgtctatcaacvcttactcttttgtaaagcacytgtgaaaatgaaggacaaatttatcaccttgattgtggtcatgggaacctgactcccagcartcacaggtcaggggaaggtccctgctgaggacagacctcaggaggacaaytggtccagcctcaacacatcctcttccctygggttttctgatcctgacctgggtctgtagtcacagttctggaaactyctytaggatctcatgccctgcctcctccctggcctctcacagtttgttttctttccacagatggaaaaggaggcagttatgctcaggcttcatgtaagtgtggtagkggtgggaagagtgatccctgagatccttgggatagtgtagacaggagcccatgggggagctcagccaccccaaaattcctcctttagtcacatcacctgtgggctctgaccagattttgtttttgttccaccccaaacaggaasagtacccagggctctgatgtgtctctcahggcttgtaaaagtgacaccttagagggcctgaagtgaaagaggagttgggcagaggggacacaactargctctggagattctttgatttggaatttttcaaggtgtggtgggctgttcagtgtcacaacttactrtgactgacctggattagtttatgactatgttttttctaagattgccttgtgagggactgagatgcaagatttgttcatgcctcctctttgtgacattaagdgcctctggcttctctttctgccaaagcvtctgaatgtgtctatgtctacagtaacaggtaagaaatgggagaccagcccatcctcatgtccaccatgacccctgatattgtttggatctgtgtccccacmcaaatctcatgttcaattgtaatccctaattttggaggtggtgtctggtggcaggtgatcggctcatgaggatggatccttcatgaacggtttagaaccatctctttggtgctattcttgtgataattctcataagatctggtgtttaaaaatctgtgtcacctccctgctctctctccctcctgctccaggcatgtaagtaatrtctgcttccccttagccttccagcataatcgaaagttccctgaggccctctcataagatgagcagatgccagaatcatactttctgtatagcctgcagaaccatgacccaatttaaacctcttttctgtttttgttttgtttttgttttttgaaggaaaatttatattattttaattatttttacatacagaaaactcaacagcatacatttcacccaattyagtggcatgttctttaccctttgcctttttgagcttggcaatgcaaaccacatacttgagacccaggacactgtctccccagtgayggcggatctcatcvtatctgtcattgtaattggtcctgagaactyccaccagcttagccaaagcacctttgtcttccgagttaacctgtgtgaaggtgacagtggtgcaggtcttcctatggactagatgtcccagtcttgccttccctttgataatgcagtaagggaccccattttatgacacaggacaggcaagaagacaaccagcttgatgggatctacatcatgtgcwatcaccaccagctgagctttcttgttctccaccaaggtggygatggtgttaactcctgctcgaaggacaggtggactcttagtggggaatgtcccctttgccagcagctttcttcttggcccvggccaacagcctctgcttcttctcttggtttgtctctggtctgtattgtgggccagcttaagcagcagagtagctgtttggctgtctggtgcctgggtgaactggttaatctcaggaggcactttcagccacttatagaggatggttctctgctgctgcaacctgatatagcagggccatttcacaaagtgggtgaggtstcttttgggctggatatcctgtccagtgccaadattcttaggccttttctcaaacaagggatttaccactttcttggcctcctgcttcttcacgacagcaggggctggagccaccttcttctccttggccttctttccttttggcatcttggatggtgggaggagaaagaaagaaacctattttstttataaattacccagtctcaggtatttctttataaaagtgtgagaatgaactaattcagaaaatcggtaccdggagttgggtattactataaaaattsttgaaaatgtggaaacdgctttggaactgggtaacaggcagaggttggaagagtttggagagttcagaagacaagaaaatgggggaaaatttgcaacttcctagagatttgttaagctgttgtgaccaaaatgctgatagtgatatggacaatdgagtccaggctgataaggtctcacatggagatgaggaayttattgggacctagaggaaaggtcacttttgttatgcattggcaaakaacttggaggcattgttccccctccctagggatctgtagaactttgaacttgagagtgatgtataagggtatctggtggaagaaatttctaagcagcawagcattccagatttggcctgcctgcttgtaatagcctatgcacatatgtgtgagcaaagacatgacctgaaactggaactgatatttaaaggggaaatttaatatccaggacaattcctagtggagctgcaggaacaggacccctgccaagactactaaatcatagagccactggcaatatgcaagctcagcctggaaaagccataagcattcaatgttcacccatgagagcagctatatggattatgttcaccaaagccacggatatgaggctgaagatggcattgtgagtccattgcttgcascagccagtgtgctcagggttcaagatatagagtcaaaggagattattttagagctttaagttttaatgtctgccatgatgagtttcaaccttgtgaggacactgcattcatttcttttggyccatttatttcttttggaatggaaatgtataggaaatgtctctaccactgttgtattaatattttagaagtaaataactttttttaattttacaggtgcacagctataagaacttaccttgagtctcagatgagactttggaatttagagttgatgctggatcaacccaacacattttggacaattgggagaagattattgtcttttgcaatgtgagaagaatgtgagctttggctggctagggacaggatgcaatgatataaatatttatccccagatacctcatgttaaaatctgatccccaatgttggacttagggcctaatgggtggcgtttgggtcttgggggccaatcttttatgaacagagagatactgccctctctcgggagtcaatgaattgttgccctattagtttccaaaagagctagttgttaaaagagtctcgcaccttcctactccctctgttcctctctkaccacgtgacttytgcacataccagctcccctttgccttctgccatgagtggaagcagcctgaggccctcgctaaatgctcaaacatttccagacatcagaatcctgagccaaatgaaccttgtttatataaattagtcagtctcagacatttctttatagcaacacaaaayggaataagacaaccctctcatcatagstatgtgtctgtggcagycagcccccattctcaaggtatccaggatccwctcagccaagagtcctttcctcagtattctaaagacactctaatcactcaagagattctaaggtttwtaggagaaacsagggacaaractaaatgtttttgtgataactcatattayccccttttctttgaccacatatttttcatacgaaaaggattataacagtaaagaagcattggcatattatccaagtctcattcggtcattcaaaattaggccagtttatcatcctcttgtatgaatatgtctcccagaatgacatcactcagctttgcagacaccaytcaatcttawcaggttccaaaaacaagaatggtctcagggacayacagcttcacccttttaggcatccagtatagttgacctaagagacaacatctcttgctcacaccacttttgaggagataagctaatattgaattttcctcattacataaccctttgatttattcacctaccctcagccactattcctccttctgtccctttatatcagtcttttccagttctagaagtgacattaggtttggctgctgtgctggcctagactgcatgcagcaayagtattctaccatgtcttctcttaatctactcttgatcatagacrgtaggttacataggttaggaactagtgcaggctatctgaccaccagtctacgtagctctacttacagttaatcccgactttgccagatgaaatgaaggcacagcgcaatccttgatttgcttgggaattcttacataaaggtataaaaatatagttatggttttttccttagggataattcctgtttctggcagttcgatttgcatccctgttcctggtaccactgcaccctgtgtaaaaaaagaaataagaaatgaagtgtagtcattattccagcatcctccccttaagaagaattgtatgtacagtcataacagcatcaccctgatccatcaggaaaaagagaggaagctacctagtggagtcagtttcgcagctccacccatgttgacagtaagcacattcatgaagatataaaagccagtccttcatgtttatattgcccaacaattatattggcagtttttagacaattagacaaccaatgtttcaactgactatttctttttttttttttttttgagatggagtctcactctgtcgcccaggctggagtgcagtagtatgatctcggctcatgcaacctctgcctcccaggttcaagcaattctactgtctcarcctcccragtagctggtaatacaggcgcccaccaccacacgcagctaatttttgtattttcagtagagacrgggtttcaccatattggccaggatagtctcaaactcctaaactcaggtgatccgcccgcctcggccaccaaaagtgctgggattacaggcatgagccaccgcgcctggtcagccatttcaatattctatcaaagtttcccctgaatagtacatttccctgtgcaytgttggctttttaaggctgtaaagtgtgttttcttgtgtaaagaaatgtgactcaacagtccaaattggtgtaatctccatttttctggttcttgtatagcctttgaagcattgacatctacccctggttgawcatagcccaatccagagtcagtgacttccctgtcaagatccattggcagctcctttggggttgctggcattagtctggcttgccagctatgaatgatcaaagcttcccactacagaatctgtcacagagctgcctctgtctgttttcttgaccaaaagtcaaaacagacagtatgagaaatgagataaattaccaaaattgtgaacacaagagagagtatcactaatgaccctttagaagttaaaaawcattataagttaatactctgaaaaacctgaagccaatcagttagaccacttagataaaatggacagatttatacaaagatagaaattgctgaaactgactcaaaaataratagaaaatctgaagagaactgtacactaagacagtaattttaaaaccttctcacaaagaaatgccaaagcccagatatcttcactggtgaattctatcaaatatttcaaaagctctttcagacaagaagagaggaggcaagactttctagctcatttacagaactgacattaccctaatatcaaagtcagagcaagactgacaagaaaagaataccatagaccagtgtcaccaataaacataaatgaaaacatccttaacaaacattggcagacaatagaaagccacgtaaaaaaggattacattccatgaccartgggattcatcccaggaatatatggctggattaacaattagaaatcaattaatggaatgcactgtagtaagggaataaaagacataattatctcaaaagatacagaagaaacagttgacaaaaatgttaacaccactcatgttcataagtttcaacaaaataggaatggaggggaccttcctcaccctgataaagggcatctataaaaaacccacaactaaaatcatgcttgctgaagaaakactgaatgcttttctcctaagatggagatcaatgcaaggatgtccmatccaacacttctayttaacattgtactggagattgcagctggtgcaataaggcaaataattaaaagttaaaggcatccagataaaaaggaaaacataaaactctattcacagataacatgaccttgtctgtagaattcacaagcagataaaagcctgctagcactaaaaaatgaatccagaagctcccataggatataaamtcaaattaaaaattattaacatatttctctatacaagcaattaaaatctaaactttcctatcacagtagttacaaaaagagagaaataggaataaatttaggaagacagcagagtttgttgaaaactacaaaacattactgagagaaattaaaggtctaaattcatggakagatgcggttggaaagctcaataatattgttaagatgrcaattctccaccaagagatctataggttcwgtacaatctctatcaaaaccccagcaggcattttatggaaaattgacaatttaatcctaaaaatgtatgtgaaaatgcagaggatgcagaaaagccaacgcaaatttgaaaaaaaatggaatgtcatataaaactacaataatccagacagtgtgaaagcgagagacacagagattaatgaacagaagtgagaatctagaaagacattcttacatttttttgtcaattgatcttcaatgaagttgcataggtaatatgatgtgacacttatcgccatataaaatataagctcaaacaaattagagacctaaacagctaaaatttrtaagttaaaaccataaaatttctaaaagaaaatataggagaaaatttttgtgacattgagtagttaggcaaaagattcttacataaaatacaaaaaacatgatctacagatgaaaaaaaagtgagagacaaattgggcttagttaaaatttaaaacttaagtrctccaaaagacaatattgagaaaatgagaagacaagccgtagattgagagaaaatatttcacaatttatcacaaattacatctgtgatgaagaacatgtatccagaatatgtgaaaagttcttaaactcaatgtaagaagatgagcaactcaactaaaaatgagcaaaacatgctcaactgacttttacaaaagcacaaaagcaattcaatgaaggaaggagagctttyccatcaaatggtgatggaacaactggacaaccacagtggaaaaaaaataacctgagccaaaacytcatgcttcatacaaaaataactcaaartgagtcacaagctttcatgtaaagcacagagttaaaatggcaaacattgagccaggtgtggtatcacaggcctgtactctcagctactcaggaagctgaggtgggaggatcccttgagcccaggagttcaaggccagcctaggcaagaattttttttctaaaataaataataaatttaaatttttaaattacaarccttttaagaaaaagtcatcagagctaagactggacaaagagttcttaracataacaccaaaagtatgatccataaaagttaataaattggatcttatcaacactaaaaactgttgttctgtgagagacctatgaagagcataaaaagacaagctacagaatgagagaagatatttgcaggcaacatattmtgtaaagactgtattcagaatatatgaagaaattttaaacaacaataaaaatgaaatccaaatacaaaacaggcaatgagcaagacaygaacagacatttcactgaagaggataaatactgggctaataagcagatgaataggtgctcaacatcattatccagtaggaaaatacaaattaaaaccacagtgatgagaatggctgaaatacaaaataaaggtagcaacagatgctggcaaggacgcagaggaactgggacactcttatattgctggtagggatgtattttaaaatggtacagccrctctggaaatgagtattgyagttttcttcaaaccgaacatgcaatttaccttatgactagcaattgccctcctaggcacttatttcaaacragggaatactttatgttcacgaaaatcctgtgcacaaatactcttgcagctttattcatgatacccccaaacaggaattaatacaactgtctttccgtaggtgagtgagatctgctggttgaaatmataactgagtcacacaagtgccctttctcaaggctaccatcctgcttctctgtgcagtaagkgtyttatgcatatttcccattttctcacaaagaatattaaagacgtatactcaaggatcaaactttaayccacataaattttttactgctccatcaaagacactcttaaaygggactgcagtttggagccactgcctggttctgctkaggtgctgggtgtgytaccgaccttggcatttgcagcactaatggaaaagtcaacacaatgaaacaggcagatggcatcttggtattactgtgaaaacaagyctgcctccaggactctctgaaggctgctcaggggacacactttcaaaatggcaaagatcaattatggttcctagtgggacacaacccctagcctattcctattcagcactgtcttgctctctattttccctcattcttccaacttataactgtataaattttcaaatgtgcaaagaagctgaaagaayggtgcrgtaaaattcaagytaccactctgccgtatttggttaatatctctttatatacataaaaggagagtgtgaaatgatggaccatggagacccagaagggtaagggggttggcagttggtgtataatagaggggtttcttgatkggtacaatgtgcttgtctccagtgctggatgctctgaaggccctgactttaccacaaccaatatagcaatgtagcaaaattgcacttgtgcctcatgaatatatatgaatytaagaaataaaaaataaaataacataacatgtytctttatagatacaggtagacatgtttgtatagcatgtgtgtgaatgtgtgtgtgtgcckgtgtgtgtgtccdcctgtgtgtgtgtktccgtgtagagaggcagcacaaattaagagattaagattttgtgactgagctattccaaagtaacttaaacataaaacacacatggataaatgtgtctgtgacaacaaacctgaatacaaacatgaaataatatgtctataaacacatctctagatagatagcttatgaatgaattccctaccccagctcccttactggttgccctgtgaacacavggagtcagggaacaggacccagctagggtccctcatccttctcttgcatccaggcaggtcctgcatccactctggctgcacagaaggctcccatccctgccttggtctgtttcacaggtgctcccctaactctctctgccaccactgctttatctggatggagctgaggctgccctgaccaagaacagcaccacccatctgtgtccccaagaccaggaagttaggaggaaccacacaacaaggtcaggaactatcccacctccccartcagtctgaactgatggcgggagatgctgatgcttgctttactcatcctcaatcccagctcacttattcttcattaattcaatccaatctccccagcagtcacttcaccccagaagctgactgacctctactcttcgtaatcaggaaaccacaaagcactctccgtcccctccctgatatcacccttcagctctacatcatcatatgtgggctctaactctgcagggaagatgttgccccacagggtcagcccctgaacactggctgcaaatgtccccccatcccttcccagccctttcggtgttgctgtgaatctgtccctcactgagaactggyggggagatgtgggggaggagggdagvtttctttatgctgtgtcaaagcatggagacagacctctccttctctcctgaacctcacactatcccttcccagacacttgaaataaaacgcagaccagaaatgtctatttaagagttaaatatctatagtataaaatatgaagacagagtagaatggggtaatgcaggagagcatgacagagatgacaggacctcaaggtgccaggaaagctggtgctgggccaggaccaaggagccatcagcaggacactcactcataawgctcacctataataatacaattactgcatatgtaatatatcaaaatataataaaataacaaaataacaaaaataatatggcacagctgcaaataccccatatatactaacccttttcattcatccaaccacaagaaataaatgctcgtagtttccccatgtcatagatgaggaaaatgaggcacaaagagagaacatgctggtgaggcctaggcaaggagttgaatccagaycgcctgrctgcagagtctagttgccctcagtggagccagcgaacccaggagctgacaccagagactgagatctcagctgtgcactgccctggtggtctcctgtcccaaccaggtgttgacccaggccttgcaggctcacgcgctctggaaaaaagagagaaaccaataaatgctcccctgggtgcagagtgctgctttttattycctgaggagttctccctcctcagtcactcccaaatcagatttaccctttctctgacggaagatgacgtccccacttttttctccctcccatsgcacttttccagcccctgccagtcccctcccgtgactccatcaacatcagcacctgccctgtgtccaccatccattktgcagtgagtgaaaggacccaggactaaggaacaagacccavgaggaaactcagtgccctttcctcctcctctcaagcctgaccagccctgacacagtgagaggcctccccaaagagaggccctggccctgtctccatgtccttccaggtctgggccaagtcacacacagtccttctcttcctgagaccccaggccctcttcacctgcagaggcacctgcataccagggcaggccctgcacrctgtgggttctgccctccaccagcagctcactgttcctcccctcccagctctgagcagacagctcctaacwagagatmcyatcaggaagccctggggctcacaggcccbgcatggaaatatgtggctgccatggagtctgcacctgacctgatgctggggacccccttgctcaaggaggcccagcctgccctccccataacctgcatttgggctgtgcttgctcctgcctgtccactcaaccctggaaatgcagctccaccccagggctgctgcttggtgaggctgcaagcccttcctgtcccattcctaacagggattccacccaggccactgccatcgcagctcacaggggatcttcttcgcctgtggagtagggggtttcttcagacccctcatcctgaggctgcctctacgcaccctctgcacctggggattgccactgccacaggcactgtctcccacatggaccctctgagaaacgaagccccaaatttgacttcctgttctattcaacatcctttacaacatcagtdttggvggaaatcctattaagattatccagctgaaattatgttgatgbacaccaatacttaaagcaggaattttgagaaactaacatgtaattttcatgcctttttctvgccaatgtcccagtgacctacgagaaaaccwttcctgcctacagggaaccagaactgacaatccctctataggagacaccgcaggtgagagcaggagcaaccacagacctgcactgcccgygctgtggttgcctcctggacggggccctcttgctgcagggcaggggatgaaccgtcccatctgcccaggcctgagtggccaactaactgtgcaattaggttcaaggatgagtcaccaccacctcactggccagacacacggaagtggagaaatggcagaaagactcgggtttcctggacaccycagactctcactgtcccctgcactgcctctgtctttgcagaaactcaaaactttctgcttgctcttttcctctcccctcaaacaacctgactgtgggggahatgattctgactgtctcttattbtaaacttaccaggcagygactacactaagaacaaaaamattggctcaggaaaggcaaggtgaggccacagagcacagaacaaagcccaaaaaacagcccactgggtactatgaccctcgggggctggaaaaagtaacacctggacatgggatgaaaacagggaccacagctgccctgacagagggctggtccccactccccaaatagcccagggacatctgcttatcaactggtccatattatctgcaaggaaacacagggagacaggggccatatggtgggaacccagaaaaagcacggtctcgagggacccagaggacgtgacacccctgagacagctcccagatgaggcatatggggagctgcaaagtggacagaggatggccatgtgcactcaggactctccctgttacaaggggacctcaaaggggctgtacacatgggggccctcattctgggyctcgtgggtctttttcttgatgtcctcctgatggctggagaaacaggggagggggatgcagaraggaagggactagaggcaccacctctccttggattcctctccagtttctagccctccctagatcacatctgcctttactatttgctccctctgagatagygatcatccaggccctcagcaatcagcacgcaattcccaactcacccacctggatgcracctggtaagcctgagagacagagaccgggatggggacaaagcaggcaccacggccctccctgctgcccactcctcacctgcagcaggaggaggcyacagctggatgttcgagggccttggcycagccctggcttgggcaggacttaagggtgtaaaaaataacctacatgtgatggytcattttcaattctatgtgccttagtataggtttaagcaggccacatggtcataaagagataaagaaggaaaatgtactaagccaccatcccccctacttcttgctttccctttcatgcactggccaggcacctatcggttggggccccctcaacgaccccttccccacctcaccaaaaaatgtagtttaggctarcttgcaacatagataattgtaccctttcttatcaactaagtgcagccattagggacataagtcaaatgtttaaagagtcctgagacaatcacaatgcattatgggctgcaacaaaatgcagcaaaaaaaaamaaaaccctaaggaacatactwgaagtcttaaactaccaataggtgacatccgggaagatcgtaagtccttggtactcagctaatgagcaactgggggagggagttgmgcactagggaataaattgttgaaactctccctggtgtgcctgcattccagacacccaatattgcaaaaccgtcactracactctcacttttgctgttctctgggtctcagagtccattctttgggtttggatgggtgcgtttgtttctcataatctagttgcctatatggggatctctgtgcttgygtgaagtgagtgagactctgcctgaaaggagaaacacrtaccaattgattcatgtggcccattctatctggatgtcctggctcctcgcagaagccatagacaaacttgaaactgttattcaggacacaatgaaagtgacatgggggtacgggagggtggggtggaaagygggcaccacagcaaccaggcaacctcatgtgtcttgtggaaggcactgaaagtactgtgggggtcacatcaccatgagagagctgaaggatgtggggtggtgttggggctgtctatcgtctctacgtaatccagcaaactgtccctgagggagcctgatgakgcctaaagaatgaatgagattactctaggtatggccaagtaggagttataattgcagcttttatgttgtctggatatcactggtagagcagattaataaatccttgggcccacagtgtgcagctgcagacttggtgagtgcattcctttccactccaattagaaaggggatatggaatgattcacattcatgtgggatccacaacacatttatttatcatttgcctcagggctattgtaactcctctgcccgctatagtatatagtcttaagactacactagacatactggatatcctataggatattaaatcagctcatttcattgacaatttcatgtttactggggtggatgagcagcaggtagaaastgcactggagtccttggcaaaacaagcacactccagaaggtgaaggtaaaccttacagagcttcaagagtggccactgaagtgaagttttatgggtgaacaagtgccaagtgtttaggggaatgyaggtgtgtcccctccaaggtaaaagacaaactgtttcatcttgcatcctcaccagaaggaaggaagcacactgcctgatgagcctctttgagttctgatgacaccacattccacatttaggtgtgttgctttggcccacactctaggtgacataggaggaggccaccttcatgtggggcccacacaggaaaggaccytgyagcagatccaggccatggtacaagcagccagcatccctcagaccccttggggctggtggtgccagtggtggggaaagatgcaggatggagctgaaccaagcaccagtgggagagtcacaatgragggcctgggattctggagtaagatcatrtcatccacagcagagacatatgccccctgttagaagcaacatttagtgttacttgtmctgatttgatagaatgcttgaccawgrgacaccaaacaacaatgtggttccaagtggctgtgtgacccacaaagtcataaattgcacaggcccaacagcattcatcaacaggtgaaaatggtccacctggrttgagcttgaatcccwygytkacacccacagaaaacacccaagtgtgawgtggcactgaacwaccaaacagacaaatggcagttagccagccttcaccatgggtcagcccaggcctggtaggatgggtgcatgaatggagcaaccacagtggcaggcatgaggctatgtatgrggccagcagcastgactctcccagccctaccaaggtagatccagctactgccactcctgaatgtcaactcgtcagcatttggagcccatgatgtgccctagtggggcrctatttctttmggcgaccagccactaagtaacaagtgactacatttagctacttccatcctggaagggccagaggttcatcttcacagaaataggcycatattccatgggtgggttttcctgtcttgctctgacactcagccagcaccactctccgggtgctgttgacattcctgatctgcaggctaggcggtgctcctagcccattctctgcctgaaggacccatttggcctggaaagttttaawgtttccatggctgtgggttccactaatcctatcaccatctgcaccacccaggagctaccagccacaaggaatgctggacaggtcttctataggcacaactcagtgccagcctggaggaagcactctgaragtgccatctttcagaacatggtayattgtttgaatcagagatgtctctatggtgctgtgttctcaatggaagaacatgtrggtccagaaatcaaaaggtggaagcaggtatggctccatgtccaatctcttagattcayccactaaggtattttgccttttttatstcccaacaatgggctgtgcgggttaggaggtcctggtttccaaaggagggtacccttaaaagtagacaaaagagagcccattgaactacacattaytttagtcaccagagaagtttggagagcatgttcccagagaccacatcgtgagaagaggagtgtccttctctccaggcccaggtaataggccctcatccccaggaggaggcatggctrctttcacacaatgagggcagaagtgtgtgtggaaaccagacatccacctgggaaccttctgggtccccttgccccattgtaagtgtgagcagaatcatccagmaatttagcytgagaggatttgatttccaagaacccagacccatctgggcagcaggtttgagtcacactcctgggtaatctcccaaggccctgctcctgtgctctgacatcctcagtagcattggtatggaggccctgcttcccatgggctgttcccagtcagtgatggctcacaccagtgacactaaggcaggacattcctgggagacaggggactcctctgayggccaatggtggctccgggtctyctccatggccttgctcaactctccttagattgcctgtggtctaggaaacatccagtaaaccttctctccttctgtccatcactgggggtcacacttgcatctcggcctgttgcctttcccagggtaacctgactccctcacaatatcgtctgacaggtatgtcccctaataaaatgytgtaactttaaycccatgatggcacttgctttttggaggatttggactacaaaatcattttcatctrcacaccagtgtcctcttattccaatttgtaaaatccttttgtttattcaacttcttctacttgcgttggctccattttgctggtatttgtattatgtttttgagttcgtcaatgtttgttgatttaatcactaaatttgggggtagtttgttatgcggcaatggataactaatgaagccctcttacatttccattattctatacaggttacgtacatctgctttatttccttccattttcataayaytggccatacgtagggtttctagtttctcaacgtgtattcttttctttattttagtttcttttcttttttgttccttccctttctccttccttctgtccctccctccctctctttcttctctatttccattcaacctctcgccttccctcctttttactctgctttccttcccttttcttccccttccccttccttcttttcttctttcactccttcttctcttcctccttctttccctcccttcctccattttttcctttttattatgaaaatttcctaacatataaaataaccctatgtgattgtgctataagtaagcattttctgaatctgtatgycaaaagtacaatgccacggtatatgagaaacaagtaaacaacagaaagttattgacagaatctaaataaaaatgcctgctataattctgcagccaagacagyggctttcaactcaattccttcaactcartgttttcagaacacatcatcaacatcaagtattayrcacttatttcaaaagtttargccaggcgtggtggttcacgcctgtaatcccagcactttggkaggctgaggtgggtggaccacctgaggtcaggagttcaagaccagtctggctaacatggtaaaaccccrttgtcgcaatcggttactatgggatataatgaagggggatgaacacagaaataaagacaaagacaaaaagatctgttctaaaagaaggggtcgggggcttcttgcttctagtgattccttctggcagcaaactcagtttgtcagtttgccaacatcctgctttcatgagaacagtttgctgtttgctcatatagcctccagtggtatactgagttgatcacgaccctcattctttcggcctccaataccccgactctactaaaaatacaaaaattagctgggcgtggtggtgcatgcctgtaatcccaactactcgggaggctgaggcaggagaattgcttgaactgggaggtggaagttgcaatcagccaagatagcaccactgcagttcagcctgggcaacagagcaagacttcgtctcaaaaataaataaataaataaataaataaataaataaataagtttaagttggcacaatcactttggaaatcatattattattatctagtatggttaaaggccatayaacatatcatccaatcatcccactcctaatcatacactctgcgggctttcttgcctatgtgcccaggagacakgcacactaatgtttatggcaagaactggaatcagctacatatatatcaatagaaaactagtgcaattatggtataaccataaaatgtaaaccttcagcagtaaaaacgaatgaatgacagcctcccacaccacagataactcctatatgtaatgtgcatcatgggaaaataaatgcagtaggaatttgckgtactggaagcttaaaaaccatcaaaactaactaatatttggattggggatatatctatacttattacacaaatccttaaagaaactctataatttctttatagatattatgaaaacagcaaggtactggtacaaaaacaggcacatagaccaatggaacagaacagagaactcagaaataagaccacacatctaaataaaggaataataatcacaagactcaggdtggagtctccttttgggggatgtgaatgggmagcagcccagggtagtttacaggttctgtgttttacaacagtgctggctaaagtccaaacaacatatcatccattcccttttaaaatggaacttttaaaataaatgtgtaatayttgatgttgatgatgtgttctgaaaacattgwgttgaaagaattgacttaaattcctaattccttaaayagattttttcaaagtaaaatatgcttggtttttataaaaatgaaagagaaaagaataccaaagttcattgcaagcatccttavcragaactacttacattggaacaaaaccacacagaattgtaaggagccatgtgacagagaggaccacsakgccatgaaaayggctttggctacaaataggtcatttgatccttggctcactggcatctctgtagattttcatgtatacaatcttcaatctgatgtgcaaggtaattccatcttgcaaaggatttgatgttacattctaccacacataccactgaattaaacttttacagaattggaaatgcacatcwttgatcaaaataaatgaaacaagaaaagagtagaaaggaayaaccagtgayrgaatagcaatatgaatagaaaacacaataggactgcgaaaacaaagaaacaaacaaaaccacttcagaagcacctgatggcatgctatttagaatcatagtggtgtccaaatcacttctatcacatatcattcaatatcacaacaaaagatgttaagtgtattatagaatgcygatcgaatagccagttatygaaaaaactagtttctcaattcgagctaacaatttcgtgatactgcatcaaaccgaagttattggcatgctagatgtgttgactgaagtatgagattcacatctttgtaaatgaaaagcaatctgattaagcaatatttttctaagtgaaagcaagttaattagagaaagaaacaaaggatggctactccagagacagagcagtacttctttttttaagtgtaggcaaatgttttttggaagacgatatttcaataagaaaactggcactaggggcatacttcccctaaatttgagacattttagacaaaacaaagacttattttcaaggcaytatttttatagcactaaagtcttggaactatttgatctagttattctatgttctcaactgtgttaactcattgaagagaacattgctgttattaaagatattggcaagaaaaactcagagatactgttgtatctcctttctctgcctcaaactgttttcccctcaacacctaaggctctgtgatgtctcaaacttttagtcattaatttaaaaagtgaagcttatcatagaattagaaaaaaactattttaaaattcatatggatccaaaaaagagctcctatagccagaagaatcctaagcaaaaagaacaaagctggaggcatgaggctacctgacttaaaactatactacaaggctacagtaactgaaacagcaaggtactggtacaaaaacaggcacatagrccaatggaayagaatagagaactcagaaataagaccacacatctaaaaccctgtgatcttcaatgagccygacaaaaataagcaatgggcaaaggattccctatttaacaaatggtgctgggagaactggctagcaatctgcagaaaattgaaactggactccttccttacaccttgcccaaaaattaacttaagatggattaaagacttaaatgtaaatcccaaaactataaaaaccctggaagaaaatctaggcaataccaatcaggacatagggatgggcaaagattttatgatgaaaatgccaaaagcaactgccacaaaagcaaaaattgacaaatgggatctaattaaacaaaagagcttctgtagagtgaaagaaactattatcagagtgaacagacatcctacagaatgggagaaaatttttgcagtctgtccacctgacaaaggtctcatattcagaagctacaaagaacttaagcaaatttacaccaaaaaaaaagcttcattaaaaagtggacaaaggacctaaacagacacttctcaaaagaagacatacatgtggccaataaacataagaaaaaaagctaaacatcactgatcattagaaaaatgcaaatcaatactacaatgagataccatctcatgccagtcagaatggcaattattaaaagtcaagaaacaacagatgctggcaaggttgcagagaaataggaaggcttttacactgttggtggaaatgtaaattggttcaaccattgtggaagacagtgtggcaattcctcaaagatttagaaccagaaataccatttgacccagcaatcccattaaaggttatatacccaaaggaatataaatcattctattataaaggtatatgcatgtgtatgttcattgcagcactattcacaatagcaaagacatggaatcaacccaaatgcccacmartgaggaactggataaagaaaatatrgtacatatacaccacggaatattatgcaaccataaaaaggaatgagatcaagtcctttgcagagatacgaatgaagctggaagccattatcctcagcaaactcacacaggaacagaaaaccaaacaccgcatgttctcacttataattgggaactgagcaatgagaatacatggaaccagggagaggaaaaacacacaatggggcctgttcggggagggcagtgatggggggatcattaggaaaaatagctaatgaatgccagggttaacacctaggtgatgggttgataggtacagccaaccaccatggcacaygattacctatgtaacaaacctgcacatcctgcacaygtaccctggaacttaaaattaaattaaattaaattaaattaaaagataagcttaaagcattaaagaaaaataattagataaaagaagtctttgatttacaaaatcctgaaacaatagttttaattttgcttttaacatatacgtaagtcctttagtacagctctctttcagaggtgcagcttaattccctctcttaagtgtggcttggacttaatgatgcacttctgatatggcctvtctctgtgttcccacccaaatctcattttgaattgtcatgcgaattctdatccccacatattggcgghgggacttcatgggaggtgatcgaatcatggggatgattcccccaagctgtggaagtcagcggttgaacctatttttcctaatgctcccctcagcactgccctcccataataggctccagtgtgtgatgttcctctccctgtgtccatgtgttctcattgctcagctcccagttacaagtgagaacatgtggtgtttggtttcctgttcctgtgttagcttgctgaggataatggcttccagcttcatccatatccctgcaaaggacttgatctcattcctttttatggctgcataatattccatggtgtatatgtaccatataaggggattttccccacttcactctgcatttttctctcctgccaccatgtgaagaatgacaygtttgcttccccttctgccatgattgtaagtttcctggggcagcctcctcagccatgcacaaytgygagtcaactaaacctcttgcctttataaattacccagtctcaggtatttctttatagcagtgtgagaacagactaatacaacttctaactgatagagtaatgytgacataacagtttgtgactctgggtgtagaatgtgaaactcactatggcttccaccttctctctctctgtctctgggatcatgagctcttggggacccagctgctgtgccataagcagccctgcaggaaggtccatgtggctaagaactgaggycccctgggaccagacagcaaggaactaggcttttccaacagccatgtgactaagccatgtttcayrtgaatccyyagccccagtgaagccctcagacgatgcagccctaggctgacaactggactgcaaccttgtgagaggccctgagccagaagcactcaggaaaaccgctcctggattcctgaccattagaaactgtgggagatgatgaatatttgytgttttgagctgctaagttttacataatttgttacacaatagtaaataactaatacattttcacaagagaggatgtattattacacrttaatttgcatttgctctaaatttatcatcatcatattactatttttgagacagggtctyrctctgtcacccaggctggagtgcagtggcatgatcaccatgcactgcagtgtcgayctcctgggctcaagggatcctctgatctcagcctcttgagtagctgggactataggcatgaattaacatgcctggctaattttctaatttttttgtagagatgggggtttcaccatgttgcccaggctgatcttgaacttctggagtcaaatctgccttcctctgccttcaacagtgctaggattgcaggcgtgagccaccacmcctggtctaaattaactataagatattaaacatgtaacttagttttaaaaggaaaggagaatttccacggctgaagaggatgtattttattactattcayaatgatcactttacttgaacttcartttccaactgtgtccaaattaaacacaaaaggaagatccagcccttcctgggctgattctatcatggctcccaacaaccagctcctggtcattcaccttcccccagttattcaaccaactctaatgtaggtgctgctgtgaagggatttagcagatataattaagggcctcaattagttgactttaggctgagtttatcctgcttggactgtcctaataaggagagtccttgaaaggactgggttcttcctgagcatagagattcacagtgtgagagggattcagcatraggggtttcctccactgtgggctttgaaaatgaaggggctgtgtaggaaagracgctggtgggcaccatgcattragtgcagccctccctgttctctacagtgacagccagtgaggaacagggacctcagtcttacaactgccagaaactgcattctgccacctctgtataagcctgaaggaggattcaaaatgaaaacacaggtttaggaagaccggaacagagattccatccacatcatgcccagatttctgattaagaaactataaasaacaaatgrgtgttatttggccaggcgtggtagtgcacacctgtatcctaacatttgaggagctgacacaggaggaacacttgcagccaggactttgagaccagctaggataatatagtgagacactcgtctctacatttctytttaattagctgggcatggtggcacttgcctgcagtcctagctactctgaagactgaggtaggagggtcccttgagcccaggaatttgaggctgcagtgagccatgatcatgtgactgcacttcatcctggatgacagagggagactctgtmtctaaaaataaatcaatgaatacaataaatgggtgctgtttaaagccaatgtttgtgacaatttgttacccagtcttataaaattcatacacagactcaaaagactcctggaatgaactgatgaattgatacgcacactagttacataaaataaaatcttttttaactttttyagtgttttacattttataattttctgtgatgcaatttaatacactcataattcattcattcagccaagaaaaaataatttagtccctacaatgaaccaggtatgccctcatatgctcaagtgcctgacattctagaagcttcacaagaatgaggtggagccactggagtgttttaggtggagaaatgacacactctgactcatagtagcaggaccactatagagagaacactcatgtagcaggtcatggaacagtgctagagccacarttcaggagtgagagggtggtggggattaaggggagaagagggcctgagggatgagagggacggagggaagggctggaggagcaggaggtgaggaaaaggagcagaggaaagaattccaaagcagcrgaactcttaggtttaaacacattrttttatagattttawtacatccatctacagagcctcgctgggtgttctttgcagttggcctttaatatcttatgtgggtctgcctagaaactaattgttttttatgttaatcaggtttaaaaaatactaagtattcctaaaaaatatacactccactcacatgtggatacttcctaaaaacaggcagtgcgtgagcactagtgaggggcattgtgactgcactgaacacttacaactgtgaggtgaataaagtttgtgctggctcctggttgcaacatatagtaacatagtgtggtactttgtcttgaggagatgtcctggactcacacggaaacttagggctacggaatgaaggtaaatttaaaataaaacaagcgggagtcacagatacaytgtctgggaaagtgaaacttaagagctttgtgagtcstgttgtaakgcttttagatgcatttatataccaacrggccaaagtcacattttttacckattagattcctgatcattcaggggttaccaagrttatgctacccactatagttaataaacaaaaagcaaactggtctctattctatctcatgcactcaggcacaacttttccagatttaagggggaaaaaaaaccctgtctttacacctacaatcccagggcgagctcactctctggcamcaagctccstggggtgatttttcttctagaagagtacaggaggacaggcaaggagtgggaggcagggagtccagttcagggacagggattccgggatgaaaagtgaagggagagggccagggaccttgccgagggtttctccctggtttctcagacagctcctgggccaagactcagggagacactgagacagaacgcttggcacaagagtagcggggtcagggcgaagtcccagggcctcaagcgtggctctcagggtctcaggccccacaggcggtgtatggrttggggaggccccgcgttggggattctctcctccttctcctaacctgtgtcgggtccttcttcctggatactcaccgggcggccccagttctcactcccattaggtgacaggtttttagagaagccaatcagcgtcgccgcggtyctggttctaaagtcctcgctcacccacccggactcattctccccagacgccaaggatggtggtcatggcrccccgaaccctcttcctgctrctctcgggggccctgaccctgaccgagacctgggcgggtgagtgcggggtcaggagggaaacrgcccctgcgcggaggagggaggggccsgccyggcgggggcgcaggacycggcagccgcgccgggaggagggtcgggcgggtctcaaccyctcctcgcccccaggctcccactccatgaggtatttcagcgccgccgtgtcccggcccggccgcggggagccccgcttcatcgccatgggctacgtggacgacwcgcarttcgtgcggttcgacagcgactcggcgtgtccgaggatggagccgcgggcgccgtgggtggagcaggaggggccrgagtattgggaagaggagacacggaacaccaaggcccacgcacagactgacagaatgaacctgcagaccctgcgcggctactacaaccagagcgaggccagtgagtaacyccggcccagggmgcagatcacgaccccccacctccatgccccacggacgscccgggtactcccgagtctccgggtctgggatccaccccgaggccgcgggacccgcccagaccctctacctgggagaaccccmaggcgcctttaccaaaatcccygcgggtgkgtccgggcgagggcgaggctcggtgggcggggctgaccgarggggtggggccaggttctcayaccctccagtggatgattggytgcgacctggkgtccgacggwcgcctcmtccgcgggtatgaacagtatgcctacgatggcaaggattacctcgccctgaacgaggacctgcgctcctggaccgcagcggacactgcggctcagatctccaagcgcaagtgtgargcggccaatgtggctgaacaaaggagagcctacctggagggcacgtgcgtggagtggctccacagatacctggagaacgggaaggagatgctgcagcgcgcgggtaccaggggcagtggggcgcctccctgatctcctgtagacctcycagcctggcctagcacaaggagaggaggaaaatgggaccaacacyagaatatcgccctccctctggtcctgagggagaggaatcctcctgggtttccagatcctgtaccagagagtgattctgagggyccgtcctgctctctgggacaattaagggatgaagtctctgagggagtggaggggaagacaatccctggargactgatcaggggttccctttgaccccacagcagccttggcaccaggacttttcccctcaggccttgttctctgcctcacactcaatgtgtgtgggrgtctgactccagctcctctgagtcccttggcctccactcaggtcagaaccrgaggtccctgctcccccgctcagagactagaactttccaaggaataggagattatcccaggtgcccgtgtccaggctggtgtctgggttctgtgctcccttccccaccccaggtatctggttcattcttaggatggtcacatccaggtgctgctggagtgtcccatgasagatgcaaagtgcttgarttttctgactcttcctttcagacccccccaagacacaygtgacccaccaccctgtctttgactatgaggccaccctgaggtgctgggccctgggcttctaccctgcggagatcatactgacctggcagcgggatggggaggaccagacccaggacgtggagctcgtggagaccaggcctgcaggggatggaaccttccagaagtgggcagctgtggtggtgccttctggagaggagcagagatacayrtgccatgtgcagcatgaggggctgccrgagcccctcatgctgagatggagtaaggagggagatggaggcatcatgtctgttagggaaagcaggagcctctctgaagacctttaacagggtcggtggtgaggsctgggggtcagagaccctcaccttcacctcctttcccagagcagtcttccctgcccaccatccccatcatgggtatcgttgctggyctggttgtccttgcagctgtagtcactggagctgcggtcgctgctgtgctgtggagraagaagagctcaggtaaggaaggggtgacaagtggggtctgagttttcttgtcccactgggggtttcaagccccaggtagaagtgygccctgcctggttactgggaagcaccatccacactcatgggcctacccagcctgggccctgtgtgccagcaccttctcttttgtaaagcacctgtgacaatgaaggacagatttatyaccttgatgattgtagtgatggggacctgatccyagtaatcacaggtcaggrgaaggtccctggctaaggacagaccttaggagggcagttggtcgaggacccacatctgctttccttgtttttcctgatcccgccctgrgtctgcagtcacacatttctggaaacttctcgagggtccaagaytaggaggttcctctaggacctcatggccctgccacctttctggcctctcacaggacrttttcttcccacagattgaaaaggagggagctactctcaggctgcaagtaagtatgaaggaggctgatccctgagatccttgggatcttgtgtttgggagcccatgggggagctcacccaccccacaattcctcctctggccacatctcctgtggtctctgaccaggtgctgtttttgttctactctaggcagtgacagtgcccagggctctaatgtgtctctcacggcttgtaaatgtgacaccccggggggcctgatgtgtgtgggttgttgagggvaacagbggacatagctgtgctatgaggtttctttgacttsaatgtattgagcatgtgatgggctgtttaaagtgtcacccctcactgtgactgatatgaatttgttcatgaatatttttctgtagtgtgaaacagctgccctgtgtgggactgagtggcaagtccctttgtgacttcaagaaccctgactyctctttstgcagagaccagcccacccctgtgcccaccatgaccctcttcctcatgctgaactgcattccttccccaatcacctttcctgttccagaaaaggggctgggatgtctccgtctctgtctcaaatttgtggtscactgagctataacttacttctgtattaaaattagaatctgagtrtaaatttastttttcaaattatttccaagagagattgatdggttaattaaaggagaagattcctgaaatttgagagacaaaataaatggaagacatgagaactttccacagtacacgtgtttcttgtgctgatttgttgcaggagaggagagtagatggggctgcgcccagtgggtgctcaggccaccatgaactttatgtggtcactgctcagctgggtcatctttgctgctccattgtccttggcccttcagtagaaccttgtcccaccaggacctgtgatcacatagacttggatatcacctaggrtggtccctacacbtagaagttcctgtgttatcagaagaaaaattttcagacccctacacctcttcccctccttccaggtctctttcaattgtattttccatcttttttttttttttttttttttttttttttttttttttgagatggagtctcactcaggctggagtgcagtggtgcaatctcaactcattgcaacctccacctcccgggttcaagcaattctcctgtctcagcctccctagtaactgggagtacaggcacatgccacaatacccagctaattttttgtatttttagtaaagacgggatttcaccatgttagccaggatggtcttgatctcctgaccttgtgatctgcccgcctctgcctcccaaagtgctgggattacaggtgtaagccaccatgcctggcttccccaaccttcttaaaggaagcagattctgaaacttcccgagaggagaggtcccagagtttttcattgtagtttactttctgttggaactcctcttctgctctctctcctactcttcttcctgccctgagttgtagtaatcctattgctggctccaaaccaaactcatggatttgtaaagcagagtctaatttagattcatatgtggttggataattggagccataagccttgggttatctttcctsaagagacaaatatggttgtgtgctgcagtgtgcaggaggattggtgtgggaggagggagggagggaggacacaaaagcagccctggtgagaaaagcactggtgcatttatatccacatgagataatattgttccacagcggctacaaaatgacatttggcctgagtctacattaataaagatattgcctttagaataggggggcgcactacagtaatcatccattcaagtggcatttgttgtctgctaggtatttgactgtttttgcatttagaaaacatcgttaaagtaaaaacagaaaaatttctggccttgtcgtgtrtacattctagatgcaagcttgtccaacctgcagmtctcgggatgcatgtggcccaggacagctttagaatgtgaygatttttttgcttatctgtagtggcagatatcatgaaaattatccatgcattttttttcttttttctatttttttctgctcatcagctgtcattagtgtattttttgtgtggctcaagacaattcttcttcctatgtgacccagggaagccaaaagattggacacctctgcaggcagatgatatagtataagcagagtaggaacagaaaatgcttgagttagaaggtggcaagtgctgtgtggcaggtgatcsagagggtgggctgtgggtacagggaggtggctgttgtgctgggtggtcagcatgggccttgttgcaaatgtgaccttggagtaaagatttgagggatgtgaggagttgtctacacggatgtctcagaaagttcttttcaggcagggaaaccttcagtgcagatgcactagggcaggaaattgtctgtgttcctggaaggaggaagaggccagaagtgttgaacagagagaaactgaaatgaagtcagaggtgtgcccagagcaggttgccctggagggtgtdggaaggatgttgacctttgctctgaatgacatggggagttagaggacagttttggaaagtgggacatggtaggacttatcctttgaaagcttctctctggctgctgtgctgagaacagaattgagaggtgggggactagtgaggcagtgggraaaacggtgggaaaggagtgcagtattccaggatggagacgtcgcttaccttgactggggtgtgagcaggggaaatagtgggaagtgatgggattctggatgaattcacagcacttgctaatggatttatctgtggtgtgagaaagaagaatcaaggacacccacagtattggactgagtgagcagaagggtggagctgctgtcartggagatggggagactctggcaggagcatacagaggagagggcattgcaggcatccagtggaggtgacatctacraggaatgaaggtgaggggcccagatgcctctgcagctacagattcatcatccaatcactatcctacttccaccacccctgtgtctcagagccagagcattgattctcccctgtgctgtctgcacaggtaggtgaaagtcagggaagttatggtctgctgttggttataataagtcacagattattgtgctttctcagataattaaagaaataayaagagaatttgtaactagaacacttactgagaagaccacaataatgcaaagbtttttattcatctaaagaaggcaacagaagaaaaatagttgagcaagaaagataatattagaaggcagtaaatgaaaatggacagacttaaacccaaygaggtcaacaatgacattaaacgtaatggactcagacactccaattacaagacaaatagtgcagagggataaaaataaataagtaaataaataaataaccgtaggctatttacaaaagccataatttcagtagaaggtacagaaaagttgaaagtaaaaagatagaaaagaaataccagacaaacattcatgaaagaccacatggagatgccatttagaaaaattacagcacatgagtctcctgagacatagagtacatgtagacagctcacagtgtctttttcctttttttcagagacagggtctgttgcccaggttgaaatgcaatggtgatatcagaccttactgtaacctcaaactcctgggctgaagcaattctcctgcctcagccttctgagtagctaggacgagaagcctgtgccgccacacctggctataatgtctcattttctcatttgctgtggtgtgaacaaggaaacaataycatrccatgtatttgacttgcagcaggtacacaacaaatgtcaggtgaatgaagaaataaaaccacttagtaatccaagccatatccacatttacattttacaggtgaggagcaacatcccagacaagtaaagtaaaataaattgatttacatcatccagagcagaatcgagaacacattccctgtgctaaaggaatcagaactctactaggggtcatagcagatatcatgcaagtcacatatgttaattactagaactggagttgatacattttgagatatactaaaccaagggtttggaaggattaactgaatgcagaaataaaggaagaaaatagatttgtttaaaagatggttagaatctttaaagaaacaacatctttttaaagtggccttatgtggaccaaagcagagatgagctcaaatgtcaggtgggaaaatgcttgactaaatgcagctctagacccaagggagacctaaaaatcctgggacattttcggttgtcacgtggggattggtgggagggggtgagtggggtgctgctggcaaacctcccacaatgcacaggacagaccacaagggattctctgtyycaaattcttaatagggctgctgttgagaaacccgcccgagaggtaagtgctgtaatgtcctcaccatttcacagattaagaaactgaggcaccaggaagaaaagtgtcagtaggaccagagctgaaggttgaatccaggccacctggctgcagggtcttggcttccctggttaagtcagggacccaggagcccaccacaaacaatcccagctgcgcggtgccttcatggtctgtggcgccccctggtgttgacactgggcctrtggccaaatgaggcttgagggaaaaggaaaacgggtttaggtagcgggatctccttcaggctctccagatttcaagccatgacttacactcagaaaaaataatgttcaccttaattatctccccaaccctgtttttcccagttccggccagtaccctccctcgactccatmaacatcagtacctgccagatgcccagcacccaccatgtgaggagtgaaaatgccccaggactaaaggacaagatgacgttccaccccagccatcccgcccctcctagagctctagctctgtgcmtttagtgcttaggcttttaacctggggtccgcgaacccactttcccatgacactgcgtgcagaagtgatgttacatgcacacatgacttcattacaggacattggatattaatattcatccgatcaactgggggcccaagataccactcttcccccaacagtttgtgatcctctgaattaaagaaagggcagagattgagggaggccctaactccaaatcttctaccacttctagggaagtgctgaaaagaagtgcaaggtactcaacccgctctgggratacagcaggaaagcagagtgttcatggatttcgaattccatcaaagaaatacaactttggcaaaatatccaagtcacttttctaagccccaggcagcagctcaaaacaaacaacaycaaaaacaaaacaaaatctcggcccaggtgaaatcattgaagacataaaactttgtgagacctgtatttagagcgaaggacaattcaatttagggctgcagcagaaaacccctacatcatattgggtttttcctcatcatgaagktctcctggagggaccttctcccttcagcagtgcatagtgaggccatttctgtgtaaaaagatagaatctccttggattcctgatgtttacatttactactcacttctttgactttgtagatgccaacttcacattcaacatctttcaattattttctttactttgtctaagcagagaatttaaacttgtttctgaagcagaaaaccagggactggttatttgagctatcrccccamtctgtggctctcttatgcaataagcataagagattgtgggccaacagaatttgtagcaagataaacataaacccttcatttcagcctatgtttctgtttgtctggtgatgttccagtcttgctccagtcttaacattttaaaaagtataattttacttaaatttcattttatargaagtcatatrtattcatttctgttaggtttctcagtgaaagcctcctcaaaacaactgtgaagtaaagacatgtaaataaattcatggtgctcccatgtattcrtgctcattgcatcttacaaatgtgtcagccccactgcaacagatggtgcatcaacaaatggtgctggaaacctggatatccacatgcaaaagaatgatgctggacaaaatttatgcccttccattacacccttttcaaaaattaagtcagaatgccttaaagaactaatcttaagagttaaacctgtaaaactcttaaaagaaaatactgagggaaagtcttatggtcattagaattggtagtsgtttcttggctggtgaccaaaagtacaagcaataaaaggaaaatgacaaataagacttcatcaaaatgtaaaaacttttttgcatcaaaggacgctattaagaggtgaaaagaggctaggcgcagtggctcacgcctgtaatcccagcactttgggaggccaaagtgggtggatcacctgaggtcaggagttcgaaatcagcctggccaacatggcaaaaccctgtctctactaaaaatacaaaaattagccgggcgcagtggtgggcacctgtaatcccagctactcgggaggctgaggcaggagaatcgcttgaacctgggaggcagaggttgcaatgagctgagattgcaccattgcactccagcyggggcatcagagagagactcygtctcaaaaaaaaaaaaaaaaaaamaaaaraaagtraaaataaaagaaactgcatagaataagataaaatatttgccaatcacatatctgataaagaattaatatccagactacatacagaactacaacttaacaatagcaaaacaatctcattcaaaaatgggtaaaagacatgaatagacaattctccagagaagatacacagtaaggacataaaaataaggaattccaataaggacatgaaaatatgctcagcttcactagtccaggtgttggtgaggatgtggagaaaatggaatgcttgtgcactgctgctgagagtgaacaacagtgcagccaycatggaaacaggatgaygctttctcaagaaggtaaacatagaatttccayatgaagcaacaattccacttttgggtgtataccccccaaaaattgaaagcaggtatgcacacagataattgtacagtcatgctcatagcagtgctattcccaatagccaaaaggtggacgcaacccaagtgtccatcagaggatgattggaaaaacaaaatgtggtgcatatacacatggaatattaatcagccttaaaagtgaagaatatttggattggatggaaccttgaaaacacgctaaataaaataagccaraaaaaagrcaaatatgatatttcwcttatatgaggcacctagaataagcaaattcacaaaaacagaaagtagaatacaggttaccaggggctgarggcaggaacaatgggcagctgtcatttaatgggtacagtctctgttgggatgatgaaaatgttctgaaaatgcatgttggtgtttgtgtaaccaccatcaattgtaaatgtgcttaatgccaatgaattgtacactgaaaaaaattkttagaaggtaaatcgtatagtatgtgtgttttaccacaatttwaaaaatatatatcaacaccaaatccaatcacttytcactcctctgccacctccaccccagaaccatcmtcactaggatagaaaaccggaagggccttccagctgggctgcctgctgwctctcatgcccactgtccatcacccacacaacagagagagcgtgcctttccaatgggaattagrgcatatcctatgaacgctccagctccttcccttcttaggcacaaggaaaccccagtttcccaccatttcctatgcactccttatcacagggtcccctctggccactttggcctcatcccattactctcagcctagctcaytcttctccactcacaccagtttcttgtctactccaccctgtctcyaccacctgcccctgytgtgactcccacatgcatgtgctgcccagtgatccacatggctcactcctcacaccattaaggtccctgctyaaatgtcccatggtcaagtgttcagaaatgtcttgtccagtgacctcttctgaaatctatcccctgccattcccaccacygccaccaatcttctaacccaagcatatttttcttaatggcaattatcagtgatactrtgacaggttttatttgtttattgtctgttgatttattaaggttaccaagaaagaaagaaccaatagcataggtacatagatgatagatagataatagatagatagatgatagwtgatagatagakgwtagatgatgatagatagatagatagatagatagatagatagatagacagacagatagatagataggtgatttattgggctaattggctcacacaattatggaggctgagaagtcccatgatagactgtctggaagctggagaactagaaaagccagtagygtggctcagtccaaagtcaaagccctgaggacccagaatacagaacaggaggataaaggggctcactggtgcaaaagtcagagtccaaagatcatcgaacctggagttttgatgtccaaggcaggagaagaagggtgtcccagccccagttccagagagagagwcagagacagagagagacagagagacagagacagagagaaattttacttctatctacctttctgttctatctgggccactaggtgattggactgtggctgcccacagtgagagagsatcttccccaccagtccacccactcacatcccttccagaaaaactctcacagacactggtttaatacttacaatttgagtagtctataatttatttttttgagaytgggcttgctggctggagtgcagtgttgttcatggctcactgcagcctgaatcttccaggcttaagcaaccctcccacctcagacacccaagtagctgggactacaggcatgtgccaccaagcccrgctaattcttttgaattttttstagagacagggtttctctatgttgcctaggctggtcacaaactcaggggctcaagcaatctgccagcctgagcctcccaaagtgctggaagtacaggcatgagccaccatgtccrtcctgagtgttctatgaatttttaaaatcacaaccatagaagaatcttcatgtacaaacatgcttgtcaaaatattctttaccaaaagacaagatgaaagcacatggatctaaaagaaccctgstgacttctccttgtttgagatgggatgcagcttctagaagtgtgtaaattttatgcagactttatgacatggaaaactactttcataataatacattcaaaaagcaacttcaaaataacccacaaccactctgggaggccaaggtgggtggatcacttgaggtcaggtgttcaaaaccagcctggccaacaagtgtaaccccatctatattaaaaacacaaaattagccaggcgtggtagtgcacatctgtaatcccagctactcgaggggctgaggcagaagactcacttkcatccgagatgcagaggttgcagtgagccgagatcatgccactgcactccagcccctgggggacagagtgagactccatcttaaaaaaaaccccaaaacttatgaatgcaactttctacaatgaaagcatatataaaaatatatacatagaaaacaaaagaatggaartcagcaycactgcagaagatagctccagggatgaccattcacactgcagtccaggaagtttcaataataygatagcagtggttctttggaggggaagcctgggtgatatttctttcttctctgcatttttttttctttaaaattcaaccasgtgttgatrtgtgcattttaaattcttstgtaatcaaatacattttcatatttctartgtagaaacatgtatttttaacattcaaaataaaacatttgaagtaaaataacaatgaaaagtggctgaacactgtggtgggcacctgtagtcccagctactcaggaggctgagataggagaatggctcgagctcacraatttgaggctatggtcacacctgtgaatagtcactgctctccagcctggagawcatagtgagacctcatatttaaaataataataataaaaagaagttcagatctccttccaatctcaacctaaaacaaatttctcatttgaagtccatatggcagaaatgcctactgatggctcctccagagagtaaaaaaaatattgttcctctacaatccatgactcatccttctgttacagtgttcacctgggcaatgaagtcaacactragaatatcatcaatttatggaatactgattatctcttttatagatatataaattataattatgtatatatayattatattataatatatataattaccatcacacctgagagagtgagatggattcttttcttccacagatgaaaatctgagtccctgagaacctagggktttggtatgggttcactgaaaatgttggccttgagaattaggaaacagcttcctgcaggcctgcctggatgtgagccacaccartggagtctccrcaacagcaggaagagcaactgagaaccctggaagcttcayacttgyaatgttccatgtccagcggcattcagttgatggatgggccaagataagaatacagctccttccttcaattgggggtggcagaggggtgaatcagtcagctacacataatgtgtgtggtgtttctacagatatctttaattaytctgctgagaactccacctcaaatgtacaaaaastctgtactcactggtaagcaggatcctttttaggaaagcaaaggactttgctgacttaagcaaaacattttctctccaaatgaattatcctgattggataatctcttactcccactgaaattagccccagagttgyatttgagcatttgggtcaaagacagaaagtcattttgagggttgggcctggctgatcttggacaatgttctgaaagagggctttctacttgcagaagaacaaaggtktgctctgggtaggagatgatgtcctgagaagaaaagacagataggcagattctcaagcaaactcaggagtttactatacaaaagattttggaataycttcctcagcctckttttcattgtggtaaaatacacataaacacaaaggataccaccgtaaccatttaaagtgcacaatgcagtgacaattygtatgttcacaatgttatgtaaccatcatcactctctagttccagagtgtttttatcacctcagggggaactctgcacccattaagcagtcaccctccatttccacctgccagcagaccctgtcgycacaaatccacttctttctctatcgacttgcctcttatgaatatttcacaaaaatgggctcataagttayktagcctcctgtgactggcttccttcacttgtcttgttttcaagattcagcaatgttttagcatatrccagtgctttattcattttatgaccaaataatattctattgtaggaaaaaactatatgttgtttctccattcattggtcgatggacattttcttttaaatcaaataggaaaaacaagagaggaattacaaatatatatakgtgtgtgtgtatatatatatgtcttgtagggttgagachatctcagtcagctttttttaacctgtgaatgtcdtgatttctccatcatttctgaaggagagttttgcagacatacaattcttggttgatagtccttttactttctcagctttaaatttgtcatcccaaygcctcctgaaccccatggtttctgatgaaaatttgtatgttaatcttattgaggatccattgtacctgaaaagttccttctctgttattgctttcaagatggtctgtttgtcattggtgtagactggttgattataacgtctctcagtgtggacttytaaaattcttgctgcttaaaatgtatcaagtttgttggatgagtaaaattatatttttcatcaaatttaggagatttgaagttattattcctccaaatagccattcttctttttctctctcctttctttgaggattcccaaaatgcatatgcttggtgttgtctcacagttttcwtaagttctgttcatttttcttcataatttttttttayttctgcacctcaaactggataatttcaattgtcttacctttaagcttgccgattcttcattctgcatagtgaaagttgcttttgtaaaaaagtaaatagtaaatttactctagtaaaatatagtaaaaaatagtaaaattactctagtaaatttttcatttcagttattgcacttttcagctccaaaatttctayttggtttctttttaaactttctrtctttttattgatgttctctatttgagttaagatagttcttctgatttcctttagttttttgcccatagtttcctttagctctgtgaacatatttaagcagtcaattcaaagttgtttgtccagtaagtatgttcaatggcctttctcaggaacagtttctgtcaattsctcttttttcttgagaatgggtcttacygtctagtttaattgcatacctcatttttattttgaatactaacatgtggtgactttgaaaatcatgttttctaaactatttttgtatagactgtattctttattgtgtgtcatcactgaagtctctattctgtaagcttagtggtcaactcatgatttgatagatatttcctgaaacatcttcagccaaaaagaaataagaaaaraaaattcaatctttttatctgggctctctgtgtgttttggggcatgccctcaacactctgctgggcagtttacaatmctgctttggccttcatttcctacttgtgcagatattgaaagttagcaagaggtgtgaacacagggcattctcaggtgctttgtgagtctgtgcgacatactggtcatgvaggaggctatacagattcccagggatatggaagcttttcaaaacccatattcccatctcactcacccagtttctcctccaggcttttctgtatgtctattaccttyctcatgtaatatatttttgccccaagggggcagctgctggttcagtggcacttaaatggttttagcagatgccctctgcctctgtgacctaagagagttctgagtagggaaaataaatgcaaaccatttattttctttttctttcttttttttctttttttagacaaggtcttgctctgaagcccaagctggagtgcagttgcacgatcctggctcactgtagcctcaacctcctgggcttaagcaatcctcccacctcagcctcttgagtagctgagactacaggcacatgccataatgcccagttaatttttgtattttttgtagaaatggagtttcaccatgttgtctaggctggtctcaaactcctgaactcaagaaatgcacccagctgagcttcccaaagtgctgtgattacaggcatgagtcaccatgcccagcccaatgtaagccatttcttatcatccttcacggagtcacccaacaggaaaaggtagacaaccacaacacttygagaacatggtccactcggctcccactggcattggagcccacactaaggaaccaggctgctgtcttcaagatcactactgacttgaacagggaggaatgggccaagggtaagatatgktgccacaaagctctgctcctgagttccagttgatttttctggacttgctaggttgcaataaacctttgatgatttttcagggttccaatgcagttgattctttatcaacccaatcagaatatctggtggtaggtccaggaattcttgctttaacagctctcygagggaatttttttttttttttttttgatggagttttgctcttgttgcccagggtggagtgcaatggcatgatcccggctaactgcaacmtctgcctcccgggttcaagcgattctccttcctcacytcccgagtagctgggactacaggcgcgagccaccacacccagctaattttgtatatttagtagagactgggattctccatgttgatcagtctggtctcgaactcctgacctcaggtgatccccccacctcggcctcccaaagtgctgggattacaggcatgagccaccatgcccagccaagggatttttttttatagtgatgttttacaagcacattgtctctgtgcagaggtggcccttggagttcctatgccactatgttctctgatgtcactcctcagccacctttgaattgtgyttatgcatcagaattcctgatctgctaagtacttccaggaaactcattcawatggtaaacatcattaagcacctaccttattctgggtactgtgctctatggagttgagcctcagataaaagamtcaaacttccttggacttcatagaagtcaaaggtgggggtgggaagataaataaagaaattatarcacagcatgttatgtattttacatgacttttttctttgaaagctacattattaatattttatgacagtactgagttacatataccaaagattacaaattaaaatttmtgctttctttctctcttttgttcttacatatttctctgttcttgtagatattttgarattgggtattatggagacagtgcaacrgtttcatttatatgataatgttttgttttacctttattcatcaaagagagatttgtcagctgcaaatttctagtttgacattggttttctctcagatctttgatgattatgttgcttctggctgctgtggctgacagggratagtcagttacattttaaccagttgcttcttagaggatctgtgtttctcctgtggcaaattttaagatatctgtttctctttaacatcttctgttccagtgcagtatgagtaaatgtggatctctttttattcacagtgctatgatactgttaggtatgagttctaaatttctcttaaaataattaacatgtcagtatgttcaattctttgccctctacttttaaacttaacttcctcataaagcaaccttttttgatcacctgttccaccctgactcatcctgattacttgctccagcctgactcattctggttacctgctccaccctgactcattccagtcacctgctccaccctgactcattctgattacctgctccaccctgaytcatcctgattacttgycccagcctgactcattccagttacctgcwccaccctgactcattctgatcacctgtttcactctctttaaattagccaatctgaattagtttagcctgtgcggtctaaccctagccaataggggaataacacagcagcaggggccacrtgcatcagggataagaaccccttccccttccttgtccaggggtgygctcaccattgctccatctgtgagggcacacccttgtatagaagtaattgccttgctgagaagaaaaaaagaaaattttatatttgagtgctatttctttgtggcatcragactttatttacaataatacatttccttaatattttaagataacctctttctggaatgcctctttccatttactcacttctcttcttctaggaatttaattagagaagaattaaattaaacctcattcaaccaccatatacactgtggaatccaaaataatggcctcacacatatgtccaagccctaagacgcagaccatttagatatgttactttacacagcaaaagggactttgctgatatgattaagagcatggacctttagatgtggagattattttgtattatttgagtggccccaatctgattgcatgatttctttaacctggagatgactggagaaatatgggtcagatggagtgctgaatttcatctagaataatttcttaatctagtaaaataacatcatctctgttttttattctttaattaagtggcaaaatgcattaaaaggtttaaagtttaaatatccttgcattcttgggctatataccttggtcaagacagtctgtttataacacattggttaatacagtctactaatatttttcttagaattttcacatctaattaattaaaagtgattttcctataataggtaaatagtagaagggggtaagtctcttattttacaaattattcaaataatacatgaaaagaaatggaagactgagactacaactctttgccatccgtaatgaatgaacagatctagccactgaacagcaatgacaattttcatcaccaaagggaaataaccagtattaaactcttccccttgttgaaaaacatgatatagtaccaccaaaactcacggggaaaaaaatctgaatagatgcaaacctctataccaaactacaaatttctagaaaatgcaggtaatagagatgcatattaaaccatagtttggggtgcaatccacaaaatacaaacaacaggaaactctaccagacaatattaatttcaaagggataacctatagaacaaataagaacaaaaaacttatttttaaaggtaaaactaaactatcatttgggatgatgaaaatataaaatagaacaaagaagtgaggaccacaaaagtcaggatgtgattgatttttatttgaaaaaataaaaatttactattgaactgggtcaattgatggggcttctaggtcagctgacaaacttctctctctttctgatggttaaagagtgtttactgttgattaaaggtcaccattttaagattttttttcttttatgtcacctgtgttttatgacaaaaaggcgaacgcagaataaaatgagttatggggcacggttcctgttctgcacaaagcctcctccccatcctcctctctggacactgagcacccagaacaaccggcagccccaggacccctggcagggctgtctcattactgagtgtgcatccagctccacggttcctgttctgcacaaagcctcctccccatcctcctctctggacactgagcacccagaacaaccggcagccccaggacccctggcagggctgtctcattactgagtgtgcatccagctccacggttcctgttctgcacaaagcctcctccccatcctcctctctggacactgagcacccagaacaaccggcagccccaggacccctggcaaggctgtctcattactgagtgtgcatccagctccacggttcctgttctgcacaaagcctcctccccatcctcctctctggacactgagcacccagaacaaccggcagccccaggacccctggcagggctgtctcattactgagtgtgcatccagctccacggttcctgttctgcacaaagcctcctccccatcctcctctctggacactgagcacccagaacaaccggcagccccaggacccctggcaaggctgtctcattactgagtgtgcattcagctccacgtcgctggagacaatgtccacagtttattttttgagtcctggatgaacctgacaggacatagctgaggggaagcctggcccagtctgcaggctttggccatcagtgcagagggaggaggtcctcatctctccactggagcagttacaaccagagcctcctctctgcgtgggagtgaggctcggtccttcccctgaacacggtgacagggatctctccacaggtagagatgacaccattcctcctgtaacatggtccaatctcacgcttgttnnnnnnnnnnnnnnnnnnnntgacaaacttctctctctttctgatggttaaagagtgtttactgttgattaaaggtcaccattttaagattttttttcttttatgtcacctgtgttttatgacaaaaaggcgaacgcagaataaaatgagttatggggcacggttcctgttctgcacaaagcctcctccccatcctcctctctggacactgagcacccagaacaaccggcagccccaggacccctggcagggctgtctcattactgagtgtgcatccagctccacggttcctgttctgcacaaagcctcctccccatcctyctctctggacactgagcacccagaacaaccggcagccccaggacccctggcaaggctgtctcattactgagtgtgcattcagctccacgtcgctggagacaatgtccacagtttatttcttgagtcctggatgaacctgacaggacatagctgaggggaagcctggcccagtctgcaggctttggccatcagtgyagagggaggaggtcctcatctctccactggagcagttacaaccagagcctcctctctgcgtgggagtgaggctcggtccttcccctgaacacggtgacagggatctctccacaggtagagatgacaccattcctcctgtaacatggtccaatctcacgcttgttctgctttacaagaaagttgacccacgctggtgtcccctgaagaaatcacaggcacagaggagggacaggtggatttcagggctgtgcttgatctgggaaaggaagaktgcagaccgccaggtggcgccgctgmactgcttctgcgcccaggaggtgcctgctggggctgagattgaaggtggggagaaggatgtcacagctcatcgcacaggttcccggtaaaaatcctcctgcccagcctagcgggctctcccttaatcaactgtagcgaaaactgtctccttctcacgttcctggaaggtgctttttgacacaagaaagaggatgtgaytgctagggtcatcatgtcattgtttattgtgttgccagtaaagtgaaatcaaaatacacaataaataataaaayaacccatgataagccaatgtttataatgtactaacaccactgagccagtgtttataatgtactgacacactccaagtgtgggcacagckgcagacatgccttgtctcttgggtcaggacacagggtagagtgaaatggraagaaatcccagtcactgcagaaaagggcccccatggaagaggcctggcagggaggccagctgtcccagggccgccatatttagggatgactccccctttctgggcagcactggtttttttaattatttttgcattcacagtagttctgaaattgcaggatgctgagacccagcactggtcagttacaccgtctcttcttcaccattaaatactgtgccaaacagcaccttcatacatttccatcctcttccaggagagaatcaaaacaacaatggacacattgatgcatgcaaaaatactttaaatatgtgctatcagaagtagctactaaaacattaattccactgaaatgagggaggctgtaaaaaagaaaaacattgcataccygtattcacagcaacattactcaccatagccaagacaaggaagcaaacaaagcacccatcaacacatgaatagatgaagaacatgtggtctatgtaggcaatggaatatgattcaaccttaaaaagaaggaaattctgttacatgctgcaacatggatgaacctggagaacaatgctaagtgtaataagccaatcacaaggaaattccaatactgcgcaattcgttatatgcggcgtctaaactcttagaacctgaaagtagaatggcggctgccagtggttaggctggggggattcwtgaggagattttcagcgtagagtttcagttttgcaagatgaaaagttctagagatctgttgcataacaatgtgctacagttcatattatagtactctatacttaaaaattgttacgataccaaattttatataatatrgattttggcgcaatgaaaaaaataattagctctgataccaacttaggaaaagagcacatgaatttattgaaaatatattagcatgtgcttactatgaaaaagagatgcagaaaactgtgagacaaaaagagagayccttgctaccccagctattatccatgaaccagcagaaccagcatctcatgaaactggacagaaaggctcacaggcccagccttgacaggttgatcagtctgcatttgtcaggaccccaggtggctccactgcatgtaaagcaccgccccagatggtggtggagggagatcctaggaaggtgactctgtcccacaggtagaagcctccagtccagatgggagcagccagaagggcccargagggacatttccaagaaagtaaaattaatagaaagttcaaagtctctaatttcttaacagagtcacagaaatggaacagatatcaaagttaaattaatgagagttatctagaacataaacaaaaacaaaggcaagtattaacttgaggaagaacaaatactacgaagcaagtgaaaagtagtcaagttgacatatgagaagatgagtcacggaaaaaaacaaggagtggctgaattaaacataattactatataaatatactgggaaaaggaaagaacgggaagagtgaaagagaacaagtgatggatgtggtgacgtcgcgttctcccgggcggggccggaggcggtacagatgagggacacattcatggctaacrggacsgctcttctcgttctgcgttctgcttgcggycggtagtctctcctccccgcccatgggcggtggttggaggcaggggtgcggaatccggccgacctcgctgtcctcgccctctaccttgtggcrtcggtggggttggggagatgagttctccgacgcagyaggcacccctgctcatctcctatggctgttgccttttgggcagcccctcttcgcggcggtggggctgtcscgccggcctgtcacgttgcccttccctgggcttgtgaggattggctccgcttggacctttgcggtgctcccggagccctccaggttgtccctccggtgccggaggccaagcggtggtgtccttcctgttcccagcgccccctcctcctgtcgctgctgcagtgcctgtgtgtgggtcctgaggggttttggggaggtagaatatttttatttatttaaataaattaaaaaataagaaaaaaatacaaaaagaaagagaacaagtaatcttaactattgattccaccatcgtgcagtgcaatagtcaatggctgcaactgaaaaatcaagcaatgttaayaaagaaatggtgctttggtgcttagatatgtgaaagtaaagtcaaaagaatcagctgaaacttgaaagtggttgctccctagaaaggcagaaayagagaagagaggactctccctagaaaggcagagaagactcrtttttctcagraagtcctgcrcaaatatttactctttcmattatgtgcaattgtaacttcgaataaaataaaaacaaaagcttcagttaacatgcaagtttatgcctaatgacaactttgtttaacaatgataaarggctaaccaaaatataaaaacacttaracataaaacagcatgtataaatgtgtatgtgacatcaaccctgaatacaaacttgaaagaatatgtctataaacaactctggatagatagcccatgaatgaattccccactccagcatctttactggttgtcctgtgagcctaggcagggaggggaccaggacctgactagggtccctaatactcttgcttccaggcaagtcctgcatrcactcctgctgcaccragggctcccatccctgccttggtctgtttcataggtgctcccctaactctctgccaccactgccttacctgggtggagctgaggccgccctgaccaagaagagcrccasccatctatgtgccccaaaaccagaaagtcaaaagaaaccttgcaacagggtcaggaactatcccacctccccacctccgaatcagtctgaactgatggcgggagatgctgatgcttgctttaytcatcctcattcmctgtgcatttatttttcactaattcagtccacatctcctagaagcagactgacccctacccttcataatcaggaaaccccagagcactttttatcccctccagaatataacacttcagctctgcatcatcacatgarggctccaactctgyagggcaggtgtactctcacagcttcaggccctgaacatttgcttcagatgtccccccatcccttyccagacctgtctgtgttgctctgaatctgtccttccctgagaactggcggggagatatcagggaggaggggagatttctttgtgctatgtcaaygcatctagacagarctctcattctcccttgaacctcaactctatcygttcccagacacttgaaataaaacacagaccagaaatgtctatttaraagctaaatatctatagtataaaatatgaagacagagtagaatggggtaatgcaggagagtgtgacagggcraggggacctcaacgtgccaggaaagttggtccttggctcccctggaggagccgtcaccaggacactcactcataaagctcacctgtgataatacaaytacatgacattaatgtattaaaatataataaaatcataacaaaataacaaaaataatatggcacagctgcaaacacctcatatatactaacamttttcatccacccaaccacaagaaataaatgytgttacattcccyatttcatagatgagaaagctgagccagcaagagaaaaagtgctggtgagacctgggcagggcgttcaatccaggccgcctggctgcagagtgtaggtgccctcagtagagccagtggacctgggagctgagagcagagactgaaatcccagctgtgcactgccctggtgttctgtctgagtcaggtgttgatctgggccttgcaggctcatgtgctctggagaaaagagaraaaatagtaagtgctcccctgggtgcacagtgctgctttttactccctgacgacttctccctcctcagtcagtcccaaatcagattcaccctttctccgagggaagatgatgtctgcacttttttctccctcccatggcacttttcccagcccctgccagtcccctcccgtgactccatcaacatcarcccctgccctgtgcccaccagccaccatgmaaggaggaaaagagccccaggaccaaaggacaagacctgggaaaaacccagtgccctcccctcctctcaagcctggccagctctgacagcaggaggactccccaaagagaggctctggccctggctccatgtccttccaggactgggctgggtcacackcacagtccttctctycctcagtccccagtcccacctcacctgtagagacacctgcacacaarggcaggccctaaacactgtggttctgccctccacctgcagctcagtgctcctccacttccagccctgagcaggcagctcctaactgggaagcccattaagaatcccatcagcayggcaggcccagcatggaaacatgtagctgctatggggtctgcagctgacctgaccctgggaacccccttgctcaaggaggccctgcctaccctgacccccaggcccatgacctgcacttgggccawgcttgctccagcctggtccactcatccctggaagcacagcttctccccagggctgctgcttggggaggctgaaaggccttyctctcctgttcctagcagggattcctagcagggattccacccaagccactgccctcacagcccataggggatcttcttctccctgtggagtagaaagtttcttgagacccctcagcctgaggctgcctctgcccaccctttgcacttggggattgccactgccacagccacygtctcccacatggaccgtcctggagagggagctccacatttgagttcctgtttcatttgatatrsrttacaacattagtattggtggaaatccttttaagacccagctgaaactacgaacatctttattggacatcagcatttaaagcaggaattttgagaaattagcacataactttcwcacccctttcctggccartgccccagtaacctacaaggcaaccgttcccrcccacggggaaccagaactgacaatccctcttcaggagacaccacaggtgagagcaggagcgaccacagacctgcactgcccctgctgtgggtgcctcctggacagggccctcttgctgcagggcaggggatkaaccatcccatctgcccaggcctgaggggccaactgacagtgcaattaggttcaaggatgagaaatcaccaccccctgccagatacacagaagtggggaaatggcagaaagactcgggtttcccrgacactccaggctctcagtgtctcctgcactgtctctgtctttgcagaaacacaaaacttgctgcttgctcttttcccctcccttcaaacaacctgactgtgcgggaaatcatcctgaccatctctcactccaaactcatcaggtagtgcttattctttcaaaggtattttgtgactgtgcaagcaaatataaatgtatatgtrtatgttctttctccctttgcacacaaattttagcaaactayatatgcttttctgtaccttgctgttttcccttaccattgtatcayggagaccatcccatgaagaaatatcaagaactacactatgtctttcttttttttgttcaaaaatttcttggcaatccattgtataggcatgcattttttaaaatagagattaccctttttgaatgcaatgctttttaaccagctccctactgatagrcatttggattatttctttcagagaacaatttgacatcatgtagcatcatatgggaagggtgcagtgaccccactcctacatgcatatcctaggggagctcacatattcttggaaccagaaarcaatgtcccagcatgttcattgcagcagtgtctttaataaagactatgtagaggtcaatgaagtggggaagagataaattgtagcatattcctcccatggaatactatctagcaatgaaaacaaatgaactatttgtgtgaacattgatccmtctcatagaccatgttaacggaaaaagcaagcaaatgcataacaaaatcagcaagaaacaatttataaaaagtctaaaagtaaagccaggcaagggggcctatacccrtaatcctagcatcttgggaggccaaggtgggcagattgcttgaccccagrcgttccagacaagtctgggaaacatgataaatccctttctctacaaaaawtacagaaattagccaggcatggtggcgygaacctctartcccagctactcaagaggcctagaagggaggaattgcttaagcctggcaggtagaggctgaagtgagttgtgtttgtgccactgcatttcagtccaggtgacaaagtgaaaccatgttaaaaacaaacaaacaaacaaacaaaaacaagagactttttaaaacttagtaagaatataggggcatacagcaaattcaagacacacattcaccaacagttcttgctttgctcagtacagtattgactgaaacacatgcataacagaactgtggaaaatcagggctatctacacgtgtttctgttattttctatgtatactacatacagccaataatattaaaatgtcacaaattgacaaacctggrtggcagcttcacaaagatttcttataattctctattttttcttctagctagaactaccttataataaaatttgtgaagtgaatccacagaaattgagcaaaataaaaaggagtcgttgagtgtgaggaaagctrcaragaagtaaagacaggtggagacatgacaatactgagcatgttagtgaccttcacagtaactgacttcctggaggagtgtgagcttaagccagaatgaagtgatagaccgtgaaagacggatgaaggagtagsagcttctggaggcaaacatggtrtgtggttggctggattgggatatgtggagggactctgaacattctgctttaggtccagcactagagaaagaggactcatctttatttagcaccttccacaatctgtagagaaatctgaaacattgcaaaagaagatatatgaatggccagttcagggaaaaatgcaaagtaaaaccacagtgagaaaccactaagcaaccattagaatggctaaaattaaaatgattaataactataaatgctagcaaggawgtggaacaatctgtactctcctccattgcctatargaatataaaacatccattttgaaaatcaatttcatatcatctaataaagttaaacaagctagtcctctacagctaccatttccactcctaggtatatactcaagagaaatgaagattttgtcrataatccctgcataaaaatgttcatagtttctttatttataatagtaaaaaayaagaaataactgccaatktacaaaaatcatgattcartcatacaatggaatattatcagcaatgaaaatgaaagaactactgatacgtgcaccaacatggrttgatcacataggtattacaacaagcgcaaaaagccagatacaagggaggccatatgggatgagtagatttgtatgaagttttaaaacaggaagaactgtgctatcctgatagccgtcagatcaatggctgctggaggcatggaagctgagttgaagggagaaaaagggatctttgtgtacattgatagtggcaagagtaatatgctgcatttgtcaaaattcattgataaatttgatgaagatctgattattttggtatatgtacattttataagtttaaaaatcttataataaaaatcataatgttgctgataaaaataataattaaaaatattagcaacaaaatccaacagtataccaaaagaataatacaccatgatatgtccatatatggcaaacacagagctaacattatactgaatagggacaagcttatagcctctcctccaagatctggaagaaggctaagactcccactttcatcacttttattctacacagcactagaagtcctagcaagagcaatcagccaagaggaggaaataaagggcatccaaattggaaaggagaaagccaacttagccttattcgcaaatggcataatcttttactcagaaaaaactaaatattggccgggtgcggtggctcacgcctgtaatcccagcactttgggaggccaaggcaggcggatcacgaggtcaggagatcgagaccatcctggctaaaattgtgaaaccccgtctctactaaaaatacaaaaaaaaaaaaaaaaaaaaaaaattagctggtcgtggtggcgggcgcctgtagtcccagctactcaggaggctgagacaggagaatggcgtgaacccaggaggtggagcttgcagtgagccgagatcgcgccactgcactccagcctggatgacagagcgagactccatctcaaaaaaagaaaaaaaaagaaagaaagaaaaatctaaatattccaccaaataaatggtgagaactaataagcaaattcagtaaaattacaggatacaaaatcaatgtgcaaactttcagagcatttatatatacaagcaccatataatctgaagaagaaatcaagaaagcaaaactatttacaaatcataaagaggataaaataactaagaatcaatttaccccaggaagtaaaacaaaaactataaggcactgatgaaggaaattgaagagtacacaaaactggaagagccaggcvcagtggcacatacctgtaatcctggcactttgggatgatgagacaggagaattgtttgagcctgggagttcaagactagcctgggaaacatagtgagaccttgtctctaagaaaaaaaataaaacacayaaattgggagaattaatattgttaaatattaatttwaaaaatgadacacataaatttcatgcacataaattgggagaatattgttaaaatgttcatactacccaaagcaatttacagattcaattcaatccctatcaaaataccaatatcattattcacagaaatagaaaaaatcgtgaaattcatatggaatcgtaaaatatcccaaatagccaaagcaatcmtgagcaagaagaacaaagctagaggyatcacacttmctgaattcagkatacaatataaagttatagtaaccaaatcagcatggtgctmgcataaaaacagacvcatagactaatggaatacaaaagagaactcacaataaatccatgcattgatagccaactcatttttggtaaaggaactgagaatatacaatggagaaagaacaaaagcaacaatggagaataaatggagctgggaaaatgctaccagatgcagaagaataccactagaaccgtctcycaccatatacagaaatcaactcaaaatggattaaagatttaaatgtaagtcccaaaactataaaactactagaagaatgcttacaggaaacactccagacatgggtctvggcaaagactttatggctaagacctcaaaagcacaggcaacaaaaataaaatagacaagtgggactatattaaactaaatagcttcagcacagcaaatgaaacaatcaacagaatgaagaggcaacctgttgaatagagaaaatatttgctatgtattcatccavcaaggaactaacatctagaatatacaaggaacttaaaaaactcagcagtaaaaayacaaataatccaattaaaaaatggayaaagtgtctgaatagatgtttctcaaaaggagacatacaaatggtcaacaggtatacgaaaaacactcaaccttattaaatatcaggaaaatgcaaatcaaaactataatgaaatatcatcttatcctatttagaatggctactaataggaaataaaaaataatggatagtggtgagcatgtggagaaatgggaactgttgtacactcttgggaaagtaagtacagcaattatggaaatcagtataatgatttctcaaaaaacaaaaaatagaactactattggatccaacaactccactcatgggtatttatataaaggaaaagaaatcaatatatcaaaagactacctgcacccccaggtttattgaagcactattcacagtagcgaagttatbaaatcaatgggtgaattcatcaatgggtgaatgaataaatggtggtatatatatacacaatggaatgcaattcagccataaaaaagaatgaaatcctgtcagttgcagaaacatggatgtaaccaaaggtcattacgttaggtgaaataagccaagcaaggaaagacaaataccacatgttgtcactaatatgtgcgagccaaaaaggttaatcttagggaggtagagagagtagaawgacagttcccagaaactgggaagaatgtaggggtgggaaaatatagagatgcaggttaatggatgcaaatgtccaattatatavagaaaataagttctaatgtttgatagcacagcagactgactaaagttaacaaaaatgtatatttcaaaatagctataagagtggatttggctgggcrtggtggctcatgcctgtgatcccagcactttgggaggccgaggagggtggatcaygaggtcaggagatcgagaccatcctggctaacatggtgaaaccccgtctctactaaaaatacaaaaaaaaaaaaaaaaattagccgggcgtggtggtgggtgcctgtagtcccagctactcgggaggctgaggcaggagaatggtgtgaacccgggaggcgaagcttgcagtgagccgagatcgtgccactgcactccagtctgggtgatggtgtgagactccatctcaaaaaacaaaacaaaacaaaaaagagtgaatttaaaatgttctcaacagaaagaaatgataaatgcttgaggtcatggataccctaaatatcttgactgatacacacattctatgcatgtatcaaaatgtcacatgtatccyataaatatgtacaaatattatgtaycaattttaaaaaatttaaaaaataaacmacacaatatggggcatttaaaaaggtacaaaaattatgagcatgataaaaatttggcaaatattttcctttttattaagatctttttcattccataagtttaaggagaataaagcccataaagcatcagaagaagttgctctcctgaaagagactcttctgctcagttaaaaagacagaaacagaatcactggagtgagtaggactttggabaactgcacagcaccatgtcttagtgtctgggattacacagacttagggaggaggcctcaccttccgggaagaactaaactttggttctctttcttgttttttctattgcaagaccaaaattttagaaaaccaagagaaagatttcagccaaagggwtgtactgtctattactctcttttattttttagaayatccattgtcaaagacgatccagactgttacaagaggaattgtgttcctacgccaccaaaatccacatgttgaagccctatgttgagaaggcagaagaagtggccatctacaagcaaaggaaagaggcctcagaagagatcaaccctgcagcaccttgaccttgcacytgtggcctctggaactgtgagacaacacatatttattatttaagtcacccagcctttggtactttgttatggcagccctagcaaattaaaacagvaatattaccttttctaccttgtcctatgtatgaacatgagatttttttaggagtatgaattacctgagatttcaaaagatagagtgaggcaattgaaaatagatgatatagggtcatttccaagcctctgagtgtcccctggccaccacagaaaaatgaagatgttcccattccctttcagtttcacacaaagcaaaagttgtagacctaaactgacatagaatcgccaactgcattaatttatttgagataatgagggagctagttttgcccaaatttcacagaaagacgatgaacaagtagtaagctaaagaggcttcttttgcaggggattgcaggtattatatgtttttctcctacttttaagatacattttcctaaaadgttttgtctaggagtaaatgtcatcactttgytttttttcctcccaattgaatcactkgttcctccctgcatttcagtaatgttgctagcatggaggtgtttgtccatgattcacagatgattcaaagagcagagagcttctcctgaggtcacacagcacgtaagcggtggaacaatggcaggcacdtgactctctaggcccctagtccagttttctgggttctrtgagaattvtagcccttggtttctgttacatgtggttctcttttgagccagagaaggaggacgcacagtgagaagaaagtgccdgagccccaagtcctggcttagatttactgggctggggcatggagasagaggctgccactgattctcttaactccagcttctattaccagtcactaagctgaaagcaggaaagtttatcttctgcacttggtccatcagaacyaagatggcagaaagccccactatctaccayggaaaagacaagggtccctcttaccttgaaccatgacccagctttctaactacatatgtttttctgcacatgtagctatttttcttctcatcaagctccagtactcacagtgcaaacacaggagatactgagcctgatgctctgatggaagctctgagttgagattttattttatacttaggtgcctctgavtcattagagttttttgcctgactccactctggccccatttcaatcaaggtctatatgctctgggacctctccaggttctcatcagaaatgaaaaaaaaaaaaaaaaaaagccatgtccagctcctgggtcctccctgatagchgtgagaggcagctcctaatgggagagagccttggggtgaccaaggcctcacagacttcattattcctggaccacatggctccagcctcctgatcacaatggatcagtggtcttagattccgctccaatatttgaagttttttgttcttcggcctcvgcaaatgctctctggttgagatgaagggaaaagacacagagacgcaaaagctgtgactgcatggaactctgtccmaggtacctcccggtgttctcttacttatgttvgccatgtcctcatgaatttagtgaaatgggcatgttgtctctgagtggaagkgaggggacacyactgggcagagctcmatcraagggtggctggtgtcctctataccatttatctacacatvttggggtttttctagcatgaaatgtcccagaggcagccaaacccgaagcttggctcctccaaggaatgagtgtgagtatcatagccctggccaatgagcactgaactctagagagaccaagagaccttctaaatattgggacactttagttctgaatcccagaagttggcttcttgcctgggaggcaggtgtcactgcatctgatccaaaaaagcagccccatagctcaagatgctcttctggatttctgcctcttcctggttcctggccaagcaaatcttcactgctttgctagcccatctataaattcaaccagacttttcaaatatgtattttcctcccatttttcyagttgtastcaatgggagaagtggtccaaatgacctaatcagcaattgctggaaaccaaagtaacagtatacaattctatgtgttaatatcatataccaagagagaaaatgtatagatatcagtagtagccatttaagcactgtaataatatctatctatatcccatgagtataatatatataaataaatgataacaagaaaataatctttatgtgtaatacdtgactatgactctgacagacaaacctgagagcatagtacgacacttatcaccttcactcatgagccagatagtgtgaaatgagaagcagagatttgaaatgtgttgcaaaactctctcaaagaaagtagagtaatatttttcgtgagcaaatcaaagcaatctcctcacaaatcacattggacttataatgtgtgggatgtgtctttattaaaatggaggtaatcctaggtatgtggtcttttttacatgaaccgtactgtcactggctcactagctgtcacttcaccaacaatcdttccatttaataaaagggagatcsccccatgggccagcatttcccaggtggaggcctcttgcagvcataatcttccaacagagaatttccctgggaacctagaaagaagagaagaggctcaagcaaaaaggatgaaagaaatagcaacaacggcggggcatggtggctcacacctgtaatcccagcactttgggaggccgragagggtggatcacctgaggtcaggagttcaagaccagactgccyaacatggggaaactccgtttctactaaaaatacaaaaaattagctgggcgtagtagcgggcgcctgtaatctcagctactctggaggctgaggcaggagaatcgcttgaactcaggaggtggaggttgcagtgagccgagatggtgccactgcactccagcatgggyaacgagagcaaaactccatctaaaaaaaaaaaaaaaaaaaaccaacagcgataatatcatacactgtcatggtgctatgtgttaatcygtgtccttagcactttcaaaatatgaattcatttaattgtcackatacawctatggggtgtgcctgctaattttccgttttcaggtgatacaataggaaagaaggtcgcctacaagtcgtggtggagctgggcttgcacgcagacaatcctgccccagggccatgctcacatctctgcactatccaraatgtgagggtgggtggagagtccagctcagggagagtgattggagagacagaataataagaagagtgggcagactggatcactctgatggttctggggcttctcttccaggagagaagaagacaaaaattatgtcaccatcaaggaaagtatccaaadtctctggcttaaacctgggcrtctccagctctgggacaggtggctgggcagggaagacaaactaagscaagggcccagctcggaagagtttcctttcctgagaattctgcaggagtttccctgacctcatggccacctctcatactttgctcttgttttttccccagggccgatgagggcgtcgtatctggtttccagtggggtctaaagacgccatcasagtgastggagattgggcttcataaagtgggagatctccaggatccttcctggaatccaagattcccagagaagccggatcccgcgtcccggaacccaactcctgctgctctatgagccctgaccttggggagamctgggctagtgaggagaggatcaagatgaactgggctggggaggcaggaggtaaagggcggcctggagagctcagcagctcctcccacggckcttctgccccggtctvgggtctgcagactcctcaggtcatatctccaagtacgccgccccacgccaccctcccgtggtccctgtccctctgtcccctccccagctccccctacaccgtaagaagctcccaggtaagcggctccagggccgggcggtaggcaggagggagcccgggaggctgggthcccgcggggaggcggagagagcgcgtcagggagacagggagcgggcggggtccctctcchgcyctcaaggtgccggttcccggggcccaggctcgcactcccgggtacttggaggccaggggagagggaggactgtggcaggtgaggcaaggagctgtctgagccgctcagcagcctccaggagtcagctctctccaggcctgtcttcactccagtgcctggtcctgcccaggcccccactcccactctgctctcaacctggccccagacaggatcccaaacaactcctgttcctaatgtgaaaaatgtttctgccgctttaggcagaacttgctttagagcactggcrcagacttccgcaggtcttgtgtctgaatttcttggcactgtgtcttttctcacttattcttctgcaaggaaggaattatatcactggttggatgagacaattggctcagatgggttcattgagcactcacccactgggmaagtgtcygtcggggccagctctgggccagatgtgcccaaggmtytatagctagttggtggaaaggcctggagggttcatattcaagtccacctgacttgaaaactcatattgaccttacttaagtactgattccccctttataatccatgccataaacttcattgtcttattttaagaaattgccacagcagcctttagcaaccaccctcttgaacagcyggyagtcatcaacattgaggcaagaccctsyccagcaaaaagattaaaattagctgaagcctcagacgaccgttagcattttttagcaatagagtaattttaaattaaggtatgtacatagttctttcatacataatgctattgtayacttamtaggctacagtagagtgtgaatataacttttatatgtactggaaaaacaaaaatttgtgtrrcttgtttgttrccatggtctgaaaccaaatctgcagtatctctgaggtaygtctgtartttccctttccctcttttgaacttgtttcttgtccttgtctggtcctgcaagctgtatgagtttgcyttctctggtaggtctggggacatkgtatcccttataaccttggttcctggcatatgacactggtaccargctctgttggactagtgaggctcccyacacacctcctgaactagagcaaaagctctgtgcacacaccgtgcatgtgtgagcctgtgaggagacggkgccttcctgcaggctgttctgaaggggtgttctgttgtgactggaggaaatagcmatgggcccctgggcagaagtggctcagaatggaatggatggccccagttttgatcatctgggaacaggaagattctcagataaaaacccatgttttagaagacaaaactgcccaagagtggacagcagctaaccagtaagctatctgggatatcactgtacactgggagggaagatggcctctgccatggtgtagggtgcctgacccagacaaggaggccttcctaggggtcagtgcttctgaagcacctttaaatgaggacaaatacctcatgttcatgattagccracttgtgcccactcagtggaaaaagaacccagaattttgcaaaattttcagagagagggattcccctcttgtctcttagtgctagggttatgcatgactcgtgcttgaattacagtgtgtacwcagctgaaagtcttaattattagaatataagaggcccaaactactgctgttacagatatgtaaaactacacagtataagtttaaacaacccacaaccaattaacagtgaagatarattaacaacctttgtaaatttaaaacaagattggcaaccctttagaaaaaaaatgagactkttgcaaracaatctaaatgatacactaataacaaacsttcatgaaaatgacatttcaaccatctgaatttctgctttaagttataaactccaaaatgaactaactccyaataatttacagtagggagctctaagccacaaataaaggtgtcaggacagacctgagacctggagtgagcacatccctcagggtcatragtcaatcctgtaagacccytcctccctcagacactccatccagtcatcaggaggtcaagaaaagttccccacagcactaagacccaaccacctcactgtcctcacctccatggacagagcccaggtgaaagccacccctgctcctcctcccgcatcycycacaggctcagcaccatcgtcggcctggagtgcacctggactgagctcatcatgctctgtccctgtttgtgtcagtcacactgggtcccccacatactctgcacttgcatccccacaaggctctgcacacctctattctgtctccccgacctccccagccacagaaatcttcccagtgcaccccctggatttctcagtccacatcagcaaaacctcctcakcctctctcaggatgttcctgcatctcrcagctccagcagcaacctgggtytccctgaggacatgaccccctccgaagtcctcccacatgggggagtttccccagggacttgtacccctgggttcagaggtgaggtggggtccttgctcctcattgtggttctcagaactttctgcctccctcctccctaaaacccctaggctgtcatcagattagagccccatttgcctcactgtaaccattccctgtgggccccaggctgttcttctcaatcctgagtcttgtagctcctggttcactgtcaccctctccagcattgctgtctccttgactcttggtgacttcaacatacgcagatgtsgtgggctgagtaatggtccccadagatgtccagtcttaatcgttggaacctgtgaacaggttgcattgcrtggcaaaagggayattactcatgtaatgaagattaaggaccttaaaatagggagattctgctggamtctctgtgtgggcccaatcaaatcacaagagcyattaaaagcagagagcctgccctggttggagtcagattctgcagaggaggaaggcagaggagaagctggagaggrgaggtcagaagttccaagcaggaggattgaatgtgccttaggcaccrtgtgtgagtatctgagagaaggctctaggagctaaggrtggctcttaacaaggaagtggaaacctcttttctatctgcaaggaagtgaattcaggcaagaacctgaatgagcttggaagtggattcttccccagagtctatggaaaggaatgcagaccttcccgtatgttgatcttagccccatgagactgggtggacttgcaatccacacgactgtgccatgatacataggtgctktttaaagccatttggtttgtggtaatttttatggcagcaatagacacccacacagcagagaagatgccctcgcttcctggcctctcagatcctggaactcctctcctccatgatcttctcctgtctgcctgaatctcatgcccttgttatcccctaggcctcatcatggctaagaaccccagcccttccatactctcwatctcacactwcccactctctgaccatctttccactcatccccttgcaaggtggccacaggctctgaggacacagatactatcattttatcatatgctgtgatgtaatatcagtggaccactcatygcatatgtgcttgctttccaygcttggagtctaccctgtagtacatcaattccaacaatcgttccaccctcctgggattcccaatccagtgatcctgccatctactcactgtccctcaccctgggtgtcctgtcctccctcctcacccattttgaattctatggtaaataatttccatccctcccttccctctcccttgarttgtcacactcacctggcaaaactacacagctggtgggttccacctckgcctatgctgagcctgcccccatgagctgcaggaggctggagagmagcacacagtacgctgactggtctcttaaaatttaggattccaaaccacataggaagtccctaccatggccagcaatcaccctctccctgcatggctcaccctcagcctcctcctggcctgggtgacycttacacacyttttctttgtgctcacacatccaacctgccttccccattcttacttcagctgatdaccttgcttcccacttcactgagaaaactgaacacattagaagacaacttcacagattccaccactgtctgctcatgcatttgcarctgcaccacatgtcaggcgttttaccatgtgasggactgttgtgggttaaccmttctgctcccagccagagccagaccctcttctggtgccccaattgccaycccttatcatctacttaaaggtgtcagttcatcaattaataccatttttatctttatygtcaacctttttcctctctccccactggatcattgtggcagtcatgagaatgcacatcccagcccctcatctagaagaagcagaattgatgatggcyccagctcttgaagtctgaaatctattgccacatttgctctgagactatgcccacccctggctttttccagccaatgattgaggaaagtagggcagaaactaaggcaggacattyctcttctgaaggctgactgaagctccagggctccctgccacccttactgaacttcccttagcctgcacasggtctaggatgcttccagctgaccttcctgcactctctacatcactgaggctcagmgttgctttgtggtccagtggctttcccagcattttctdtctcatgaatttctctcacaagtatttcccctaataaatccttacatgtttactactgtattggggtccgcttctcaggggaccctaactaacacaagtggcatgaagggtsatccatgaaaacaggcaaaaatgggaatttgaaataagcttcccactgcctggcaggccwagaggatgccacccgggttggtggcagacacagaaagtccatggcacaaggtgcagctgagcagctgggggtctcaccagtgctgagctgagaagttgccttggttagggagtgctatggcasatgcagtgatagaatgccctgcataataaggacagggttggaagaaacctacaaagacagtggctttggctrgttactkctcrgctgcatcgatgctgtgtaaaaagataatgagaatctgyggattgttgacagctatgactggctacatttgacaccctcggcagtgtctcatggacaggtcttyatctcctgtagcaaaagggcagatagcaaggaatgttagctctacatcactatgagggccacagtgctccagagatgtttgacactcagccaaggcaggcctgttacaggaaagtcagggctttggtggggaaacctgagattctgcaaactggaacaggattatgcgatgcdtgccctccaggatcttctgggcatgcagaggaggctcacccttctctagtaatggttcccactttcactgctggaagatgctacacaatcctcacccctatgatgccgcgvgaatcccactcaggaggtttgcaggaactagccagcacgtccccataggagcccagggactacttctgggattggaatttgagggtgtttgatcaaggaaccagaatttcaggctggatgaatataatcctttggcttgaagacactttctcagggcatggatttatcaaacactccaggactttgataagtggartaaacccactgctgggrtgtatccacatagtctagaaaaaaacatgcccaactctcaacaaggtagacatgtcttagttgccctggaacatgtagagratggaataacaagctgaggggagtgggcttggtgaaggcctaccaaaaccatgctcyacaagagggcccagaggacacacmttccaccagagcctcaggaacttgatggtgagagggacctgcatcactaagaagtgwcrgggtattgtcctttgtaggctgggggtgatggtagtaaagatagtcccagagtttcatttctaatatyactggggagagtgtggccctgaagagacaaagaccaagtggtggcagtgacttgcaaaagccagagggcacggttactatggcaacctcdgaggagaagccaagaggactcaagctgcagggaatgtggggaagkataatagagggtggtgtcccagggttaggacaggcagctggttgatatctatgataagaaagcaagaattgagaagcaggagggtgaaggtgtttgactcaatacaaaatcatgatcccatcctcaatgcctagacctcagccaagatgcagattcagatctcagtgacagaggaagagtccatatctctaggcggaatactctgcaaccccgtggaagtvtatgctgggacaattccctcagtccttcggcaaaggaccatatagccatttactcaggagattgtacactggggaaaggaaacaggcagaactggggdgattattgacactgggtgtgaactgacattgatgctcagatgcccacagcactatcatgtctctcatcacagtggggcttatggagctcagggagtaaacctggacacattatggcccacaatggaactactggatccatagacccagccctggttatcttcctataccctgagtgcayaattgacactgatgcactgctaagtggagttacccccaccctgggtccctagtctgtggagtaaggactttcattgtgctgaaagccaaagggaaacctctgacactgcccccatcctggccaaatcaaaaatcatagtgtgtcccagggtgggtcttgtgkaagayacttcaagtattgtggggrtcacatcaccattacagagctgaaggatgtgggatggtgttggggctgtctrttgtctctacgtaatccagcaayctgtccctgaagaagcctgatgaagcctaaagaatgaactagattactccaggtctggccaagtaggagttataattgcagcttttgtgctgtctggatatcactggtagagcagattaataaacccttggacacagagcatgcagctgtggatttggtgactgcatttctttccactccaattagaaagtggatatggagtgattcacattcatgtgggatcctcaaaacattgatttatcatttgtctcagggctattgtaactcccctgacctctatagtatagtcttaagactatactaracatactggatatccaataggatattaaatcagctcatatcattgacaacttcctgttgayctggstggatgagcagcaggtagaaagtgcactgtagtscttggcaaaacamgggcactccagaaggtraagataaaccttacaaagcttcmagagtggccactcggccaggtgcagtggctcacgcctgtaatcccagcactttggaaggctgaggtggvtggatcacctgaggttgggagttggagactagcctgaccaacacrgagaaaccccgtctctactaaaaatacaaaattatccaggcatggtggcccatgctggtaatcccagctacttgggaggctgaggcaggagaatcacttgaacccaggaggcagagattgcagtgagccaagatcgtgccattgcactccagagtgggcaacaagagcaaaattccatctcaaaaagaaaaaratagygggcattgaagtaaagttttatgggtgaacaatggccaagtgtttaggggaatgcaggtgtgtcccctccaaggtaacagacaaactgtttcatcttgcatcctcaccagaaagaaggaagcacactgcctgatgagcctcttycagttctgacaacaccactttccacatctaggtatgttgctttggcccacactctaggtgacataggaggaggccagcttcaagtrgggcccacacagaaaaggaccctgcagcagatccaggccatggtgcragcagccaccatctctcagaccccctggtgctggtgatgccattggtrgggaaagatgcaggatggagctgaaccaagcaccagtgggaaagtcacagtgaaaggcctgggattctggagtaaggtcatgtcattcacagcagagacatatgccacctattagaagcaacttttagtgtcccttgtcctgattagayagaatgyttvaccacdggacaccaagcaactatgtggttcgagtgcctgtgtgacccacagagtcatagattagacaggcccaacagyatccatcrtgaggtgaaaatggtccacctgggttgagcttgaatcccatgtttacacccasagaaaatacccaagtctgaagtggcactgaacaaccaaacagacaaatggaagttagccagccttcaccatgggtcagccctggtttggtaggatgagttcatgaatggagcaaccacagtggcaggcmtgaggctacrtatggggccaacagcactgactcccccctaccaaggcagatccagctgycgacacctctgaatgtccaactcatyagcaattgaggcccatgatgtgccccagtggggcactatttctttaggtgactaactagccactaagtaacaagttgactacatttagctacttccatcctggaagggccagaggttcatcttcacagggataggctyctattccatgggtgttttcatgtcctgctctcagaaactcagccagcacctctccgggtgctgttgacattcctgatctgcaggctaggmggtgctcctagcccattatctgcctgaaggacccacttggctgggaaagtttcagtgtttccatggctgtgggttccactaatcctatcaccatctgcaccatccagaggctgccagccacaaggaatgctggacaggtcttctacaggcaaaactcagtgccagcctggaggaagcactctgagaggtgggtgccrtctttyaggacacsgtgcattgtttgaatcagagatgtctctagagtgctgtgttctcaataggaagaacatgtgtgtccaggratcaaaagatggaagcaggtttggctccacgtccaatcccttagattcacycaatggggtattttgcacgttttatcttccaacactgggctgtgcagggtacgaggtcctggtttccaaggagggtacccttaaaaggakacaaaagacagcccactgaactacacattatggytgtcacgagagaagttttgatagtttgtgcccagagaccacctggtgaaaagaggattctcctcctctccaggcccaggtaayagatcctcatcttcaggagaaggcatggctactttcacacaatgagggcggaagtgtgtgtggaaaccagagatccacctgggggccttctggtttcccttacctcattgtaagtgtgarcagaatcatccagcaattcagcctgagacagcttgatttccaaggacccagacccrtcagggcagaaggtttgagtaatgctsggtaatctcccaaggccctgcwcctgtgctctgacatcctcagtagcattggtgctgaggycctgcttccaatgggctgttcccaaccagtgacagatcacaccagtgacacgaaagcaggacattcctgggagaccagggactcctctgatrgccaactgtagctcaaggactcctccatggccttgcttaactctccttagattgcctgtggtctayggcacatccagtaaaccttgtctccttctgtccatcactggggatcacctttgcatcttgttgcctttcccagggtaacctacctcccttgccatatcacctgacaggtgtgtcccctaataaaatgctataactttavtcccatgatggaacttgctttttggagcatttggactataaaatcattttcatctgcccactagtgatctcttacttattccaabgtgtaaaatctttttgtttattcaacttctacctgcattggctccattttgctggtatttgtaktatgcttttgagttcctcaatgtttattgtttaatcactaaatttgggggtagtttgttacacagcaatggataactaatgaagccctcttacatttccattattctatagaagttaactacatctcttttattttctcctattttgataatattagccacacatagggtttctagtttctcaacacctattcttttctttattttagtttcttttctcctttattccttcccttttttttttttttttttttgagatggagtctcactctcttgcccaggctaaagtgcagtggctcaatctcagctcactgcaagctctgcctcctgggttcatgccattctcctgattcagcttcccaagtagctgggactacaggcacctgccaccacgcccagctaatttttttgtattttyagtagagacggggtttcaccatgttagccaggaargtctctrtctcctgacctcatgatctgcctgcctcagcctcccaaagtgctgggattgcaggcatgagccaccacacctggcctcttccttccstttctcyttccttctaaccctccctccctctctttcttctctatttccattcaacctatcaccttccctccttcttgctccctttccttccccttccccttccttcttttcttctttcactttttcctccattcctccttctttccctcccttcctccattttttcctttttattataaaattttcctaaaatataaaataaccctatgtgattgggctgtaagtaagcattttctgaatctatatgtcaaaagcataatgtcttttatatgagaaacaagtaaacaacaggaagttattaacagaataaaaatgcttgctataattctaccaccaagacrgtgacttttaacacaattccttcaactcagtgttttcagaacacatcatcaacatcaagtattacacatttattgtaaaagtttaagtagccacaatyactttggaaatcatattatcattatctagtatggttaaagtccatacaatgtatcatgcaaccaacccattcctaatcatccactctgggrgctttggggctttcttgcctatgtgcacaggagacatgcacactaatatttatggcaaaaactggaatcrgccacatgtacatcaataggaaacyggtgaaattgtggtaaaacgatatgtaagccttcagcgtaaaaatgaatgaatgacagcctcccacaccacagataactcctacacataatgtgtatcatgggaaaatacatgcagtaggaatttgctgtacaggaagcttaaaaaccagcaaaactaactgaggtttgttttggggagatatagatatacttattgcacaaatctttgaaggaatacaaaggaatacgtatcagaagactcaggatggagtctcctgccgagaccagctcggtcaggaagaccctaacccagtggtgctagaggacttaaagacacacacacagaaatatagaggtgtgaagtgggaaatcgggggtctcacagtcttcagagctgagagccccaaacagatatttacccacatatttattaacagcaaaccggtcattagtgttgtttctataggtattaaattaactaaaagtatcccttataggaagcaaagggatgggcygaattaaaggaataggttgggctagttaactgcagcaggaacacacycttaagacacagatcgctcatgctattgtttgtggcttaagaatgcctttaagcggttttccgccctgggcaggccaggtgttccttkccctcattctygtaaaccygcaaccttccagcttggacrttagggccattatgaacatgttayggtgctgcagagattttgtttatggccagtcttggggccagtttatggccagattttgggggacttgctcccaacggtctccttctakggggtgactgggtagcagcccagggtagctttacaggyttgtgttttacaccagygctgggcaccctsgtagatacttgattataattccttaaacagagttttccaaattaaaatatacctgttttttatagaaatgaaaaagaaaagaatttcaaagttcattgcaaagattcttaacaagaactacttacattggaagaaaaccacagagaattgtaaggagccatgtgacagagaggaccaggatgccatgaaaatggcmttggctacaaataggtcatttgatccttggctccctggcatctctctagattttcaatgatacaatgttcaatctgctgtgcaagataatttcatcttscaaagatttgatgttacattttaccacacattaaactgaaataaacttttacagattggaaatgcacatcattgatcaaaataaatgaaacatgaaaagagtaggraggaatacccagtgatggaatagcaaatatgaatggaaaacagaataggactgctaaaaagaaaaaaaaattcagaagcatgtaatagcagcrctatttagaatcatagtggtgtccaaatcacttctatcacatctcattcaataccacaacaaaagatgttaagtttattatagaatgcccrtcaaatagccagtttttgaaaaaaacttgtttctcaattagaactaaccatttcgggctayagcatcaagccaaaattattggcatcatgctaataatttttactaaagtaaaataaagttkactgaagtatgagattcacatttttgtaaatgaaaagcaatttgattaggcatttttttctgcacagcaaaagaaactatcatcaatcacagtgaacagacatcctacagaatgggagaaaaattttgcagtctatccatctgacaaaagtctagtattcagaatccacaaagaacttaagcaaatttacatgaaaaaaaaacttcattaaaaagtagacaaagaacttgaacagacacttctaaagaagacatacatgtggccaacaaaaatatgaaaaaaagctcaacatcgctgatcattrgagaaatgcaaatcaaaaccacaaatgagataccayctcatgtcagtcagaatggcaattattaaaaagtcaagaaacaacagatgctggcgaggttgcagagaaataggaatgcttttacactgttggtggaaaagtaaatggttaatccattgtggaagacagtgacagtgtggtgattcctcagagatttagaatcagaaataccatttgatccagcaatcgcattacagggtatatacccaaaggaatacaaatcattctattataaagatayatgcatgtttacattcatggcagcactattcacaatagcaaacacatggaatcaacccaaatgcccatcaatgatgaactggataaagaaaatgtggtacatatacaccatggaatattatgcagccataaaaaggaakgagatcaagtcctttgcagggatatggatgaagctggaagccattatcctcagcaaactcacacaggaayggaaaaccaaacaccacatgttctcatttataattgggaactgagtaatgagaacacatggacacagggagaggaacaacacacactggggcctattggggcagggtggtggtgggaggatcattagcaaaaatagctaatgcatgccagggttaatacctaggtgatgagttgacaggtgcagcaaaccaacatggcacatgtttacctatgtaacaaacctgcacatcctgcacgtgtaccctggaacttaaaaaaaattaaattaaaagacaagcttaaagaaaaagacaagctgaaagagttaatgaaaaataattagataaaagaagtctttgattttcaaaaacctgaaacaatagttataattttgcttttaacatatattcaaaacatttgatactgttcccttccagaggtgcatcttaattccctctcctgagtgtggcttggacttaatgaggcacttctgatatggcctggttctgtgttcccacccaaatctcatcttgaattgttatgcgaattgtaatcsctacctatwgggggagggaccacatgggaggtgattggataatggrggyggtgcccccatgctgttctcgtgatactgagggaattctcatgagatctgatggttttataaggggcttttccctgcttcattctgcacttctctctcctgtcatcatrtgaagaaggatgtgtttgcttccacttctgycatgactgtaagtttcctggggcaggctcctcagccatgcagaactgtgrgtcwattaaacctctttcctttataaattasccagtctcaggyayttcttyatrgcagtgtgagaatggactaatataacttctaacttatagaataatgctgacataatggtttgtaactctgggtgtagaacctaaaactcactgcggcttccaccttctctctctctgtctctgggatcatgagctctgggggaagccagctgctgtgccacaagcagccctgcaggaaggtccatgtggctgagaactgaggccttccgggaccagacaacaaagaactaggccttttccaacagccatgtgactgatccatgtttcatgtgaatcctcagccccagtgaagccctcagatgatgcagcccttggctgacaattggactgcaaccttgtgagaggcccsgagcaagaagcactcagggaaacctctcctggactcctgaccattggaaactgtggcagatgaggaatatttgttgttttaagctaagttttacataatttgttatgyaatagtaaataaataacacattttcacaagagaggatgtattattacacattaaattgcatttgctttaaatgtatcatcvtcatcattattatttttgagacaydgtctcgctctgtcacccaggctggagtgcagtggcatgatcaccatgyactgcagtgtcgacctcctgggktcaagggacccactgatctcagcctcctgagtagctgggactaccrtcatgaactactatgcctggctaattttctaattttttgtatagatgggggttttgcccaggctgatcttgahcttctggagtcaacaaatctgccttcctctgccttccacagtgctaggatggcaggyrtgagccaccatacctggcgtaaattaattataagatattaaacaygtaacttagttttaaaaggtaaggagaatttccatggctgaagaggatgtattttatgaccattcacaatgatcactttacttgaacttcaatttccaactgtgtccgaagtaaacacaaaaggaagatccaacccttgctaggctgattctattatgccctcaacaaccagctcctggtcattcaccatcctccagttattcaatcaactctaatgtaggtgctgctgtgaagggagttagtggatataattaagggtctcaattagttgactttaggctgggtttatcctgcttggactgtcctaatcaggtgagaccttgaaaggactgggttcttcctgagcatagagactcacagtgtgagagggactcagcatgaggggtttcctccagcatgggctttgaaaatgaaagggctgtgggccrggtgcggtgcctcacgcctgtaatcccagcactttgggaggctgaggcgggcggatcatgaggtcaggagatygagaccatcctggctaacatggtgaaaccctgtctctactaagaatacaaaaaaaaaaaaaaaaattagccaagygtagtggygggtgcctgtagtcccagctgcttgggaggctgagacaggagaatggcgtgaaccygggagccatagctggcagtgagccgagatccggccactgcacccaagcctgggctacagagcragactccatctcmaaaaaataaataaataaaatwaaaaatgaaggggctgtgtaggaaagaatrctggtgaggaccaggaatcragcacagccctccctgttctctacattgacagccagcaagraacagggacctcagtcttacaactgccagaaactgcattctgccacctctgtataagcctgaaggagbattcaaaatgaaaacacagcttttggaagcccagaagagagattccatccacaattttgcccagatttctgatcaaggaactataagcagataaatgggtgttgtttcgccaggcrtggtagtgcacgaatgaattgatgaattgatatgcacactagttacataaaataaaawytttctgaacttyttccgtgttttgcactttvtaattatctgtaatgcaatttaatacactcatatttcattcattcagtcgacaaaaattaatttagtccctacgataaaccagatatcccctcatatgctcacgtgcctgacactccagaagtttctcaagaccgaggtggagacactggagtgttttaagtggagagatgacacactcygactcccaggagcaggaccactgtgaaaagaacagtyacgtaacaggtcatgggacagtgctagtgtcacaaytcacaagtgacagtgtggtggggactaaggggacaggasggcctgaaggatgaraaggacggagrgaagggctggagaagcaggaggtgaagaaaaggagcagaggaaagaattcgaaagcagcagaattcttaggtttaaatacattgttttatggattttaatacatccatctacagagcctagcagggtgtccttggcagttggyctttaatacytyatgtgggtctgcctaaaaactaattttttaatgttaatcaggtttaaaaattactaagtgttcctataaaatatacayaacacttagmagyggatacttcctaaaaacaggcagtgcatgagcactagtgaggggcattgygactacaytgaacagttgcaactttgaggtgaataaagcctgtactgactcctggttgcaacgtacctggttgcaaagtacacagtgtgctactttgtattgaggagatatcctggactcacacagaaactcaragctatggaatgatggcaaatttaaaatatgacaagcgggagtcacaggtacactgcaaaagtgaaacttagaagctttgtgagtcctgttstaacgcttttgggcacatttatacatcatggggccaaagtcacattttttacckattagattcctgatcattcaggggttaccaaggttctgctatccaatgtatttaataaacaaataaataaataaactggtctctattctgtctcatgcactcagdcacaacttttcccaataaaaaaaaaaaaaaaaaggaaaacaaaaaacagtttctacacctccattcccadagcaagctcactctctgtcaccaaactccgtgggtgdsttttcttctagaagagtccaggtggacagggagtccagttcagggacggagattcckggatgaaaagtgaagggagagggacagggcccatgccgagggtttcttcctggtttctcagacagctcctgggccaagactcagggaaacactgagacagagcgcttggcacaggaggagcggggtcagggcgaagtcccagggccccaggcgtggctctcagggtctcaggccccgaaggcggtgtatggattggggakgccccgccttggggattcgccacctccgcagtttctcttcttctcacaacctgcgacgggtccttyttcctkgatactcasgaagcgggcacagttctcattcccactaggtgtcgggtttctagagaagccaatcggtgccgccgcggtcccggttctaaagtccccacgcacccaccgggactcagattctccccagacgccgaggatggtgctcatggcgccccgaaccctcctcctgctgctctcaggggccctggccctgrcccwgacctgggcgcgtgagtgcagggtctgcagggaaatggtcgggaggagcgaggggcccgcccggcgggggcgcaggacccrgggagccgcgcagggaggagggtcgggcgggtctcagctcctcctcgctcccaggctcccactccatgaggtatttctacaccaccatgtcccggcccggccgcggggagccccgcttcatctccgtcggctacgtggackatacgcagttcgtgcggttcgacagcgacgmcgcgagycagaggatggagccgcgggcgccgtggatggagcgggaggggccrgagtattgggaccggrasacacagatctgcaaggcccargcacrgactgaacgagagaacctgcggatcgcgctccgctactacaaccagagcgagggcggtgagtgaccccggcccgggrcgcaggtcacgacccctccccatcccccacggagggccgggtcgcctcgagtctctgggtccgagatcctccccgaaaccgcgggaccccgagacccttgacctgggagaggcccaggcgcctttacccggtttcattttcagtttaggccaaaatccccgcgggttggtcsgggcagggcggggctcgggggaccgggctgaccgcgggggcggggccaggttcycacaccatgcaggtgatgtatggctgcgacgtggggcccgacgggcgcttcctcygcgggtatgaacagcacgcctacgacrgcaaggattacatcgctctgaacgaggacctgcgctcctggaccgcggcggacatggcagctcagatcaccaagcgcaagtgggaggcggcccgtsdggcggagcagckgagagyctacctggagggcgagttcgtggagtggctccgcagatacctggagaacgggaaggagacgctgcagcgcgcgggtaccaggggccacagggcgcctcccggatsgcctgtagatctccggggctggcctcccacaagaaagggagacaaatgggaccaacactataatatcgccctccctctggtcctgagggagaagaatcctcctgggtttccagagagtgactctgagggtccgccgtgctctytgacacaattaagggatgaaatctctgaggaaatgaagggaagacaatccctggaatactgatgagtggttcyctttgacrctggcagcagccttgggccccgtgacttttcctctcaggccttgttctctgcttcacactcaatgtgystgggggtctgagtccagctcttctgagtccctcagcctccactcaggtcaggaccagaagtcgctgttccctcctcagggactagarttttccacggaataggagattatcccaggtgcctgtgtccaggctgttgtctgggttctgtgctcccttccccaccccaggcgtcctgtccattctcaagatggccacatgcgtgctggtggagtgtcccatgacagatgcaaaatgcctgaattttctgactcttccygtcagacccccccaagacacatatgacccacyaccccatctctgaccatgaggccaccctgaggtgctgggccctgggyttctaccctgcggagatcacactgacctggcagcgggatggggaggaccagacccacacacggagctcrtggagaccaggcctgcaggggatggaaccttccagaagtgggyggctgtggtggtgccttctggagaggagcagagatacacctgccatgtgcagcatgagggtctgccmgagcccctcaccctgagatggggtaaggagggagatgggggtgtcatgtcycttaggraaagccrgagcctctctggagagctttagcagggtcagggtccctcaccttccccccttttcccagagccatcttcccagcccamcrtccccatcgtgggcatcrttgctggcctggttctacttgtagctgtggtcactggagctgtggtcrctgctgtaatgtggaggaagaagagctcaggtaaggaaggggtgaggagtgtggtctgagatttcttgtctcactgagagttccaagccccaggtagaagkgccctgcctggttactgggaagcaccatccacactcatgggcctacccagcctgggccstgtgtgccagcacttactcttttgtaaagcacctgttacaaygagggacagatttatcaccttgatgactgtggtgatgggacctgatcccagcagtcacaagtcacaggggaaggtccccgaggacagacctcagaagggcggttggtccaggacccacatctgctttcctcatgtttcctgatcccgccctgggtctgcagttgcacatttctggaaacttctctggggtccaagacttggaggttcctctaggaccttatggccctggcttctttctggcatctcacaggacattttcttcccacagatagaaaaggagggagctactctcaggctgcaagtaagtatgaaggaggctgatccctgaaatcctttggatattgtgtttgggagcccatgggggagctcacccaccccacaattcttcctctagccacatctactgtgggatctgaccaggtcctgtttttattctactccaggcggcaacagtgcccagggctctgatgtgtctctcacrgcgtgaaaggtgagaccttggggggcctgatgtgtggggggtgttgggggggaacagtggacacagctgtgctatggggttctttgaatttgatgttttgagcatgcgatgggctgccaaagtgtcatccattactgggacagatatgaatttgttcatgaatattttttctatagtgtgagacagctgccttgtgtgggactgagaggcaagakttgttcacaccttccctttgtgacttgaagaaccctgactttctgcaaaggcacctgaatgtgtctgtgttcctgtaggcataatgtgtggaggaggggagaccaacccaccctcatgtccaccatgaccctcttccccacgctgatctgtgttccctccccaatcatctttcctgttccagagaggmggggctgagatgtctccatctttttctcaactttatgtgcactgagctgtaacttcttacttccctcttaaaattagaatctgagtaaacatttactttttcaaattcttgccatgagaggttgatgacttaattaaaggagaagattcctaaaatttgagagacaaaataaatggaacmcatgagaaccttccagagtccatgtgtttcttgtgctgatttgttgcaggggaggagaatagatggggctgtgcctagtgggtgctcaggccagtatggactttatgtggtcactgctcagctgggtcatctttgctccttcattctccttggcccttcagtagaaccttgtccyaccaccacctgtgatcacagggasttggatgtcacctasggtggtccctgcatacaaatctcattgtggtatcaagagactaattttcagacctgtccagctcttgccctcctcccaggrctctttcctggattgtagttttcatcttgtctccaatctttttaaaggaagcagattctgaaatttgcagagaggaggggtcccatagtttctcatcatagtgaactttctgttggagctcctcttctgctctcctactcttcttcctgccctgagttgtagtaatcctagtgctggctccaatccaaactcatggatttacaaagcagagtctaatttagattcatacgtggttggaaaattgtacccataagcctagggttatctttcctgaagagaaaaatatggttgtgtgctgcagtgtgcaggagggttggtgtgggrggaggkagggagggagggaggacacacaagcastcctggtgagaaaagcactggcggyatcgatgtccacatgagatgatgttgttctttagctgccacaaaacagcatttgccctgaggctaccttaacaaagatattggctttagaatagagaagtgctctacagtgatcattcattcaactgacatttgttgtctgctagggatatgactgcttttgcgtttagaaagcatcattaaggtgaaaacagaaaaatttctggtgttgtggtacatatgttctagatgctagcttgtctaacccgtagctcgcaggctgaatgtggcccaggacagttttgaatgtgaggagtttttgcttttctgtggcggacctgagacctggagtgagtgcacccacctccctcaggatcaggagtgaatgctttaggaaccctcctttgcagygacctgcaaaagatagagggcacrgttactgtgagaacccagagtagcagccaaaggggctcaaccttcatggagttttgggaaaggttagtaaaaggtggtgtcccagcgtcagaacagatgggcagccagcgagggcactgcttcatatctatgatgggaatgcaagaattgaggagcaggagactgagggygtttgayyaaatacaaagtcatgatcccagtctcaattcctagacttcagccaagcttcagattcagaatcyacagtggggcttaaggaggccaggaartaaacctggacacattatggcccactgtgggaccactgggttcataaacccagtcctggttatctccccattctccacatgcataattggccttgatgcactggcaaagggagtcacccccayactacatccctagtctggagagtaagggctwtcattgtgctgaagcccaaagggaatcatctaaaacttccctcatcccarccaagccagaagcaatattgygccccaggtgggacttcaggagggtactgcagrtattgtaggggtggcactgccattagagagctgaaggatggggggtggtgttgggattgcctattatctccatataattcagcagtctrtccctgaagaagcctgataaagaatgaatggaattactccagacttgaccaagtaggagtcctgattgcagctgccatgctggctggatatcactgcttggggagattaataaggcctcaggcacatggcaaacagccatgcatttggtgagtgcattctttcccattccatttagaaaatggatatggaatgattcacattcacatgggatttataatacatttattgatagcttgcctcagggctactttaactcctcaaccttctataaatatcaccttaagagatctggacaaatcagacatctcacagaatactaaatctcttcdtttcattggcaatatcacatagattgggatggatgagyaagaggaggaaagtaygctgarttcttyggcaaaacrtgtgcactacagaaggtgaagattaaccttacagagcttcaagagtggccactgcagtgaagtgttatgggtccagtggttaggggcatgcagggctgtccyctccaaagtaaaagacaaacttgcatcttgcatcctcaacagaaggaaggaagcacactatttggtgagcttctctgggtcctggcaacaccacattccacatctaagtatattgtttggcccactgtctgggtataatataggaagaggtcagctttgagtgcggactagacaggaaaggacactgcagcagatccaggcggtggtgtaccaggtcatcaactctcagtcccctggtgctgggggtgacagygtggggaaagatgctagatggagctgaaccaagcagctgagatcaagtgagctgagatcccgcccctacactccagcctgagcaacaagagtgaaactccatctcaaaaagaaaaaaaaattaaaaggataagcaccctcccacatcagagataactccccaacacataatatacatdcdgtgtgagttctctgtatggggaagttaaaaaaatacaggtcaaactgtgatttgggtattattgtaaaaatcttcagtgacaatgccaaggaatagcaaatacaagactcaagacataggttccttttaggggataggattggacaacagcctagggtggcttcataggttctgtttcttatgccaggaggggatatccaggtagttagttacttgatcataaaactttatttatttatttatttatatattttgagtctcgctcttgttgcccaggctggagtacagtggcatgatctcagttcactgcaacctccgcctcccaggttcaagggattctcctgcctcagcctcctgagcagctgggattgcaggcaaatgccaccactcccagctaatttttgtatttttagtagagacgggcttcaccatgttgaccaggttggtctggaactcctgacctcaggtgatccacccacttcagcctaccaaattgctgagattacaggcatgagccaccactcctggcccacaaatctttaaagtggtatttttcaaaatgcaccttgtgtgccattcctgattgattdtttggaaatgaaagagaaaagaaaaygccaaagttcatcacaagcatcctttgcgataactactcrtagtaaaacaaagccdcagctggccgggcacggtggctcacttctgtgatcctagcactttgggaagtcgagrcctgtggatcacgagatcaggagttcgagacsagcctgaccaacatggtgaaacctygtctttactaaaaatacaaaaattagctgggcgtgttggtgcgtgtctgtaatccaagctactcagaaggctgatgcaggagaatcgyttgaacctggaaggcagaagttgcagtgagctgagatcctgccatcgcactccagcctgggtgacagagccatactccatctcaaaacraacaaacaracaacyacaaaaaacaagccacagccaattttaaggagccatgtgagaggaccaggatgccatgaaaaacagccttggctacaaataggtcatttgatccttggctagttggcaactctctacattttctgatacacagtgttcaatctgdtaggtaaggcaatagtatcttgcaaagaatttgagaatttgatatgttgctcacattttaccacacatacaagtgaattaaacttttacagaatagaaaaaaagcattgttgagcaaaataaattaaatgaaaagacataaatgaataactagtgatgaaatagcaataagaatgdaaaacacgaaagagctgcttttaaagcaacattagaagcacaaaataacagtgtttttcagaatcatactggagtccaaatcacttctaccacatctaattaaaavccacagtgaaagatgttaaactgatcacaggatgcccactgaatagccagttactgaaaaatcttgttcctagattgaakttaaccatttccacctaccacatcaaaccaaatcattgtcatgatgctaagccagttgtacagacaaagatgtgagactcacatttttctaattgcaaagcaccctgattaggcaaatatttttgtagatgcttgagtcagaaaattgtcattttgggcattctttttttttttttttttttttttgccttcaagcatctgtttaacaaagcacatcttgcaccgcccttaatccatttaaccctgagtggacacagcacatgtttcagagagcasggggttgcgggtaaggttatagattaacagcatcccaaggcagaagaatttttcttagtacagaacaaaatggagtctcctatgtctgcttctttctacacagacacagcaacaatctgatttctctgtcttttccccacatttcccccctttctattcgacaaaaccgccatcgtcatcatggccccttctcaatgagctgttgggtacacctcccagacggggtggcggccgggcagaggggctcctcacttcccagacggggtggccgggcagaggcgccccccacctcctggacgaggtggctggccgggcgggggctgccccccacctccctcctggacggggyggctgccgggcagagacrctcctcacttcccagacggggtggctgctgggcggaggggctcctcacctctcagacrgggcggccggggagagacgctccttacctcccagacggggtggctgctgggcggaggggctcctcacatcccagacagggcggcggggcagaggcgctccccacatctcagatgatgggcrgccgggcagagacgctcctcacttcctagaccggatggcggccgggcagaggctgcgatcttggcactttgggaggccaaggcaggcagctgggaggcagaggttgtagcgagccgagatcacgccactgcactccagcctgggcaacattgagcactgagtgagagagactccgtctgcaatcccggcacctcaggaggccaaggctggcagatcactcccagttaggagctggagaccagcctggccaacacagtgaaaccccgtctccaccaaaaaaatacgaaaaccagtcaggcatggtggtgcgckcctgcaatcccaggcactctgcagactctaaattattcaacgcctcagacactaactttccaaggaataggagattatcccaggtgcctgtggccaggaggtgtctgggttctgtgctcccttccccaccccagatgtcctdtccattctcaggatggtcacatgggtgctgctggagtgtcccatgaggaatgcaaagtgcctcaattttcttactcttcccttcagaatcccagaatvcatgtgtgatccactaccccatctcdgaccatgaggccgccctgaggtgctgggtccygggcttctaccatgtggaaatcacagtgacccaactgtgggatggggaggaccaaatttaggacgcagagcttgtggggaccagacctgcagggtatagaaccttccagaagtgggcagctgtgrtgctgtcttctagagacaagtagagatacacatgccatgtgcagcaggaggcactgccagagcccctcacactgagatgggctaaggagatgaatgaggggccatgtctcttctcagggaaadcaggagccyttctggaggccttcagcagggtcagggctgaggcctgggggtcaggacccctcacgttcccctcctttcttagggccatcttcccagcccacattccycatcrtgggcatygttacygtcctggttgttctaggtgctgtggtcactgctgtgatgtggaagaataagaccccaggtaggaaaggggtgagttccaagatttcttcttccattcgtggatttcaagctccagatggaagttggctcatttcctgcctagttgtgagacaccatctccacacacatttaccctgttcagatgccctgtcaactctcactcttttgtaaagcacctgtgaaattgaaggacaaatttatcaccttgattgtgatcatgggaacctgactcccagcagtcacaagtcaggagaatgttcctgctgaggacagatgtcaaaaggacatttggttcagcttcaacacatcctcttccctcgggttttctgatcctgacctgggtctgcagtcacagttctggaaactcctctaggatctcatggccctgcctcttccctggcctctcacagtttgttttctttcctcatatggaaaaggagtcagctatgctcaggcttcaagtaagtgtggtaggggtgggagagtgattcctgagatccttggaatagtgtagacaggagcccatgggggaggtcaccaccccacaattcctcctttagtcacatcacctgtgggctctgaccagactttgtttttgttccaccccaaacaggaacagtacccagggctctgatgtgtctctcaagtcttgtaaaagtgacaccttagagggcctgaagtgaaggaggagttggggcagatgggacacaactaggctctagagagtctttgatttggaatttttcaatgtgtggtgggctgttcagtgtcaccacttaccatgactgacttgaatttgttcacgactattttctttccaagactgccttgtgagggactgagatgcaagatttgttcatggctccactttgagacttcaagggcctctgttttctctttctgccaaggcatctgaatgtgtctatgtccctggtaacatgtgagaagtggagagaccagcccaccctcatgtccaccatgacccctgatattgtttggatctgtgtccccacccaaatctcatgctcacttgtaatccctaatgttggaggtggtgcttggtgggacgtgattggctcatgaggatggatgattcatgaatggtttagaatcatctctttcatgctgttcttgtgatagttcttggaggcattgtgccacctccctagggatctgtggaactttaaacttgagagtgatgattaagggtatctgatggaagaaatttctcagtagcatagaattcaggatttggtctggctgcctgtaatagcctatgtgcatatgtgtgagcaaagaaatgacccgaaactggaactgatatttaaatggggaaatttaatacccaggaaaattcttagcggagctgcagcaacaggacccctgccaggactactaaatggtagagccactggctatgtgcaacctcagcctggaaaagccataggcattcaattttctcccatgacagcagctatatgggttatgttcagcaaagccataaatgtggagctgcaaatggcattaggagcccagcagttgcaccagccactgtgctctggattcaaaatatagagtcaaaggagattcttttagacctttaagttttaatgtctgccatgatgagtttcaatcttatgaggaaactgcattcatttcttttggcccatttatataccttttggaatggaaatgtacaagaaatgtctcttccactgttttattaatattttagatgcaaataacattttttaaaaaaattttacaggctcaaagctataagaatttaccttgcgtctcagatgagactctagaattttgagttgatgctggaacaacctaacacatttgggacaattgggagtagattattatattttgcaatgtgagaagaacatgacctttggctggctagggaggggatgcaatgatataaacatttatcccctgatacctcatgttaaaatctaacgcccactgtgggacttggggcctaatggccaccatttgggtcatggtgaccaatcttttatgaatcgagagatactgccctctctcgggaatgaatgaattgttgctctattattttccaagagagctagttgttaaaaagaccctggcaacttcctactctctgtgttcctctgttaccatgtgatctctgcatataccagctcccctttgtcttctgccatgagtggaagcagcctgaggccctcactaaatgcgcaaacatttccagacatcagaatcttgagccacatgaacctcgtttatataaattagtcagtctcagacatttctttatagcaacacaaaatggaaaaagataaccctcgcatcacaggtatgtgtctctggcagctagccaccgttcttaagatatccaggatccactcagccaagagtcttctcatcagtactctaaagacactcttatcactcaagagagtctaaggtttttaggagaaaccagggacaaagactaaatgtttttgtgataactcagattgcccacttttctttgaccacatatcttttacaggaaaaaggattgtaacagtaaagaggtattggcatattatcagagtctcatccattcattcaaaattaggccagtttatcatcctcttgtatgaatatgtctcccagaatgaaatcactcagctttgctgacaacactcaatcttaccaggttccaaaaacaaggatggtctcagggacatacagcttcactcttttaggcatcccgtataattgacctaagtgacaatatcttctcttgctcacaccacctttgaggagttaagctaatattgaatttttctcattatataaccctttgatttattcacttaccctcagccactattcctccctctgtccctttatatcagttgtttccaggtttgggagtgacattaggtttgtctgctgggctggcctagactgcaggcagcaatagtattctagcatgtcttccctcagtctagtcttgatcatagagggtaggttatataggtaaggaactagtgggggctatcagaccaccaggctatataactctacttactgttaatcctaacttttcagatgaaatgaatacttgagaattcttacataaaggtgtaaaaatatagttatggtttttcgcttagggataattcctgtttctggcacttttatttacatccctattcctggtactatggcataacatatgaaaaaataaatttgaggtgaagtgtagtctttattccagcatcctctccccttcagaagaattgtatgtatcgtcgtaacagcatcgtcctgatccatcaggtaaaagagaggatgctacctagtggagttattcttgcagccccactcatgttgacagcgagcacattcatgaagatataaaagccagtccttcatgtttatattgcccaacaattagattggcagtttttagacaaacaatgtttcaattgaccatttcaattttctatcaaattttcccctgaggaggacatgtccctctgcattgttggccgtttgaggctgtaaagtgtgttttcttgtgtaaagaagtgtgactcggcagtccaaattggtgcaacctcttcttttctggtycttgtatagcccttgaagcattgacatctacccctggttgagcatagcccaatccagagtcagtgattttcctgtcaagatccattggcagctcctttggggttgctggcatcattctggcttgccaggtattatgatcaaagccttcccactagagaatctgtcacatctccatctgctgcctctgtctgttttcttgaccaacagtgaaaaaagagattatgagaaataagataaattaccaaaattgtgaacaaaagagattatcactaatgacccttaggaagttaaaaaacattataagtgaatactctgaaaaacctgaagccaataagttagaccacttagataaaaaggaccaattcgtgcagagatagaaattgccaaaactgacccaaattaactggaaaacctgaagagaactgtgaactaagtcagaaattgaaaaaccttctcaaaaagaaatgccaaagcccagatatcttcactggtgaattctatcaaatattttgaaagctctttcagacaagaagagaggagggaagactttccagcccatttacagaactggcattaccctcatatcaaagtcacagcaagactcacaggaaaagagtgccatacaccagtgtcaccaataaacataaatgaaaacatccttaacaaacattggcagataatacaaagccacataaaaaaggattacactccatgaccaatgggattcatcccaggaacatatggttggattaacatttgaaaatcaattcatggaatgcactgtattaatggaaaaaaagacataattatctcaaaagatgcagaagaaacagttgacaaaaatgttaacatcactcatgttcataagtttcaacaaaataggaatggaggagaccttcttcactctgataaagggcatctataaaaaacccacagctaaaatcaaacttaatgaagaaagactgaagactgaatgcttttctcctaagatggggatcaatgcaaggatgtccaatcccaccacttttatttaatattatactggagattgtagccagtgcaataaggcagaaaattaaaaattaaaggcatccagataaaaaggaaaacatacaattctattcacagataacatgaccctgtctgtagaattcacaagcagataaaaactggctagcactaataaatgaatccagaagggcccataggatatcaaatcaatataaaaattaattattaacatatttctctatagaagcaatgaaaatctcaactttcctatcacagtagttaccagaagagcgaaataggaataaatttaggaagacagcagtgtttgttcactgaaaataaaaaaacattcctcagagaaattaaaggtctaaataaatggagagatgcgagttggaaagctcgataatactgttaagatggcaattctcccccagtagatctataggttcaacacaatccctatcaaaatcccagcagggattttatagaaaattgacaaaataggccgggcgcggtggctcatgccggtaatcccagcactttgggaggctgaggcaggcggatcatgaggtcaggagatccagaccatcctggctaacacggtgaaaccccatctctactaaaaatacaaaaaactagccgggcgtggtggcgggctcctcgggaggctgaggcagaaaaatggcatgaacccggtaggcggaggttgcagtgagcggagatcatgccactgcactccagcctgggtgacagagcgagactccgtctcaaaaaaaaaaaaaaaaagaaaaaaagaaaagaaaattgacaaaataatcctaaaaatgtatattaaaatgcagaggatgcagaagggccaacacaaatttgaaaaaaaaaatggaatgtcatatgaaactacaataatccagacagtgtgaaactgagagacatagagatcaatgaacagaagtgagaatctagaaagatattcttactttctttgtcaattgattttcaatgaagttgcataggtaacacaatgttacatttaacaccatataaaatatcagctcaaacaaattagagacctaaacagctaaaatttatgagttaaaactataaaatttctaaaagaaaacacaggagaaaatttttattactttgggtagttaggcaaaagattcttagataaaataccaaaagcatgatctacaaataaaaaaaaaagagagagagaaattgggcttagttaaaatttaaaacttgagtgctccaaaagacattgagagaatgagaagacaagccatagacagggagaaaatatttcacaatttatcacaaattacatttgtgttgaagaacatgtttccagaataatgtggcaagttcttaaactcaatgtgtaagaagatgagcaact

SEQ ID NO: 5642 - DNA, 16933 bp, Homo sapiens
ggacttggcagtgggggtctagaatcccaccctatccccaccactcatcatcgtgaccctgggagaggtgcttggcccctccagtccccagcaacccaccctcccataatggaaacagaagagtcacccagagcctcctgctgctggggagaggaagagaaaggagggtggggcagggctggcctgggatttgggggacagtggccatcctcagggtggaccctccctttcccagcatcttcctcagctggagccgctgggcaacagcccaatgggcctggagagagctggcttcccaccgggcctgggatcggacctgcagggctgtgctgggcctgtggcrtcagcggctgctgcagtcacggctggtggagcggtgggcccaggagcggggctggcggctggcacgagatgccctatgccactggcactcctgttggcagggtgagtggagacttggtcgggggcactgcgggtgagggcagggccagggtctgtctgagacccagactgcagccctggccaacaacttgactgtaaccgcatgggagaacttgaggcagaggctaagctacatctggactcctgacccatagaaactgtgagataacaaacatctgtggtttaaaactaataagtacttgggtaatttgttacacagccatagctaacaaatgcagttgatcagagaggtccgctgagctgtgacactgacctagctgggttcaaagaaaacaggctgaccaactcttacacgttgtgctatgaatgagcaaatgaatagacctcagctgtgaaatttccgagagggacagtgactctgcagagtgcctcaccaccccccataccctcccatcccctagcaaattctggtgatgagacccccacagggcacacccaggagtcaggtggcagagcagaacctgggggcttggactctgtagtcttgagtttgaatccctgctcttccataccctgactgtgtgaaacttaaacaacctagttaacctccctgagtctcagcttacacatctgtaaaatggggataatgtagtccctatgtcatcacctttatcttcatccttatcctcacctggcctctaggagtcactggtcggagccctgagttgggagagaagtgggcagagtcatggtgcccttaggggccagcagagttagtcagggagggtcccaggaggaggtgaggagggctcagcgggcagagcagtggcgagagaagttgaggcgtgggaaggggtcagcaaaatagggcagtgggaaggactggatttgcagaggctggctgagggtgcagtgtgctagaagccctgaggaatgtggccagtgaagggaggagggatggtcccaaggcaggcttgctctctgggtcttggcctctgggcaaaaagagctgttgcatggcccaaccagtctttttttttttttttttttttttttgagacgatctcgctgtgttgcccaggcatgcagtggtgcgatcttagctcactgcaacctccaccccctgggttcaagcaattctcctgcctcagctcccctcgtagctgggattacaggcgcctgccaccacacctggctaatttttgtatttttagtggagatggggtttcaccatgttggccaggctggtctcgaactcctgacctcaagtgatcaacccgcctcggccttccaaagtgctgggattacaagcgtgagccaccgcacccagccccaaccagtctttttataacctgatatcagaagtgacatcccattgcttctgccaaattctgtctgttaaaagcaaattagtaaacccagcctgtattcaaggcggggcattgcccaggacacgaacacaggatgctgtcttggaggctgcccactacaccgacatatcgcattaatgagctggcaggcagggctgtggtggttctagaaagtcatgtcctgtccgctggagacagctgcttatgcagcccaatcattccccggcaggaacactgagccagtgtttccagaacttctagtttttacagaaaaattgaaaattagatttttgggccgggcgcagtggctcacgcctgtaatcccagcaatttgggaggcccggactggcggatcacgaggtcaggagatcgagaccatcttggctaacatggtgaaaccccgtctctactaaaaatacacaaaattagccaggcgtggtagtgtgcgcctgtagtcccagctactcgggaggctgaggcaggagaatggcatgaatccaggaggcagaggttgcagtgagctgagatcgggccactgcactccagcctgggcgacggagtaagactccgtctcaaaaaaaaaaaaaaatagaaaattagatttttacctgaattctccagatttgaaaatactgtggcaaaattaacaaacaaaaacaaacccaacaactctatgagctgggctggcctggtcaccagcaggacacccataatagaggctttttaacccagacagtcagggtggcctcctgtgttcccacctggtagggggcgaagggctggctgcgtagaggcccatggggagaggctggggtgagcacccagtggctcttcagcatctctctggccccagggcagcagttcctgcatgaaaagtgccagacatgggtgcaggtccacctccagggcctgcagaaggtggtgttccggagctggcagcaggcagcagctcatcagagatgcacagtgacccggccagagcagctgctactgcagaggtgggtgggcctgggggtgggagggtgttggtcctccccacgcaaggaatagcaaggagagcacccagggggtgggaagctcagacggtggcccagataggaggcctgtggcctgggaaaaaaggggcatgaagggagatcctagcctggaaacacagggccatgaccactgacaccttattacctattttgggagtggtggcaaaccccacccctaacctgtggccccaacaagccccgggagtccagctcctggccaggtcagttctttggttttagaggatatgattaagatgggagaaatcagctgggaacagtggatcatacctataatcccagcactttgggaggccgaggaaggtggatcacttgagatcaggagttcgagaccagcctggccaacatggtgaaaccccatctctactaaaaatatgaaaaattagacgggcatggtggcaggtgcctgtagtcccagctacttgggctcaggcaggagaatcacttgaatccgggaggcggaggttgcagtgagccgagattgcaccactgcactccagcctgggcgacagtgcgagactccatctcaaaaaaaaaaaaaaaaaggaggagaaatccactcctcggaaatctaccataacgcccattgtgaggagttacagcaaggagaattctgctgtacactgtcgctaagagaagagagtgaaatcttcatttaagtaaagatgttctggtggaacatgtatacagttcatgaatgcatattgtaaaaccaagcggaggacacagaatggctcctcccacagttcagtacaaatttgcgaatgttcagtgtccccgtggggcagtgaactgttggctacagaatggctgacgtctgtgcttttgcatctgagggtgtagatggttattttgtttgtttgtttgttttttgagacagagtttcgctcttgttgcccaggttggagtgcaatggcgcgatctcggcttaccacaacctccgcctcccgggttcaagtgattctcctgcctcagcctcccgagtagctgggattacaggcatgtggcaccacacctggctaattttgtatttttagtagagacggggtttctccatgttggtcaggctggtctcgaactcccgacctcaggtgatccgcccgcctctgcctcccaaaatgctgggattacaggtgtgagccactgtgcctggccgtagatggttttttttcttggcttctcactgagtgagagatggtgttcctctccctcaccaaccacctgggcatgtgatgggaggcagggcatggctgatgtgggacttgaacccatactgctggttcccatccccctcgcagggcagcccctgccctctgaggctgaggttgcaagatggaaagccagtgctttcacctgttactggtcgtttactgttttgtgggagatttgcaagtgtaactttgaataaatgtgacttttgactctgagaacgagacaagccctcccatgcatctgtttttgttttgtttttttgagatggagtttcactcttgtcacccaggctggagtgcacttgcgcgatctcggcttactgcaacctctgcctcctgggttcaggcaattcttctgcctcagactcccaagtagctgggattacaggtgcccactaccaggcctggctaatttttgtatttttaatagagacggggtttcaccacgttggtcaggctggtctcaaactgacttcaggtgatccactcaccttggcttcccaaagtgctgggattacaagcatgagccaccacacctggcccaatgtgtctgttttgcagctacttccaggcctggtgtgaggttgtaagagacacgggggtgctccgggcccagcatcaagcctttcaggatggcctgaggagaagagcactgggggctgtgtttgccacatggcgggaagcccaggaagtggcagccggggcacaggagcagcgtgtggcccaggcctcccttgcccgctggagaagctgcgggcagcaaggccaggaagatgggcagcagaagaaggcccgggccccacaggccttcccagcatggccagtggccccgggcatgcaccatgaggcccagcagcaggcaggagagagcgctggggcccaggcagcccagtgctggacttggtgctgggctctgtgggtgcatgagtcctgtcggggccaggtcagccgagcccatgcttcctggaagccgcgagcctggtgagtgctgtggtctaagtgcagccccactctgtgcttccagctcaggcctcaagcctgtttttggcaggggtagagcgtaattcatggctgggtggcagggcaaaggctcaagagggtggttgggggtgacagggagaggccgccctggccatctagtcctgggccacatcctggcaccgcctcttgctgtgtgtcccctccttggggaagtctctaatggtcatgccttgcagtcaccagcacagccagccactcagcaagcgccataaacgcgctcttgccagggaaggggaggcaaagtggcactggcaggactgtcccctctctgcccctaaacaggatgcttgtccccgtctgtgattttctccttccaggtcgctctccatcctgtttacccagattctccctccagaaaagggagtgtgggaggtgggtgggccccagcctggggctgggcccagaaggccccctcccgcagggcactgggggggctccctgcagagagtcctggccttgatggccctggctgcagactccttcctctcccgcagggtcctagaggcctcggtgcagtcggcggtgcgcggcggtgtccagcgagccatcctcacccagctccggccggctgagctcaggcgcttcctgcggacagtgcagctcagggtgcggctgggactgccaggggccggcaaggtacgccccaagccccagactgacctcacgctctggccccggatggccagcagggggagcctgctgctggacgccccagccccttggaaacaggtgaagggagcctaggcagggcgggaggtccaaaaatgaccctcggaccaccggccttagaatcagcttgattcagcccgtggtggcagcatggctggatgcctccccaggggcccagcaacctcgtatgcaccacctctccccagttctcagtcagcctctgacaagcaactctgaatccatcagcaaagatgaacctggcacctctcgagtgccaggccactgcaggtccggccgcaaagaccagcatgttgggtcacagcctgttagggagacattgaaatgcatgctttctcacggtgcagttgaggatcagaataggtacacgaggacagtagcatttttttgtcaagtttttttgtttatttttgagacagagtctggctcaattgcccaggctgaagcagaggagtgatctcagctcactgcaacctctgcctcccgggttcaagtgattctcccgcctcagcttcctgagtagctgggactacaagtgcacgccaccacgcctggctaatttttgtatttttagtagagacggggtttcaccatattgcccaagctggtctcgaactcctgaactcaagtgatcctcccacctcgacttcccaaagtgctgggattacaggtgtgagccaccgcgccaggccaagttttttttttttcttattggaaaagtgaaatatgcttattacagaaacctcagaaaatataaagtagaaaaataccaaaatttctttcataattctctctacccaarggcatcggtcagtccctctccagaccagaagcagttagttctgacaccaacaartggtgataagaggttgayagcctagcaagggggaagaagccaccaccaaaccaaacacaaaaaatgacactgcacagcagtctggggacatgtccttgaaggacacagccccaaagatactggcaggtgaggtagtgtccctaagatcaacaggcatcatcatgaatcctatttcagaatgccacaaagaatacattttagagaagattctaagagaaaaagctaaggtgattttttttttcagtcgttttttgttctcagacagtgtctcactctgtcgcccaggccagagtgcagtggtgcgatcacagctcactgcagcctcaacctccagggctcaaacgatcctcccacctcagccacctgagtagctgagactacaggcgtgtgccaccacacccggctaattttttttttttttttgtagaaatgggatctcactatgttgccagggcttgtctcaaactcctgggctcaagcgatctayctgccttggcctcccaaagcattgggcaggcccattacgccatgagccaccacacctgctggtttttgttttttaaatggaattgaaaggaactagccttggctagttgcagaattcacacatatggggctatggcaacagcagattctggagtctcagggtcttttctttctagataagttacagggcaattgcttttcagagtacttttacatttctattccattcttgtcagtaaagacaaggatcccataagctgatggagaaactgaggcctctagaaactaaacgctgggaatggcacccagggtgctgaattccagggtctcctcttttctgccacaggcacacatgccccagcagcccctttggagagccccctctctatagggtactagccgggggctcagactctggagtcagacggcttccgagggatgaggcctcagacaagtaactcagctttgaaatgttttcagtggggagagaaatagccccctcccagggctgtgctccgggaactgactgagggctaactattatgggcccaccccattgttggaatgtcttcagccacatgggggaatgggtggaagaagaggccgggatgtgtcctgccagctagagcagcgaagaaatcccagcggggccccaggaagtccaagcccatggggttcaggtgctcctctctggctaytccttcagacccrcagctgctggacacaggccacagagctggtgcctcccgcgccatcactgcagtgcagcctgggtggacggaggaagccaaggggaacggcctgggctcagagtaaggagaccttgccccgggggacaaacggtgtctgaagtgcaggggtgaagcggtctccagtcctcaggggcctggaaatcagctccttgggacacggtcttatgtgtattgaccattctccccatccattccctcttcggaatgtttcagctgttctgagaaaacactttgcattcctgccccgcccctgtgatttctctttgggyggcaggcagccgkgagaggctggaggcctggggagatgggggcagggcacaaggctaagctcagcaccttcctccaccctcctcactgtactcaactcctargcgggcactaagagcagctgccttcctggacccaccttaamctcttgtgactcaactcccctttccagggtgcagggaacattccctctgccctgccttccagctctggccacagtggcctggacagagtagctgggtcccaggcctgcccctgtggacgagggaccagggaccaagagcgcactccagccctgagcccagagcctscaaagcccaaagcaaggcccataaacggaggctacggtaagaggagctgtgtgtgcagtttggtgggtccgagggatgggggcaagggctgaggggcttgcctgagccatggctacagctgggccctctctggccagtgctcgttcctgcaggatcctggaaaagcaggcccaggcccatggctctgccctccttctggccctgaagggtcacgatgctcttggccatcaggaggaagtacctgcagcgccggtgcctcgaggcactgcttcacgggctgcggggttcccagcaggccaggtgcctggcagtggcatggcagcactgggtggatgcccaaggggcagagcagctggtgcggaccctggtgagtgggtgcacccctctccacactgaccatctcccatttcacctcatacttaacccaaacccctctcaaaagtatggcccttggacctactgactccaaaaccttgggggacaggcccaggaatctgcattcttaatactcctcagatgacacccccttgccatagccctttcactctggtgcagcagtgtcgggggagaaaggcagaagggctggggactgcgggggagcgtgagcacaagaggccttctctgccaactgtccccaaagctcagggagtggcacctgagatgggcctggcagacgtggtggcagcggatcctgcgactgcgagtggctcagcagttacagcagcaggaagatgggtgggtcctttcccaggtactgccctcttccctgcattccactcagccagccttccagaagtctgtgccacagccrcgcaccgtggagctttccctgcttgccagccccggggccccttcgttttcaggggagggggtcagttccattacagaacacacaggctggatgctggagcccttgctttgatttgtggccccagctcaggccaggcccacccggtccatcagtttgcgaagaaggtgtggcatgaggcatggctgccactcacactagcccatggagggcctgggtcctgagcgccccctccctcatttgctctgctctgagtacagcttcccagctcaccatcagatctattctgagcttgtgcatttggcctaggcaagactggctggctgcttggggcagagggaggggccctggggacaaaaggagctgggtacaggggttgctctagcaggcacagcacagaccccggagaaagcccacaacaatagcatttcctctcctccctggttccaggcctttaagaagtggcaccaacgcctggcagccaggagcccaaggagaggagctgccagtagcccaagaccctggagcaagccaggccccaagggccccgagagtggacaggaagccgccrgagcaccgcggggttgggggcytggggcagagcatggggcccagctgcagctgtgacttgttctcatagaataaaaaacagaactgaacttagccttcccagggaaggaaccatgccccacacatccagggagtgatgacagaggggacagcttgaagagctctgaaggacaataaaacccactcctcagtcctagctgctgctttcagtctctcctagcggctgcccctctgccccagccagtgaggccaggaagggagtaaagaggacatcccacaattgcgtccacccccttggccatcaggctgctcttccactacacgaaacagcccatctgcacctgccagtcactgcccccaggccctggggcttgcaggtgactcgtggggagccaggccaggcagataacctctgggacaggacgaggggatgaggaaggcagctggcaggacaagggcctacctgaaaaatacaccaggaagctgggctgctgcacaggcccaggcagatctggggcccctgtgctggcaaatctcatcttagcctctgacagggaacggggcagcatcaggcctccacagccaggcaaaaggggaaggccacgagccccaccaagcacaagggttcagactgccttcaacccttaaggggcactttttctctcaaggctcagaatagacaactgtgccaaaaagcagcatggtaggtgtcagcccaatgcccatccagggggctggtgccatggacggctaagtgggcaggcagggcagtggtgtgccccttcagtcacaagtaggtggggcccagctgcccacctctaggaggtggaagggtacagcactttgccacatctcttctacgatgccaccagtgcctgatgcccttgcgtgttttgcctgtactgcacgggctccaagkgtaagttcactgggagtcccaggctggctctggaggctgccttggttcgagggcttagttggcaacaaccactctcctcgccttctcaggaggtgccacccactgtggtcctctgcaggacgcaagtgctccccaccaaaagagcacagactcctggctagagcagagagtactaggttcccatgtggggccgactcaggtccaggaagagcctggaagcctcactccagtctagctgccattgtcaggtgggggagtggaggccggggtgggagagacacgaaggagagtggagttcccaagagaagcagcactgtggaggaggaaggcgggacaggagtggctccaacgcagggcgtcaggacgcagggtcatggagcctccgtttctctcgcattctgggtgggcctgttgagaagctccaatgtgtcttccaccacctgccagaggcagttgtccagtgggaagtcattgtccaccaggttgaccaggaagtagttgtcgtggatgtactggatgatggtgcgggacggggactcctcctcatacagctttccccacygctcaatccacagggcaaaggcctygtcctacacacacatacccccgcacacacgcacacatgcacacacacacagaggcaagattaacagggctctccaagggctctgctcaacaggacatttcccggaatagaacaaggcccactgccagtatcacttcccacccctgcccagaaataaacaccctgcgtcagcagtgacatgggtgagtcagagctgggtgtgccctgaaggctgggtccagtgtggccttcagcacacgcttgggacttggtcccaatccctcccsacggttttccaggtgggcggggcaagcttgcccccggctcctttacctwccagaacatgaagctgacgggatccactacggtgggctggatgatctctcrcycagggaagatgccccaagtgacagcattcggctgcagttcaggggcattggtgatgttttcaccctgaggggatgtggggtgggggtaagacctgggccaagaacaactggagtcccactgcctggacagccttgactcaatgaggctgtctgggctcaataccctctgcctgcgcctccactcccggcctccactctccctgcgcctccactcccctctccctgtgcctccgctcctggcctcctctgcctgcatctgtgaatgatatctctccccacacaagcctgaacctagaggcgtcctggccacttcccctctcctccttgagcaccccctgctcactctctgatccattccctcttgtctagcccacctccaggagtgtgtttggcttgggtcactccaggggtctcttcactggcctccccggctctagccgtccccaatctctctcatccgtatgactatccactgtgatttgcctaaaataaagcaggaaccaagccaccccactgctggagaaaggcttcccttgcattgagggaaaactcaaattccagcaggacaaccatgatctctgcgggcctggcccctgcttaacactcccgcctcctcctgctcatgttcccggtttccccagatggtgcagctcactgcctctgcctgtcctctgccctgtcccaggaatacccttctctcctgttggccaactcctctttgtcctcagtgattcccacagatgaccctctgagaagccttccctggcctcccaggtgagatatccctcctctggacccgacagcatcctctcctgaacttgattttcccacttacactggctggtggtcacacattgatctgcctccctcactctaggctgggagctccttaagagcagggccccagttctgcctgtatctctctgtcttgcacaatgcctagcccaggctaggtgctgggtgtttgctcaacgaagggcctggtactctgtgggaaccctggggcctggcctaccttcacattgacaaggtggtaattaacccggagctcgtacttcttcagcacttgcagaagtgcttccgctgtctcgcgggaagtgaaaaactctaagtaggcctgtgggagagacaggtgcctgtcaccaaccccagccctgccagacgccctttcgcagacacctaaggtatcaggactactggcagccatgtgggcggaataatgaactgtggcgttggcacgtccataagcaaagggtgaggggagtggggacgtgagtttctcagtctggacaggtctgagggctatcagccacccctctcccaatcagtcagggaagactccacgaagaagccatttctgaacagcagcaactggtttgacaggccgagtcatgggagagaggccccacacattccatcctccccagtgcaagctgacaatgacattgacatctcctctagaaccagtgcctatcagggattaagctgggtttactcaaactcatttgctagaatgctgataatacgggaggctgggcacagtgagccccacgtgaggaaagtgggttcagggaagttgagcacgttggctactctgacagtaaacagtagagctggtccttaaactcaggtctttctgctccagggcccgtgggccttagatcagaacataatgttaactccagcagccctgggagaaaggtgtcaactcaggatagtaacagcagctgcctttcagggagtgcttcctgctcttaccatgtgccaagcacgttacatgctttgttaggtttcatgcccagaacacaagctacatcccattttacagacgagaaaaccaggctcagagaggtcgagtgacctgcctccataggtctgatttctatcttttttttttttttttttgagatggagtcttgctctgttgcccaggctggagtgcagtggcatgatctcagctcactgcaacctccgtctcccgggttcaagcgattctcctgcctcagcctcccaagtagctgcaactacaggtgcccgccaccacacccggctaattgttgtatttttagtagagatggggtttcatcatgtttgtcaggctggtctcgaactcctgaccttgtgatctgcccaccttggcctcctaaagtgctgggattacaggcatgagccaccaagcccagccaatcttttttttttttttttgagacagggtctcactttgtgggccaggctggagtgcagaggcacaaatatggcttactggagcctcaacctctcggactcaagcgatcctctcaccccagccccctaagtacctgggactacaggtgtacaccaccatgcctcggtcatttttgtattttttgtagagaatgggtttcaccatgttgcccaggctggtctcgaactcctgggctcaagtgatccacccgccttggcctcccaaagtgctggccgggttccgtgcccagccaggtctatctgacttaaagcatgagctcccatccgctccaatccatgctcattcaaaatttaagagcccaggagaggcaggctgctctgccctaagctctggggaacccacgggtgccggtcaagagaggggggcaccccgtgcctccctaccacaccttctggaagacatagcccccgctggggccccagcccacgatggggtcggaggayggcttcccgttgatgttgggctgtgagttgatggtgaggatgccctggcggttcacccgcagcagctcctccttcagcaggctggtctcagccgccaggggctcatcgttccagggcaggcaagtcacctgggagagacggtgagctggctggggcgaccatcaggtttggcaccctgagtccctctcacggcccccaacaaagacccagcctgtctttgcctccctaagcccttccaggtggaggtctcccaacttacccttctccctttgccatgtccacagcatggaggggagggcacaggatggggaagtcacagccccgcagcctggcctgcagctggggtcaggccaggggcaggggatgaaccagggtccccactccagcatcactcactttgtgaccattccggtttggttctcccgagaggtaaagaacraagacttcaaagacacttkcttcactggtcagctcmtccccccacatcttcagcagctcctccttgggggacttgctcttcaggtagaagaggtagtagtccttcagctccccaaaggcaggggaagaggaattgcccctggcagaggggtgcccagaggtcagggcacactcctgacagagggcagtgccaccacatgcccaggaggccattcctgtaaattctgcccctgactcctcccaggtcaaccacaagcatgcaaacttcttctgccctcccgctcccaagaacaaagatatatttgcaaggaaggtctgcaggccctcaccagcggycgttagggaactcgtcccactcctgggtacggtagatstaactctttggtctggaggcccagaagatgggacgtacatcttcctctcrgcrcttggggtgggcrctgagagcccagggtaggggacgcctgggtgaggatggggacagagaattgagacaagggattggctagagggagccggaagcaggggagcacccctgaggctgagttcttccatctgatgccctctgagactggagccttcgatgtgcccagctagccatggcacagacatccatctgtaccaccgtggggagccagcactgcagccggggctgctcttggaccctcctctggggatctctgggccactgccctcacctggggtcctcagtccacatccccaggcgcttcagcacctctgtggtagccatctcgcrgytgrgggtgtagaagtggaggcctggcaccaagccactggccagaagctcctggcacaggctcacggccagctcgatgccatagttgcggatggcagcatcgttgtctttgattggctcaatcacgtccttgatctcctgtggcacctccagcttggacagcttcacaagctgccgaagggagtggtagccctgtccaagacatgaggggctgtggcggctgctggccagcccgtctcccaccctaaatacttctcccccttccatcatccatgccaaccacagtgtcaggcagagggacccacgaaagtccgatcatattctaggagcacacctgggcttggcctgccgttttctcctcttttttctgtttttagagactgagtctcactgctctcaaacgccagggctcaagccatcctcctgcctcagcttctcaagtagccgggactacaggcacgtgccactatgcccagctttcccactttttacagagtagagcagctgccctaagcattccagccttgggttgagccagccttttagccctagatgtgtctgttggtaacatggtgtcatctaacccagctgttcccatgctgcactgatcatccgaatcacctgccaagctcaagaagtaaaacacacattccaaggacctccctcagatttactgagtgagaacctccaggggtgggacctggagatccactttttgaaaaagcttatcaagtggttctgatgacagccacctttgggaaacactgatttaagcaggatttgtaatgagaattagaatcccttttggtgatgcttgttggccaaagtacaacaaacccctcaacagacactgttgctgggttttggggggaaaattagaggtaaccaaaatggggtggccaagcaacgctgtgcaagttctggacctgagaggagatctgggaagaactcagcgaactcagcactccacccagagcccccagcctgtgcgaggacggtgcggtgagagtggggtggagggagcttatgggctctcctgggcccctcacctggatgggaaagatcccggggacgatggggcaagtgatgcccatgtcggtgcatgccttcacaaagcggaaraatgtgtcagcctcaaagaaaagctgcrtgrtgatgaaatcgrctcccgcagacaccttctccttcaagtgcttcaggtcagcctcaaagctccctgcttcggggtggcctttggggtaacctgccaatagggatgacagtcaggagaggctggcctccacctgttcaaggcgagggatgaagagaccacagggactgggcagagagagtcctctgctttgggggctctgatcttgcac

SEQ ID NO: 5643 - DNA, 15922 bp, Homo sapiens
ttgacctgtacaggcccctggctaagagtcaccccagtgggactgacacttctggttagaagcttcacctctttcccccactccagctttcaactctagacagctttctgactgcttctggagtggcagagcatgggataattgattcctgctgagggccttttctaccagtgttagggtgtagcccggaggtctcggtccccatgacccgcaattccattcctagyctccgggaccctgctcagcaagtgcggaaaacagcggggctggtgatgacccacctgatcctcaaggacatggtgaaggtgaaggggcaggtcagygagatggcggtgctgctcatcgaccccgagcctcagattgctgccctggccaagaacttcttcaatgagctctcccacaaggtgagaggcagagaggcactgagggctggctgcagagggaatctgtaggtcacctcatctccttaacatggctctctctgtcttacagggcaatgcaatctataatctccttccagatatcatcagccgcctgtcagaccccgagctgggggtggaggaagagcctttccacaccatcatgaagtattgctccccgggccctggggcacattttccacatagcacgggcttaggaatcagacacacctgtatttgaattccacctcggctactctttagctgtacagccttcggcaataacttagcctctctttgtgcctatttcctcttcttttgaggctgatgatacttaacccttagttcttgaaaatattaaatacgataaagttcctaacatggtggcagacatacagtagcactcactccctagcagctgctcctgttaatttccattcacagtgaaaattcctgagccgggggcggggtggggtccctctctgctgaatgggacagggcaaggggagtggtgaggcagacaggggccgtggcagagaacatcagagaagacgagtgctgggggagggtccagggttggtcttagtggatggcagagctggccctgggccatcgaacatcctcatcttcccttcctgcagacagctcctctcctacatcaccaaggacaagcagacagagagcctggtggaaaagctgtgtcagcggttccgcacatccckgtatgctgccctccctgagggttctttgtgctgagcggggccctgcaggggagaaaggcccatccctcaccccttcaatgcccccactgtggcatccctgggactggggaggctgatggggaaggttgagcctttactagctggatctcccagttcctcacaaagcccttcctatctgcagaactgagcggcagcagcgagacctggcctactgtgtgtcacagctgcccctcacagagcgaggcctccgtaagatgcttgacaattttgactgttttggagacaaactgtcagatgagtccatcttcagtgcttttttgtcagttgtrggcaagctgcgacgtggggccaagcckgagggcaaggtgagcagcacaggacacttcaatgcctgttgggttctgggctggctaagacatctgccggccctgggcagcatacggctcttgcagtcaccttcccgtcctccttatccccagctgggttgcaaccaaattgccagagtgacctaagaccagatctttgtctccagttctttttttattactccaaaaacacaaccaaagcagcatctcatccaattcttgtttgtttgtttttaatagtttttatttttcagagcagttttaggttcaaagcaaaattgagcagaaagtacagggagttcccttctaccccttgcccctacacatcacagccttccccaccttcaacatcctgcaccagggtggcacatttgttacagctgaacctacacttacacatcatctcctaaagtcatggtttaccttggagttcactgcacgtaatgacatgtacccaccattgcagtatcatacagaagagtttcactgccttacaaatcccctgcactccacctatttatccctctctccccacaacccctgatctttttactgttgccatcactttgtcttttccagaatgtatcattggaatgatccggtatggagccttctcaccttggcttcttagtaatgtgcgtttaaggcctccatgtcttccatggccttgtttctttttaatcagaagtaactgttttcaggcctgctctgaatctccttttctccctccaggctataatagatgaatttgagcagaagcttcgggcctgtcataccagaggtttggatggaatcaaggagcttgagattggccaagcaggtagccagagagcgccatcagccaagaaaccatccastggtacgtaaggcagcctgtgcgggcgagaccagactgggccctcccctcctgcagtgatttgtttcttcttcttttttaaatcacgttttcctgccttttctaggttctaggtaccagcctctggcttctacagcctcagacaatgactttgtcacaccagagccccgccgtactacccgtcggcatccaaacacccagcagcgagcttccaaaaagaaacccaaagttgtcttctcaagtgatgagtccagtgaggaaggtatgatgctcccgcctgttcccggccgagaaggcacacagctagggtgcagagggctggtttccataggacctgctgcgggggcctgagtgtagatgctctgccccactgccgcagaagggcctctcctgtacagcttggattttatttcttctgtgcggtgtgggattgtctcacttgttctctgatatctattttttcaccatctttgtgactcagctttttcttattcctttaattctttgcatagatctttcagcagagatgacagaagacgagacacccaagaaaacaactcccattctcagagcatcggctcgcaggcacagatcctaggaagtctgttcctgtcctccctgtgcagggtatcctgtagggtgacctggaattcgaattctgtttcccttgtaaaatatttgtctgtctctttttttaaaaaaaaaaaaaggccgggcactgtggctcacgcctgtaatcccagcactttgcgataccaaggcgggtggataacctgaggtagggagttcgagaccagcctgaccaacatggagaaaccccatctctactaaaaataaaaaattagccgggcgtattggcgtgcgcctgtaatcccagctactcaagaggctgaggcaggagaatcgcctgaacccagaggcggaggttgtagtgagccgaaatcacaccattgcactccagcttgggcaacaatagcgaacctccatctcaaattaaaaaaaaaatgcctacacgctctttaaaatgcaaggctttctcttaaattagcctaactgaactgcgttgagctgcttcaactttggaatatatgtttgccaatctccttgttttctaatgaataaatgtttttatatacttttagacattttttcctaagcttgtctttgtttcatctttcacattagcccagtttcatgcagcagagagagggttatcagtgcagagagagatgagtgagcccagagtcctagggcctgtcccgggatggcagatgagcttcctgccccgtcactgccacctttcccctctcaacctctggaccctgcacagtgaccagacagcctctctggggagaattatgcagtgcctaggctccagatcagtgcttctgaaccgggggcaattttgtctgccagaggacatctgacaacacctggggcctgttttgttgtcatagcctataggggaagaatgctaccagcatttgtgggaagaggccagggatgtggctcaacatcctgcagtgcacaggatggcccctcaacaaagaatcacacggcccacaatgtcaatagcgtcacagttgagaaaacctgctctagaccaagggttgctttctgccgtgtgcctcaccccacccccactcgtgttccctaatcccatctccaaaggttggcagcagaccggcccaggctcgtggaagttcagatcatgatcccctccagctctgcaggagacaagacctgtctcccagcattcctcattgttcccgggtctgcagagggcgtgagctatgctgcaggcgggctgccccctgaagcctgcgcacccctctccagctcctcaagtcttctctgctgagtcaccttcgaaccggaggctgtgagctggctgtcgtgaccacactggtgcctctgctgtcatgacaacagcacactacgtcagtagtgctccctgggcactgagctccctctttgcggggagaagacagtaatgaaaaatgacaagcatgaggcagaggggaagatcacgcttgggtggtgcaggagcatggaggtgctcttaatgctctcaatgagaaagggttaacggtcctggttgcaggaatagctgagtcagaggtggggcttcctccactcccccaccccacccctttcaccattagggaccttcttgccttgctcttgctactctgctctgggtggtcattgtgaaaagcccgcaccaaccatgccagtggcagccagacgaggacacagcctggctctgggtcccagcaggaaaggcaatcccagaaaggcagggtcagggactggagtcctgtgggtgctttttaagcaaagattatcaccaggcaggctaaacttagcaaccggcttttagctagaagggcagggggctggtgtcaggttatgctgggccagcaaagaggcccgggatccccctcccatgcacctgctgatgggccaaggccaccccaccccacccccttccttacaagtgttcagcaccctcccatcccacactcacaaacctggccctctgccctcctaccagaagaatggatcccctgtgggagggggcaggggacctgttcccaccgtgtgcccaagacctcttttcccactttttccctcttcttgactcaccctgccctcaatatcccccggcgcagccagtgaaagggagtccctggctcctggctcgcctgcacgtcccagggcggggagggacttccgccctcacgtcccgctcttcgccccaggctggatggaatgaaaggcacactgtctctctccctaggcagcacagcccacaggtttccaggagtgcctttgtgggaggcctctgggcccccaccagccatcctgtcctccgcctggggccccagcccggagagagccgctggtgcacacagggccgggattgtctgccctaattatcaggtccaggctacagggctgcaggacatcgtgaccttccgtgcagaaacctccccctccccctcaagccgcctcccgagcctccttcctctccaggcccccagtgcccagtgcccagtgcccagcccaggcctcggtcccagagatgccaggagccaggagatggggagggggaagtgggggctgggaaggaaccacgggcccccgcccgaggcccatgggcccctcctaggcctttgcctgagcagtccggtgtcactaccgcagagcctcgaggagaagttccccaactttcccgcctctcagcctttgaaagaaagaaaggggagggggcaggccgcgtgcagccgcgagcggtgctgggctccggctccaattccccatctcagtcgttcccaaagtcctcctgtttcatccaagcgtgtaagggtccccgtccttgactccctagtgtcctgctgcccacagtccagtcctgggaaccagcaccgatcacctcccatcgggccaatctcagtcccttcccccctacgtcggggcccacacgctcggtgcgtgcccagttgaaccaggcggctgcggaaaaaaaaaagcggggagaaagtagggcccggctactagcggttttacgggcgcacgtagctcaggcctcaagaccttgggctgggactggctgagcctggcgggaggcggggtccgagtcaccgcctgccgccgcgcccccggtttctataaattgagcccgcagcctcccgcttcgctctctgctcctcctgttcgacagtcagccgcatcttcttttgcgtcgccaggtgaagacgggcggagagaaacccgggaggctagggacggcctgaaggcggcaggggcgggcgcaggccggatgtgttcgcgccgctgcggggtgggcccgggcggcctccgcattgcaggggcgggcggaggacgtgatgcggcgcgggctgggcatggaggcctggtgggggaggggaggggaggcgtgkgtgtcggccggggccactaggcgctcactgttctctccctccgcgcagccgagccacatcgctsagacaccatggggaaggtgaaggtcggagtcaacgggtgagttcgcgggtggctggggggccctgggctgcgaccgcccccgaaccgcgtctacgagccttgcgggctccgggtctttgcagtcgtatgggggcagggtagctgttcyccgcaaggagagctcaaggtcagcgctcggacctggcggagccccgcacccaggctgtggcgccctgtgcagctccgcccttgcggcgccatctgcccggagcctccttcccctagwccccagaaacaggaggtccctactcccgcccgagatcccgacccggacccctaggtgggggacgctttctttcctttcgcgctctgcggggtcacgtgtcgcagaggagcccctcccccacggcctccggcaccgcaggccccgggatgctagtgcgcagcgggtgcatccctgtccggatgctgcgcctgcggtagagcggccgccatgttgcaaccgggaaggaaatgaatgggcagccgttaggaaagcctgccggtgactaaccctgcgctcctgcctcgatgggtggagtcgcgtgtggcggggaagtcaggtggagcgaggctagctggcccgatttctcctccgggtgatgcttttcctagattattctctggtaaatcaaagaagtgggtttatggaggtcctcttgtgtcccctccccgcagaggtgtggkggctgtggcatggtgccaagccgggrgaagctgagtcatgggtagttggaaaaggacatttccaccgcaaaatggcccctctggyggtggccccttcctgcagcgccggctcacctcacggccccgcccttcccctgccagcctagcgttgacccgaccccaaaggccaggctgtaaatgtcaccgggaggattgggtgtctgggcgcctcggggaacctgcccttctccccattccgtcttccggaaaccagatctcccaccgcaccctggtctgaggttaaatatagctgctgacctttctgtagctgggggcctgggctggggctctctcccatcccttctccccacacacatgcacttacctgtgctcccactcctgatttctggaaaagagctaggaaggacaggcaacttggcaaatcaaagccctgggactagggggttaaaatacagcttcccctcttcccacccgccccagtctctgtcccttttgtaggagggacttagagaaggggtgggcttgccctgtccagttaatttctgacctttactcctgccctttgagtttgatgatgctgagtgtacaagcgttttctccctaaagggtgcagctgagctaggcagcagcaagcattcctggggtggcatagtggggtggtgaataccatgtacaaagcttgtgcccagactgtgggtggcagtgccccacatggccgcttctcctggaagggcttcgtatgactgggggtgttgggcagccctggagccttcagttgcagccatgccttaagccaggccagcctggcagggaagctcaagggagataaaattcaacctcttgggccctcctgggggtaaggagatgcygcattcgccctcttaatggggaggtggcctagggctgctcacatattctggaggagcctcccctcctcatgccttcttgcctcttgtctcttagatttggtcgtattgggcgcctggtcaccagggctgcttttaactctggtaaagtggatattgttgccatcaatgaccccttcattgacctcaactacatggtgagtgctacatggtgagccccaaagctggtgtgggaggagccacctggctgatgggcagccccttcataccctcacgtattcccccaggtttacatgttccaatatgattccacccatggcaaattccatggcaccgtcaaggctgagaacgggaagcttgtcatcaatggaaatcccatcaccatcttccaggagtgagtggaagacagaatggaagaaatgtgctttggggaggcaactaggatggtgtggctcccttgggtatatggtaaccttgtgtccctcaatatggtcctgtccccatctcccccccacccccataggcgagatccctccaaaatcaagtggggcgatgctggcgctgagtacgtcgtggagtccactggcgtcttcaccaccatggagaaggctggggtgagtgcaggagggcccgcgggaggggaagctgactcagccctgcaaaggcaggasccgggttcataactgtctgcttctctgctgtaggctcatttgcaggggggagccaaaagggtcatcatctctgccccctctgctgaygcccccatgttcgtcatgggtgtgaaccatgagaagtatgacaacagcctcaagatcatcaggtgaggaaggcagggcccgtggagaagcggccagcctggcaccctatggacacgctcccctgacttgcgccccgctccctctttctttgcagcaatgcctcctgcaccaccaactgcttagcacccctggccaaggtcatccatgacaactttggtatcgtggaaggactcatggtatgagagctggggaatgggactgaggctcccacctttctcatccaagactggctcctccctgccggggctgcgtgcaaccctggggttgggggttctggggactggctttcccataatttcctttcaaggtggggagggaggtagaggggtgatgtggggagtacgctgcagggcctcactccttttgcagaccacagtccatgccatcactgccacccagaagactgtggatggcccctccgggaaactgtggcgtgatggccgcggggctctccagaacatcatccctgcctctactggcgctgccaaggctgtgggcaaggtcatccctgagctgaacgggaagctcactggcatggccttccgtgtccccactgccaacgtgtcagtggtggacctgacctgccgtctagaaaamcctgccaaatatgatgacatcaagaaggtggtgaagcaggcgtcggagggccccytcaagggcrtcytgggctacactgagcaccaggtggtctcctctkacttcaacagcgacacccactcctccaycttygacgctggggctggcattgccctcaacgaccactttgtcaagctcatttcctggtatgtggctggggccagagactggctcttaaaaagtgcagggtctggcgccctctggtggctggctcagaaaaagggccctgacaactcttttcatcttctaggtatgacaacgaatttggctacagcaacagggtgrtggacctcatkgcccacatggcctccaaggagtaagacccytggaccaccagccccagcaagagcacaagaggaagagagagaccctcactgctggggagtccctgccacactcagtcccccaccacactgaatctcccctcctcacagttkccatgtagaccccttgaaraggggaggggcctagggagccgcmccttgtcatgtaccatcaataaagtaccctgtgctcaaccagttacttgtcctgtcttattctagggtctggggcagaggggagggaagctgggcttgtgtcaaggtgagacattcttgctggggagggacctggtatgttctcctcagactgagggtagggcctccaaacagccttgcttgcttcgagaaccatttgcttcccgctcagacgtcttgagtgctacaggaagctggcaccactacttcagagaacaaggccttttcctctcctcgctccagtcctaggctatctgctgttggccaaacatggaagaagctattctgtgggcagccccagggaggctgacaggtggaggaagtcagggctcgcactgggctctgacgctgactggttagtggagctcagcctggagctgagctgcagcgggcaattccagcttggcctccgcagctgtgaggtcttgagcacgtgctctattgctttctgtgccctcgtgtcttatctgaggacatcgtggccagcccctaaggtcttcaagcaggattcatctaggtaaaccaagtacctaaaaccatgcccaaggcggtaaggactatataatgtttaaaaatcggtaaaaatgcccacctcgcatagttttgaggaagatgaactgagatgtgtcagggtgacttatttccatcatcgtccttaggggaacttgggtaggggcaaggcgtgtagctgggacctaggtccagacccctggctctgccactgaacggctcagttgctttgggcagttactcccgggcctcactttgcacgtgtgcttacctagtggagacaaaagtacatacctcggtagagcgcgcacgcctgtaaccccagcactttgggaggccaaggtgggtgtatcacctgaggtcaggagtttgagaccagcctggccaacatggtgaaactccgtctctactaaaattacaaaaatcagccaggcttcatggcacatgcctatagtcccagctacaggcatgctgaagcaggagaatcgcttgcaccccggaggcagaggctgcagtgagctgagaccacaccactgcactccagcctaggcaacagagtatgagactccatctcaaaaaaaaaaaaagtacctacctcagagttcaaactagtgaatattaggaagtgcttgagacagtgacaccaaagtgcacaataaatactcgccagtttcattattattaaagaatccatttgaatgtcagctcaacacagcctcctataccgaggcattgtgaaccgcatctccccagcttctccaggcttttccaagaatcagggacactgtagcctgttggtctcagtgtatgacagacacggaggaagcacatctttagctgatacttaaacagagaccctgagcgcacatacacccgcgcacacatgcatggagcttcaccttctctgtcattctgcagtgaccaggagagcaagagctcccacctcccttcaaaacactgtgcccatcccgggcactaaggcctctttaaagcacggcacctccacgagggagggccacagccacatacactccacctggcaggtggacagcgtgagcatgtggaccatagcagggacaaggtgccccggccagccccaacgccctctgccgctgacagggacagaagccctctccagctgcgtgtgctgcagaggccatgcgtagcctccagctgcattctattccactccagtgcctgggccagttagcaccagtgtggaagacagtgagctggctccggacaacagggatggaggaaaggtcccacattcacattcctgatacgtggacaaggtgaggggccgcaatcgctctggcagcattttaaagatggggaagtagcagacacccacgcgtgaaggcaggagagccccaactgtggtggaaatggccccagaatggtagggccaagcctagctccagacaccccagagccctggagaagccaagactgagggagaaagcctgagggaggagcgccccagtccccagggrccggcctggtgcagagctgcagctgatgttcccctctgtgcagccccaccctctgcctcgctgagctccctgctgcgagggcctcgggtgcaagggggaggcaggtctctatctcatggagctgtcagatgagacatcgcgatcggagtcctcagcctcgcttggcggcggcggcgggtcgctaagcgggaccgcagtgaaagcaggagactttctagaaaaaaacaccagttgtcaaccttggggcaggcaggaatcctgaagacggacggcactcctcctcctgctgcctcaccctctggcagcccgtgagaagtaccggaagcgagggcggggccgcgggatggcgagggagcggcagggactgaactctctccaaacccaccctgacagggaaatgggccccgcctgtgtcttgggaactcagaggctgaggtcaggcatgatggctcacgcctgtaattccagcactttgggaggcagaggcgggtggatcacgacgtcaggagttcaaggcaagcctggccaacatggtgaaaccccatctctactaaaaatgcaaaaattagccaggtgtggtggcgggcgccttggaggctgaggcaagataatcacttgaacctgggaggcggaggttgtagtgagccaaaaaaaaaaaaaaaaagaaatagctgaagtcacagtaggagagaagctgctgagcctccagcaccctgactctagggccttggctttatgtctatctgcagtatttttgtgatttttaaaaattcactttcttgttgcggtgtaacttacacagggtcaaatgcacaaatcatggccctgactttagataaaaatctgcccccacaacccttctgttccttgccagtttttaaactgcctctaaccaggggaaccaccagagctggtggccttgggaggtttcagccctcccgtcatgaatggacatagctcatccaactgccaagggagagagctgtgggtctgggccagccccaccaggtaactcccaaagggcagccccacagcaagatgtgacccagtcattgcctgagggtctctggggctgtgttccaacctttctccccgctgtgtccccctggaaggccccatgcccaggggaggcgcctaccggtctccagactgggtgatgagccggcggcaggtctccatctgcacgtccaggccgcgcttcatgctgcacatctccatgtactcgtgcaggtgccggttcatgtcgttcttggccgtggccaactccagctgtggtggggcaggcagggccatcggggttaacaggtggcgttcacagcgcctctgttgcccccgccaggaggccaacacgccaagagcagtggctgggccgggggcccaggcagccattactgaaggctcagattttaaaataaaccagaccaaggcagaaggcagcgaatacaccattgtttcctctgcttttcctggaaatctttgcctatggaggaatgcaaaggtactgctgcaggctgtgttcttttaagactgataagagtggtgaggaaagtcagtgtgggcgggatggagcagatccacaggctcccagggccacacaggttcctatggggcccggctcacccctcatcccctgtactgcgctggtcctgggctgtcccctcactgcactgtgagctcccgtaagggttagcgacaggttttcctcatcctggcagacccagacctcgaagggaattaactctctctgtgacccgtggcatacaagcctggctaactgctgaaaggggcccaatcctcttaccattctctccttatcactttattttctcacctaaaagccattttcagacactaaaaggaagactcccatattggaggtgccattgattctgagacctgtcctgatttcagaaatgtcacacgtggaaaacacggggctcagaatcaaagaaatccggtctccctccccgggcccattctgcagcccacactctgaggcaggcggagaggcagggcccaggcagcacaaactcagtgccagggacagtcgactgcctctctttgttttgggtacaaagggcaggggccgcaaggggaagcaaaatgaaacttcctggagatgacgttcgtgactgcctgagtgaagagaacggggaggataccagctgccataatgtggattggacagagagggtgggaacttagagaaagaaggaaacaggttacagggccagacagcagagatggtcaggacagtgacatttggggtgagatggcggctggctgggtgagaagccctagtggggacagcttccctggcaggcttggatccacagctggggccccacagtagtgggaggagcaggacacggtgactgttcaacccagggggaaaatacagtgccaccagcccttgttcagatcagctgcctacaccccaatttctccaccttggaagaaccggagtgcagggagctgggttctggaaccatcactcagggagactgggaagaaggaaatgaaccaaatatattctactgaaatacaaggctagtactgccaccagtagtctctgcatatgtctatgtccccacttaattcacaaatttacagcaggaacaaggtcaggaggtgaacgtgcatgtcaggagatgtccttgacaagccaccttgaaaactgcaggctcgctgtgtgaacagacttgggggtgggacgggaggagacagagagaggtgaggagcggtggggaagaactgcctcccgcccaccactctgggccttggctttaccttgctccatcttagtgaccctgagagatcaaaggtcacaaagataaaggcaccttgggtactcctgaggtcagcaagtcctcctaacggttcccctaatgcagaagtccccaaaccccaggccacggaccagtacctgtctgtggcctgttaggaaccaggccaaatagcaggaggtgagcagtgggcaagtgagtgaagcttcatctgtatttacagctgctccccatcactggcattacagcctgagctccacctcctgtcagatccgcggcggcattagattctcacaggatcctgaaccctaccttacgtgaactgtgcatgcgagggatctaggctgtgtgctccttatgagaatctaatgcctgatgatctgtcactatctcccatcacccccagatgggaccgtctagttgcggaaaacaagttcatggctcccactgattctacattatggtgagatgtataattatttcattatatattataatgtaataataatagaaataaagtgcacaggccgggtgcggtggctcatgcctgtaatcccagcactttgggaggccgaggtggtggatcacctgaggtcgggagttcgagaccagcttgaccaacatggagaaaccccatctctactaaaaatacaaaattagccaggcgtggtggcacatgcccgtaatcccagctacttgggaggctyaggcaggagrattgcttgagcccgggaggcggaggctgcagtgagccaagattgcgccattgcactccagcctgggcaacaagagcaaaactctgtctctaaaaataataataataatttttaaaaatagtaataaagtacacaataaatgtaatgtttgaatcatctcaaaatcatttcccccgggtcagtggaaaaactgtcttccacaaaccagtccctggtaccaaaaaggttggggactgctgcctaaagtcattgcactgggagagaggaggagtcagatgatttgaaaatacttttttttttttttttcctgagatggaatcttgctctgtcacccaggctgtggtgcagtggcacaatctcagctcactgcagcctccacctcccagattccagcaattctcctgcctcagcctcccaagtagctgggattacaggtgcccaccacaatgcctggctactttttgtatttttagtagagacggggtttcacatgttggt

SEQ ID NO: 5644 - DNA, 12201 bp, Homo sapiens
acccagcggcctctgctggccacttggggaacctgcatggcctgacctctcacccacactctggaaaatagagtgaactgtgagccagctggggtctgacatgcaggccccataagccaaggtaaagatgtgggctgtgtggagggtgaggggcagccctgggacgggttgaagcaggggaggtgccagggccggatttgcatttctgggagatccctctgactgctaaatagaggctggatggcaggggtgggccccttacagtgaaataccagcctagcaaagacactcaggcactctgtgctaccggtatccatgggcacaggacactgggccactctcccaccctccttacctcacactgttccagcctgtgtgccgctagccccttgctgtcctctcttgagccactgttgggacgcccgctgtacaacctcccagccaaggtggcagctggaagggaaggagcaagtggcaggtgagtgacagggaggtgctgtggacagcagacagcagggcaggggtggggccgggacaggccacataccctcaatctcctgagcccgtacacggcggatggcagctcggatcagcttgcgctcctcatactcaccagcgcttcgcaactgtgggtaagagacaggtcgcgggtgttgggctgtggagtccaggtcttcacctgccctgcccccatcccctgccccagcctgggcctcaccagtgcagtcaattcctccacatcgttcatggactccagctgccctgccagccgtgccagggcagcccgctgctcagcttcccgctgctgagagctgcagagacatcatgactgtaaccaccactgccatggccaggtcgtggaggatgtgggctaagggtaggagccagaacagagtacccagaaccttggcagaagggcatgtggctgtgcacaccctctaactgcacactgatacacatatgcccatggacgtgggcactaataccacacactcagacgtgctggctacatcagcacggccgcgacgccacaatcagtacatgctccatgcccacaaacatctctgtttttccagaagcgtgtgtggacgtactgccattagcacatgcaatccacagatacacttgtgctcacgcctgcctgcacacatgagctgagccagggctcacactcaccttctcacccgcatgttccaccccccgctactcactgcagccagttctccttgttgtcctgccgctcggcacggaaacgcttggatgccagggcctcctcctcgcgctccagctcctgccgctgcagttcccggatggctgagcggatgcgccgccgctctgccagatctgctgtgacctccagctgcagtgggtgcgagaggcaggtcattttggctgccaggggcggagggctggcaccagctgcccacggctctgcctagggcacaatgtgtggcctgtgtccactccctgtgtcccaagctcttcacgtgcctgcctgcccacgcagggtcccgggggtagacccagcccactgtttcagggatcttgggtagtccactttgcattgtggttcacagagcacacaactgtgagtggacagccagaaactgcccacttgtgccaggtgccaagccaggcactcctttctacaactcgattcctgcctctcagagcccagatccccaaaagtcagggagctattgtaggaggaggagggaggccaccctgtgggtcactaacagggtccctagagggaaaggtgacagatgaagtccaccctctgagcaagggaggctccctggtctagtcaccaaacaccacagcccagctgggggttgactgcttcatccacagatggggaaactgaggacaggtgctcaggagtcctgcctggctgagggctattgtccccactgcactggcctggacctagccaccatggaagaagccagggtgcagagtgggaggaccaatcccccagacatataaggtggctggcactaggggccaccccagggccttatagagggcatccctgggtgacagctgcttctaccggttctcaacccctcagttcccgggaaattgggggtgactggtctaaccaggttcaggaaagaacaccttctctggagtgagtcagccaatcctgttgcctcccccacacctccaccatgtagagccacctgctacatacagatcctccgtggctcaagggagagaggactggcccagggttcccctggaagatagtggcagagataagcctccagtgtgggtctgataaccagacgggagccagtaaaggcggggtgatttcctctgtccccaccccccaaatcattcaggggtagggccaaagaaccctctatcatctccctttttagcgcccccccgtcattcctttctgcttagcgggaaggccaggtggcaagggtggggatgggatggagatagttttcagcagggagtgtgggctggcccaactcagccatgagccagcttgtcctagtctgaagagagcagggagagtcttgggggaagagccctccaggctccacattcctgaggaattatgagaagaccccctgaaactcaggccagagcccctagttggttccagccctagtccaatcctggctgggtgatcaagagcatatcccttaaactctctgtgtcttggttttttcatttgccagtgggtggggttgggaacagtgacttggcctctcctgtacatagctgcagttgcaataagcatcacccccatacttggttctagccagtcaggaggagggagagagacaagggggcaaatgggaagggcaggataccccgaggcatcagtaacatttatggagagcctgtgagtcaaaccctgtgctgagccccctacttgtcctaagcccacaaaaaccctagatactactgttattcccatttgacagatgaggagattgaagtccagggaggacatgtgatttgctcatggtcaaatgacctgagccaggatttgaacccaggtctctctgactccagggcctgccctaggctgaagatagctctgctactggggtctgtgtgtcatggtggggacctcagggatcctggcactgtgttggagacccctctagcctggactagagatgctctgaggcctaaggaggccttatagcagaggcggggggaatgaggctcactccccagcccccggtgctggctgtgtctcaggcctagagccttctgtggtacatttggaggctgggggctggaggggacagagggtccagccccttctgtacagagggtaaagaggcccagaggggcaagggctagccttttgtctcctaggtccccattctcagtgctctgggctcggagatggggtgcttgtctctgacaaaagcctgatgtaggaacttggccacctctacagcacaacccccggagcttcagtgtccccatctggaaaatgggagcctccctctgatcccccaaagtgggtgggcaaggctggagactgacaacctcattccactggtcaccctctggcacgacccttccctttgggcctggaggcaaaggttggaccacagtgtctcctctgtgtgtcccgagttccacccgcccaggccccaccgctgtgtaaggagggagctgtgggagggagggaaggaagtacaaagcgccattgtctaccgagggggaaggggaaggggatggggcggtttccgaaactgcccagtgaaattctcccgggaggaaagagggtgcttcctccccctggggagccggctctccgtgtactctctgccctcgctgttgggaacgcctggcaggccctgaggtctcactgggcctcagtctccccaacagcacaacggagggggctctccaggctttcagtcccagctcccccggttgcccatgggggtcccgccggcggtggagggaagcctcgccagggggcgctgaaggcccgcaggttctgcgaccgccctccctcgcagggcgccgccctcgcctcgcccaccctgcctcgcgctaggcgccgaaggggtagccaggtaggaagacacccgctaccgcctgcttcagtgtccggatctaaagggaagaaaccaaggtccccaggacacccagctgagtggcggaggtcgaactcgaactcgggaccgaggcagagggcgtcccggcgggtggtggaggggcacgcggcgtgcaagtccccaggcgtccccattcctcccatccccggcccaatcctcaagaatgtgcgggagccggggccggaagcgactgcccgcgtccccaaatcggccagacgctggggcgcagggcgggcggagcgggcctagcttttccttatatggcccggccccgcggggaggagcccggctcgggacgcccccgttcttgccacgaggccagcgggggccgggccggcgcgcggggcgcagtaatggcgggcgccgggtgctggaggagccgctcccggggtcggaaagacttcgagaggcaccgatcccgagaccggggcaggttctcatctgtcctttcccagagattcaaccactgctccagcttctctccaaaactcttttccagcgccgcccgagcctcgcttaagagagggaggtggcggctgaagaaccctgagcctgcctgtggataccttgagatgaggatgtgcgggaaccaggcctggcattccctctttttggactgtgctgcctctacgacccccactgggacttggacttcctgagggaaggtcgaactgactggcgggcacctttggaaacctaacctcatcccctccaggctgcacacatcctgcggtgatagtggagaggcagacacccagagagtctaatgcgctggtccgagaacatacaggcagagtgccttggggaggtcatggcagcagctgggcactgcccagtggctgggctacgctggttggttccagcctctgcctgcgggggaaggtatgagagtggggtgggtcacttgtcttctaggtaaagtaaatctttaatttacccccatggacaagggtcagggactgaggagatggagctcctctggcccctcctccaggtcaggctgcctggcctttggggttggggaaggagccctgccccactgggttgccctacggcctctgtgcatggaggtagacagggctctcaggaagaggaacaagaaaggggatggagtgggctcatctttcctccacctgagatctgggtccatgcctcattctgtccccatgccaactctaggacctagagcttgtgtgcaaacacatctccctccctcccttcattttacaggtagaggaactgagactcaagagtagaaaaatgagatgagaagccacagaatccataagggcccacaaaacctgtctctctcttatggcctcgtccagccttgactttcccaggactctggtcccccgtggcccactatggggttgggattttggcacagctccttcttagatgggtgtccttgagcaggtgattttaactctcttgagtcgcagtgcccaggctttcagagctgctgtgattattctgtgacatggtatacccagtacccagcctgccccctgccaggccttggcattattaatcattgctgctaccattatcactgggccagcttccaggggtgggcattgcccgagctattgctctggagaggcatatccagcctccccacacctgtggctgcatacgggcgagtctacagcagttactgtttaaacaggtggtggctgtggagggttgggagggactaggcttcagtaccaggcatggacaggcacatgccacaagggcctctgcatcagccacatggaactggcctacccctgttcccatgtccccctcctcctgacctttcccccatcacttcttcctgtcagctgagaggtaccctggattgaccctgcctctctggcttggctttcctgtccccacagtgggtgatggggccacttaccagcttccgaagggctccctcatccagcccagctaaggcctcgtccgccatctcgctggccyctagctccgtcggttcctttctggtgagatccccagtgcctgtggcacctgtcaccagctcagagaattctgcaggggacagacatgaatcaggcatgctggggcttccagaaaccacaggcacttaggctctgtgccttactttccctctctaacctaggagcgtccattactgtcccatcctataatgtggctcctggctggaagctgccctctgccctagggtggtttgctggaaaactcaccaaacccagggtagggggtctctggttccagccctgccagcttggccgccagtctgctgtgtggcctgggatggactctcatcctgtctaaacctcaaaacagggagggcagggacctggattgagaagccagggcctggcaagacccacccaagctgtgcttaccaccagggggtgcactccagtctccagtttcctgccccacccacccatccacagggcctacccagcccccacccactccgcaggctcagcttctggctgtgggctgaacccgtagttcttgctgccaccaccactgtcattcccccaggtataggaaggtacactgtgtcttccgattcttggagccagctctgctgtccagacctcctgaagccaggtgtccaggcacccagcacctcctgccaattcatacagaattcaattccccacctggaagggctttcagaagctgacctgcccaacccctggatttcaggcaaactgagaagattggagagggccaaggatttgtcactgagcaaggaggaagccaaagacttagagggcagagaaggatgtaatcaaaatcttcgtcatctccggcttccgaagctcccttccaaagtgccctcaagggcctggaacactctcagtgacagaggcaagagccccatcttgccccagtgctgcccatcaaaatggacccctaaatcctggcccagcctcccagcgcagatctctccttcctcctgtagccccaactaatgtctgtctggaatttgaggggccctggtctggcacactgtggatgcttagttaatgtatggtgactgactaatgtgtggccccaggcctgccccccacctcctgttgattcatctttcaatcatcccttccctctcttcagaacagtcacttgggaagtcaccccatacggtgcatgggtggggggtgagggttaccgctccacacagttggggtgtgtgggtcccagcctgttcaagtcactgcttgttccccctcccatcctggtaggctcagaggtgtcaacctcccaatctctgcctgttaggatccttgcctcttacctagttactctgtctgggttaaacctcttcaagactgtccagtggtcaccagccttaggttctgcggacattctgattccccccatgtctgttcttctatggggcagctgaccctaatgcctaatctaggacacccatgggattataagaagatccctgccgctgctcttctccaatctccctgtcacacagtctggggtcgccggacattgtgaggggcctcaggattctgtggcagcttccccagggtttctgccgccacagactagcgcccctgtggggcgtggagtctcttaggaatccgggggcgtcttcccccaacagtctcataactttatcccatggcttagacctctcgtatgggtgggggctcccaggtctggacgttccagaactcctgtctagacatccgggttccacccccggacacgttggggcagcaccaggatcccccccgaggtccgcacacccacctctcagtccagcccacccgtccggcgcaggctcggcttagctctttcgggacccgacagacggattagacacgcgcaggccggaggtgccgcgacccgctgtcccaggcccgctcagcaaccgtcccctggattctgcggagagctgcccgtccagccgcgccagcagcccggctggccccgccctgccccgacgcgccagccaaccctcgattgggtacctcccactctcgtgccccattgggaaaattcaatttgacggccacgccccgagaggaaggccccgcccctcgcgggccagggaggtcggaaattgggagtcttggggtcgtctgcctcggtggctttagcgagtcgggtgggcatcggcagggggacgcaggctctgcgccaagtcggggggggcgccccgagccgaggtaagtttcctggggtcgtaggagtctcagagccttcaggacagcccctctccgccctcctctttgttcctgagaccacgtcccctccctcgactccacccctttctcgcgtcagtgtttaagcttggccgccgtccctaggctgctttcgggacacctggtctgagccacctcagagcagggactgagtgactggcagcaccttgaccctgtgttggagtgccgggaccatctcaggtggagcagaatcaatcacacagcacgcctcccccagcccacacacctttgaacagacattgccttcttgtagcatgcttctaccttccaagccctgagagtctgcctttaggagcgctggagtcctaaatagggaatatggagtccaggctgtcattcagcaaaagggggaaattgaggcccagagagagctgacatgtccaagaccaaacaaggaatcagccagggtacccaggaggtcagatccacaaggcaaagctattccatcttcagtgccagaggccctaaagccgcccttgggtctccatggagactaaagtgggtggagttgggaggatggggtctggagtcctgtcaaataaaaacaataacaaatcatttattttgtacttgccatgtaccaggcatataatgcccataacaagcacatgagaccatgactattgccccattttacagatgaggacaacagctgataagtagtaaagctgtgattcatacccagcaccttctgagtccagaccctgcttttaaccactataatgtgggattctggggaggtggtttcagcctgttaacccagaagagccccggttcaggtcctctgtgacaccccccagcccccatctaaggaaaggcccagtctccacactgagagtcttttccatgtgtcatttcatttcatccccacacccctgagaagtggtcccattttacacatcagaaaaccaaggcacgggccaggtgcggtggctcatgcctgtaatcccagcactttgggatgccaaggcaggtggatcacccaaggtcaggagttcgagaccagcctggccaacacggcaaaaaccccgtctctactaaaaatacaaaaattagtcgggcaagtggcatgcacctgtaatcccagctacttgggaggctgaggcagtagaatcacttgaacctggaggcagaggttgcagtgagccgagattgtgccactgcactccagcctaagcgacagagcaagattctgtctcaaaaaaagaaaaaagaaaatcaaggcacagaagaaagcgacttgtcaatgctacacagcaggagaggcaaacagagctcacttcggaggacatatttcaaggtcctaggctttctctacctgggcgagatgccatgttattatccagaacgagggtcaggcgccctctaagaccaattctgaatacttcaaaattcacgcgtcccttgggacctccccttcatgcagggcacacctaggccacctctgattttcagggcctgcctgaatggcggtcaccagctccaatgaatggcctgctttgtgctaatgccctcctttctccctgccctactgtaggctaggaggaatggtacaggtgagttcctccatgcttggatttactgtctggcacatgcgctcactagcccttggccctatggaagggatgtgtgggtcctgccccttcaagcccttagtgcctgggtccacctccagacatacccgcctgcctctgtcttcctctctgcaagggagtgggggtgatctagagatcaaagggcagtccggtacagtgctagggaagtttacagctacagccgaggaaagagtaaacatcccgtgacgagggccccagcatttgctgaacacctgttgcatgtcagacgtggggctcccactactgccaggtgaccactgtgcaagataggtacactctgattcgacagaggaagctgaagctcagggaggtgaaggcaccttggcctagtaaaggcattcagactaaagtggaattctgcctgatgctgaagccccttccctccactttgctgccactaggatgggggaagctctggaagacttcttagggaagtggtgtataaactgtgtgtcacacttgtttttattttattttattttttttggagacagggtcttgctgtgtcccacaggctggagtgcagtcgcatgatcacagcttaccatggcctcaaactcctggctcaagcaatccttccatctcagcctcccaagaggctaggactacaggcacacaccaccacgcccagctaatttttaaaattcatcccacatagaagagggggaaaggcatgaaagggcatttgtggcagaggaacagtgtgagcaaagaccaatagtctgggaaaaggaggaggataggctgtgggcggagcaggaaatgtgggtggttctctttgccaaggattctgaatgccagatgagcaggatgaatgtatcttgtgggcaccagagaggcctgggcctcagcctgccccctgtaaaatgaggtgattagactggtctgcttcaagccttcctagggcaaggggctgtcacagaaagggtctactctaggttcttccaggttcaaccctggaaaggcagaatgggaagtggctggagcagctcagaggctaggggtaatattttgctccagagctcaagtctgagaatgactattttaccaagctgtctgtgttgcatccctaagtcaccctggctaaccctccacccagtcagggtccttcagagaaagcccaggccttgggtcaggaggcaagaagggtgatgggtgtcttacccctggctccaaccctaggtaagggttggccctcttggagcttcaacttgctcatatgcacaatggaggagctgtgccttgggctctctaagcctctctccccaggacagcactgtcattctggagacgggaacagcattagcaaaggaacggaagtaggattgtgacgaccttgttgggcaacagacaggcaggtgaggctggagaatggagcccctagaggtggatggttcttgttggggttggctggatccaaggggtatgaccttcctccttatgtgcagaactggatgcgtcctaggtcatggccagcagccctcggagtgggactgaggacctgctgggaaaccagtttggcaaggccatcatctccaggatgtcatccagccgctgtgttctctgggcaacagtgccaggcaaacttctggccctgcaggaggagaaggggcctcagatgcccactgggcagcagtgaattccaggagacccagcctcacagacaaaggagaggcaaggggctggaacaggaaggagagagttctggatgtgccagcctggacctctttagacttctgggagtccctgatgcctgggcgcagggagtgggggtctaggctcatggtgggacactatgtaattgctacctgatgggttggacactggctcctgatcatgcttatactacatgtgtggcaattttgttaccactatgaccttcacagcttgagtcctgtgaggtaggaccaccattatacagataaggagacaggctcagaaccctcgttcttttgttgttttttttttgttttgttttgtttttgagacagagtctcactctgtcgcccaggctggagtggagtggcacaaccatggctcactgcagccttgacctcccaggctcacagtgggactacagacacgtgccaccatgcctggctaatttttttattttttgtagagacaagggtctccctatgttgccggggctagtctcgaactcctgggttcaagaaatccgcctgccttgaccttccaaagtgctaggattacaggcgtgagccactgcgcccggccaga

SEQ ID NO: 5645 - DNA, 17659 bp, Homo sapiens
gtaatgctagcttgccagtgtgtcgctcacctcctgctgtgtggccttgttcctcacaggtcgtggatcgacctgtccacggcccagcgtttgtgaacccccgctctagaggatctagctcagactcttacaaagtgagtaattaattagtgactcaactggatataatatttttctaccacttaaccaatatctagactgctttaaaatttaatagaaaggaggtcgatattaagaattttttaggccggccacagtggctcacacctgtaatcctagcactttgggaggccaagacgggcggatcacttgaggtcaggagttcgaaatgagcctggccaacatggtgaaaccccatctctaccaaaaatacaaaaaaaattagccaggcatggtgccacgcacccgtaatcccagctacttgggaggctgtggcaggagaatcacttgaacctgggcggcggagtttgcagtaagccaagattacaccactgcactccagcctgggtgacagaatgagactccatctcaaaaaaaaaaaaagatttttttaaaatctcaagatattaaaatatattgaaatctacaacaaagtttttaatttgtttcataatcacacaaattccattatgtgcaagaacaatacgctaagtatctgatgcgaaggtttcaaaaatatatctcacaacataaaaataactctaaaacttcctattgatgaggtaaaaagataaaaattcaataaacctttagtgagcatctactatgtgctaggctctggaaatacaaaaattgtggaagattaggtcctcagaggctacaagggaagacaaacacaaacactattcagtaaaaagtgtttttattgcaggagaggcagaatataaggtacagtgaacaccccagaaaagagaatgtgaatcttgaacaatgactagaattttaattggcaaacgagggagagaggataaaaggcatggctaaaggcatggaaataaaaaatgtaaagatctagttgaaacgtaagcaagttaaccaatttctataaaggatacaacacaatggagatgtatcaaccataagctaaatgataaaatgtactatatccaaatttagagagaggaataacaccatcaaaatgatactgttcaaagattaatatgacagcaatatgcatgctagattaaataagggagagaatagaggcaggaaaaacaattaagctattactatactctagggataaaaataaggctaggtgcggtggctcacgcctgtaatcccagcactttgggaggccgaggcaggtggatcacctgaggtcaggagttcgagaccagtctgatcaacatagagaaaccgcatctctactaaaaatacaaaattagctgggcatggtggcacacgtctgtaatcccagctacttgggaagctgagccaggagaatcgctcgaatccgggaggtggaggtttcagtgagccaagatagcgccattgcactccagcctgggcaacaagagcaaaactccatctcaaaaaaataaaataaaataaaataataaaggtatgaactaggttgccagtaaaaagtggcaaagaaaagaactgatgccaaggtaattgtaaagaaaagactgagctagaagacagactggattatgcatagacaaggggaatgagtaaacaataactaaaatgtttaacttgattctaaagattaatacatcattaacagaaacaggaacatcaatgagaagagtagacttgatgaagaaagatagacctgttttaggttgaatttaaagaaattcctgacgatgtaaaattgtcttacaaccaaattaataatacttttaaaataattagttaaaaaggatgctggtaaagtctaaagataagtatctctaatgttaacggataaacgtaaaattataatactgaattgcaactatgaaaatctatatttgaacaataagaaatcctttgaagaaatcacaaaggttaacgtgaatacagtagttgccattctatggcaaagggggtgaacttgtatttactatattactacttaaaagacattattaaatataaaattacaatacatttaatatttcatttcaaatcaatacataaccccaaaaaatggaaatgaggcttggagctttgcagaaatgagggaactgtaaactgacttggaagtcactggcacagaggaaaaagaaaagattttaaggctaaaatcaacaggctaaactcaaaactgctggagaaaaatctcagccctgtattttatgcacaccagtatcagtaagaatcagcaataaggcattctatatataactttattaatctccttaaatctttacaaaatatgctaaaatagagatataatcacatactgtaaaactctaccaggtagctataaaatcagaagctgattattgccccattggtaataatgaaattctactctagacctcggttctagaaaaaccagaaatttgtatctatggttaactttgtgctgttttgtagctttgggggtcaggtcctgggtagagtgggtgggggagaaaggctactctggagactaagataggaaatttgacaagaaacgctgctttttcttctatacagaggacacatttctatacaaaaagaacagctgaagactggatatcttttataacttctaatgaggtagcacattcaacaaattaataaacctttaaatataagctctttaaagtaaaagcaaaatattcgattttcaaaagcatatttgtgggttgtgatgttcctaaaacttttctcttgacaatgaaatttagaacacttgatcaaaaccagaaagtaaatgaatattcaaaaaacaatcaacaattaaccccgttatacattttaggtattctacgatcttttgagaggttaaagttttaaagaactattcaaggactattaaatcagtgattttagtttttacaattaagtatggaaaacaagctaagttcaagagatttcttaaaggcttaaaattttcttgtgtgtgtgtggtttttaattttatttattgtctttcactaactgttgtcctaaatttgcccaaagtgaactccctgttttcatagtaacaatgggaaaaaagtacaagagttgataaataagaaatgagagtgaagaaaacataacacaaatttttaatgcttgatattttaaagactttggcttcaccgatttaaggcatttgcagatawggaaaaatgttatggaaaaggggaggcggttggagattatcgggtcaaacccacactcacagtgacaaaaagtgacagaaagatattacgcaaatggagtaaatttagaaacttctgtttgtcaactaaaacaaaatacccaataaagatatatctacacaacaccaaactgaccactgaattcagttaatcaggaagacattggtaagtctgacaattcttgtaacgtgtgaatattgagaggagaaaaaaagatcttaagaaggcagttaaatgtattttctcttcctccctaaaccagtatcacaataatgtaaatatcaaaacttttcgtcttcctctaagccaatacaactgggttcctccacaacaatagtaactttaaatttctatttgacaatttgaataaaacatattgatgcgaaccattatccaattatcctgacctcctacagtaataatcgtctttcaaaatctgtttcacactaaaacgtgtaaagtacacttgaaagaaatttgaagattcatcttatataattacattatcatttttaatgccaaaagtttccttcattctcaacaccatggttttaaaattttacgagttatgatatgccttaaataaacttcacccaaataaaaagtttgctatgcattagagaatctaaattaatgaaattgagaaagcgctagacaccctgctatatttttactgggtgccacatttttaattccatatttgtcctgcaatgtgtcaatcatttcaatatatccagtcaactttgtaaacaaaggctatactccaagtctgataagagaattccattacacaaaatttaaaatggtcatcactcccttaaacagtaagcaggacaaggaaaaatgtcactacacaccttttttttaaaaggcatcaagttaatattcatgaaatataaagccttgagtttcaacctcccaaacaagtttttactacaacattattcaaaataaggctatgcatcttccacacacaaccaaggcaactttgagatagcttacaagtcttttcattgttaaggggaagctatcgctgcaaagtcattttctattacagttattccaagttgcccgctaagaaaatagaaaaagcctatgttttgtcacctattaccgtcacttaaaaattgctttttatgcataactctacgtggttgtgttgcttttggcctgttaaaggcaaggcaacattatctctggattgccaatagtttctccttatttggctaacattgagagatcccaatcagactactataaaactttaatatgcacaaagcatccattttgagaaaagtttgtgaccagctttcttttttcccaaccccaaaagaaaaaccagagcttggtaaccggctttgaaaagagtgtcccctatttattcttctctttctaacaccagtgcacacccgaggacctggggctcaaggatctctgacactgcggcaaacttcgagtatcagactcaacacgttccggtccggaggtgggcaagccctttagagggcttccttactctacccacttccatccccttcctttcagccggtgcagatcagctaattacaccctgttttcccctccccagtgaccaagagtaataaatgagaaaacaggaaatcgttcgttcagggcactcggcttagggctctagattactattattatcatcatttgtaatcaagtcctaaaaagtgcaacaaatccaatgcccacctacaagtcaaagatgttcatctgcctaaccgtccgtaatgccccttgttagttttcttccttcagcatccacccctccgaatataccactgacaccggggcccaggcacaaccccactacacccctccttgtctcgaccccaaatcccagacttatccacgaatggccctggggccccaaacgaccacagttccttttcccctatgccccggaaatcacccggttcccaactccaccagcaactgttctgaaggggggcctcaagcccagcgccctcccttccaccagctctccctcccgccctctggggaaaccgccccctcaccccgcagcagggagtctcccgccgcccccagcctcaagaggtggagaactgagggcaggcccgagcaggaggccgacgagaaccctcacggtcaggagagccggcggcggggcgcacagacctggtgcagggcagtgagtccgtccacattggcgtaattgatgtcggcgccgcggtgcagcagcttgaggacctcgtccgtgtcgccgctggagcaagcagccaggaagacggcgccatcgtcgaacttcaccttggtcttctggcgcttcaccaccggaggctcgaggtccgtctcggagccgatccagcgtttcagctgctcgttccgcttctgcttcgcgtccgccatcttcatcccctctcctgccgccgggtcttcttatcgcgagggggggaagggggaggcggagagggaagagaggggaggcagggggtgtgtgaatgtttctatgagtgcgggccagaggagggctgggaacccggagccgacrctcgagacttccagtatcccacagagcactggggcggcgcacccggccgagcggacctcccttcctaccacagaagccctcccgcccccagcacggccacccgtcaccggcggccaatctaacgtaacttcgcgagatccggactgggaggcgcccttcgaccagtgcgcatgcgccctgggcctgtgcccgccccaggaagagcgctcccgcgaactgcggcggtggtggctgggccaccagagggaagcgggtgtggcccaggcagcgggggctgggacagacctggaaaggaggaagcggggaaggaaggttgtcctgtcgggctgggggctcccgggaatccggaggccagcagtggaaccgcaaggctctacagggcagatctgcctcccgkgctgtctcagctacgccgagtcgttggctcagggcggaggattttcctattggccgcgttatttgaatggaatggaggataggtcgtgaagtaggtgctgctggttgatctttctaaggaactcagatgaacttgggcatgtcagaattaataaccttttaaaagtggggtctgtgtggccgagggttttaatggtaagttcttgaggtgaccacctattgacaagggttgacctgctgtaattgctgtggcttcctgccaacccccactttagaaatgtttttcttcctctctttacttgttttgttttgctttctctcacgcttgggttctcttctttcttccttcagtgctttaagcctgtctcgtactacccrtgagcttagctcagcctgattactggtccttaccttttaagggatttctggttacagctccatctctttctaaggaggggtaaagacctagctgcgtctagcatttaaacggaacgttaaggaaggcaattaattcaaccactatttattgaatacctactatgagccagtaactgtactaggcactgaagatacaatgaaaaatatgayatttatttgaaccacctcttgagttcastcgcccaaacaagactaatttatcatcgtcataaaaaaaagactttaactttgccttgtatgaccacacgcgcacacacataggatttgtaatactgatgtcttatgagccatctatctacaatctccaccaattgattttactgaacactgcattgttaccatccactactatttttagagcatttagaaaagccaagataaaaaccacaaaaccttaccatggaagtttaggggtcatctagacagagtccctcaagaactaattaatttacttaattttacccagaagtaggattagaattcactcagcaaatactatgcacctgttctgggtcaggcattgttctaggtgctggagatagagcagtgaacaaataagcttttcttactctcagcatgatgccttttccagtggactacttcacagcctatcatattgagaaataaaataattgagtaaaacgtgattaggaaactgtctgcctgtgagacaattttctgaaccacagttattaggatagcgatagaatccaggtcagggtaaaaatatttcctctgaaaacgttgtaggaatagaaaatgaatgtaatattcataagatataccattgtatgttcattacatacattaaagataacatcagacctttgaatactcatggtgttaggtactgaaaaacattgttagcactaaaatacaaaatccctatccacagaatacagctctcagaataaaagaaaggaacttgaggattgccttgtcagctcctgtctctacctaggcaactgacagcatatcctgttttccaagaacgttatggcctatgtggtagctcttaaagtgcccttgcagtatagatgggaatctgaagatttcattcaggcaaaaggaatttagtgggaagtatgctattcctgattcaagcacttatttcaggatgcaaaattaataatagtttattaataaaacataattaagttcattcagttcccagaagctgtcagggaaaaaacaaccaaggagggctgctatcatgtgcaaatttcactgaatttagtttttcttctttcgtggctctaagggtcaagatgctctatgttaatattgaaagtactctgaaactgccacctactttgtctttagggaggattttttttaaattgttgttagtgaattaatggtactgaagaccttgggttaattctagaacaagcaaaattttttattgacacacacagtcccagcacagtggctcacacctgtaatcctatcactttgagaggctgaggcgaactctgcccaggagttcgaggctgcagtgagctatctgcactacaacctgagcgacagagctagaccctatctttaccaaaaaaaaaaaaaaaagacacacacacacacacacatgcttttattacatatttgtctaagcagaacaaatggaaaaaatgcaaatattttcacttcctaatggcttctaaacagattgggatgtgaggatacattttagctcctttaaagcaaattaagccttaaaatagaagtacaaataaaactatacttactaatttgcatatatgtatatataaaaatatatttttggctgcaccaaatcaatcatattggaggtttttgtttctgagacagggtctcactctatcgctcaggctgcagtgcagaggcatgatctcagcctcccaagtagctgagactacaggcgcgtgcaccaccaggcttagctaatttattttttaagttttgtaaagatggggtctacctatgttgtccaggctggtctcaaactcctgggctcaagtgatcctctgccttggcttcttaaagtgttgggattacaggcttgagccactgtacctggctgggggttttatttattacatgcacaagattgtcagaatgagatctgtgtatatctttttcaaagtttaatcacactactgacattccttaccattaatttgcttgctaattatgatcaacttaatttaaattataaacatatttgaaatgctgacatgcacagcttagatttgtttctgctattataatctctttgttaaaaatgtacataagatattaataaatactttgatatatctatgttctctttatccctaatttaaacctgagatactaatttacatttatacacttgagaatagaacagtcaacaaggaccttgtttctgtctcctgtattctacacctgggccaaactctcttccattgcataataatttctttccaatgttttatttaagaacctgaagaaaaggctgggcacggtggctcatgcctgtaatcccagggctttgggaggcccacgtgggcagatcacctgaggttagtagttcgagaccagcctggccaacatggcaaaacccccgtctctactaaaaatacaaaaattagctgggcgtggtggcacgtgcctgtaatctcagctactcgggaggctgaacccgagaatacatgagaattacttgaaccagaaggcggaggttgcagtgagccaagattgtgccactgcattccagcctgggtgacagagcaagactctgtctcaaaaagaaaaaaaaaaagaacttgaagaaaagtttacaatccattcacatcataatttatttagtcctacccagggagttgaccagaaccaacatggaaccaccctaacttgcttcagactccattgctagatcaatcctgatttctagatcatagcatctaatctttgccttgcctctggattacaaggtgagtttctaatttactttagggtaaattttctgccacatctgactccatttcaagaaactaaccctatcacagtacaagtactggctaatatgctcataaagcttcttttgttccccaaaactaggactcagatgagtgtctggcaacaatccaaagtgcagttatactgctaaagagataactcacctccattgcacatgactcccaacctgtatcatgtgacagaacatcacatgcccctttcatatgaattaatgtttcccaaactttatcagttttattgccaaattcaagaaccgcaaatactagtatttgcttaatgttttctttaacctttttaagacaaatttattttaaagcaacattatgttgctttggtaagtgaaaaacgtttccacttgacataaagaagactgttaaagcaaatacaatgaaaacaaaacattagttaggttgtctgtcaagggtctgagcccaagctgtgctctcaatttgttaaaaaagggatattggtaagggttggacatgtgagcatcaacctaagatttttcagtttagcataatcggaaagattaaaaggtagtgaaaaaagaatattgtgctaagtgcttcactgttgttttaatgttacatctaccttataacattacctcatgtaccaccagtctacatgtcctacactttaggaaactgactgactttaattagtatgtgtaataataattacgattaattaagtgaaggttataggataggccttagtggcacccccaactcaaggtrtcaaggcaaggcattggcaggaaggccaatttgtatgaaaatatctgtgtgctgaaggaatttcagaaataagagtcattctccatggcactgaaattagaagaataaattacaagatcaatatctggaaggcaagtttaggtgcatgagttctatcttggatcactaatatttagttgagggatccattcaattgtccttcaaatcaaatcctaggaaaagctttaaaattccttcacagaccagagtgcaaaaacaaggtattcatgagaaccaaaacatgctgaccgtgctcaattttgacaggtgggaatatcaacttcatgtggttgtcttaaagattaaatgaataatgtatgtgagagagaaaaaaatttgagattttatttgtgttcttgtatttgccttttccttcccttatttaagctgatagcaactctgcttccttgcctcaggacaggtttgtggcaaggaagaaagcagaagttgctttcaaaacattttccctcctacttgaaatgtccacccaccaatttctatttaataagaatttagggctagtgatctgattggaattagtatatgaggttgctagaaacttatttaagttctatttgcatagcattataaatcaataaaaatagcactgttttctaaatttgcctttattttcactttacaaaaattttcaccataactccatggaatgttatttttacttagggtggaaccaagcagaggggttcacccaagccatctttgggtgcttccatgggaaagaaggatttcactgagaataataagtgacaccaaggctcaaaagaatgagagagaagtctgttggtctcttgaacagcagggatttgctcacagatctctggaagtagccagaatgtgacaggatctcaaaatgaatggctgcttcatggaggctggaacataagcctgggactcccagtagccaaacatagctgtgccacaaacatggctgaaatgtagcagtttggtggatccgaggtcagtcattgaaaatgtattgattggcacctattctttgtgaatcattattctgggttctggggtcacargagcaaatgaaacaaatgaagtacctgccatcaatgagcttacattctagtaaagagggacaraaaatgaatacattttaaatgaataaattcagataccgctaaatgtagtgaagaaaaaaattgggctaaagagagcgaaaaacaatttctgaagttactagcagtgaagggtgggggaagagaagagacggatttaaccaggaaagatctgagctgagggtgtatccaggttttctggaacctgatattattacagtttagagattcttcttcaagaaaaagaatttaaaattacaaataattaacttcagggccttggaaggggtccactcaagtgaacagaaaattatgtgctccttataaaatatatgatttaaaactacaacagtggctggccgtggtggctcatgcctgtaatcccagcactttgggaggctgaggcaggtggatcgcgaagtaaagagatcgagaccaacctggccaacaatggtgaaaccccgtctctactaaaaatacaaaaattagctgggcgtggtggcatgtgcctggtgtcccagctacttgggaggcagaggcaggagaatcgcttgaacctgggaggtggaggttgcagtgagccgagattgtgccactgcactccagcctggcgacagagtgagacgtctcaaaaaaaaaaaaaaaaaaaaactataacagtaattgagtgtataaacactcaatttgtttcctcagctagatctagaaccaaggattctagaaaatatgtgtcaaaacccagctctcagttttgttagctatcacttaacatcagtttaaatcattcatttattcaccattcattaagccggtatttatgagtaccctattggtactctgtatgtactagtgctaaaactataacaatgtaaacactcattccctgcaatcaacaatatatactggccaaagattcaattccatgatcaagcatagcagcattaatagtagagcaacctccattatgtgcctaagcattacctaaattttagcctgagtttaaccaggtgttttagatcaaatatcactttactagaaacatgggagatagaagaacatattaaatgataccacacatacttaatcaaacaaacctgaaatgtaggataatctctagggcactggcctggtttcttttaaaaagtcagtgttataaaaaattttaaataaaaatgttctagattaaaagatactgaaaatcataatgactaattaagcttgtaaactttgattaagttccggtttggaaaaaagttgtatgtaattgattattggaaaaattgaatatggattgtgttttagatgatattaaggaatttttgttatttctgttctaagatgtaataatgtgattatgtaggaatgtatccttaatttaaggagatgagtatgttaaatatgatgttgacaacttcctttcaaatgatttcatgaaataaaaaataaataaatacaaatgcatgtaagtagacagtgcaagtttggcaagattttaatttctgaacttaggtaacaggtatccaagtgtctgttactattttttcagctttgctgtttgatattttttgcaatgaaatattgagggagaaaaagaatggattgtggggagactgtgttgtgattctctaatagagtcaatgccattactccagagatatttggacatgtgggtgaggtgtttttgattatcaaaatgattgtggaacactactgtcgtttagtgaggaagtgagtaataaataacttgtgatgtgtgggaattttccaaacaacaactaagtacccttcccaaaatgctaataactcccctgttgagaaatactaaaattaaaccaataaatagctcacacaaaaaatattccattgaccttatatacaactctaatgtttgttctccaattcacaaaaaagtactcctgataaagagtcatttatattcatggcttccatatccatgttttctttctttttttttattatacttttaagttctagggtacacgtgcacaacgtgcaggtttgttacataggtatacatgtgccatgttggtttgctgcacccatcaactcagcatttacattaggtatttctcctaatgctatccctcccccagtcccccaacccccaacaggccccagtgtgtgatgttccctgccctgtgtccaagtgttcttattgttcaattcccacctatgagtgagaacatgtggtgtttggttttctgtccttgtgatagtttgctgagaatgatggtttccagcttcatccatgtccctgcatccttttttatggctgcatagtattccatggtgtatatatgccacattttcttaatccagtctatcactgatggacatttgggttggttctaagtctttgctattgtgaatagtgccacaataaacatacgtgtgcatgtgtctttatagtagcatgatttataatcctttgggtgtatacccagtaatgggatcgctgggtcaaatgctatttctagttctagatccttgaggaatcaccacactgtcttccgcaatggctgaactaatttacactcccaccaacagtgtaaaagcgttcctattctccacatcctctgcagcatctgttgtttcctgactttttttttttttttttttttgagatggagtcttactctgtcgcccaggctggagtgcaatggcaccatctccggtcactgcagactccacctcccgggttcacgtcattctcctgcctcagcctcccaagtagctgggactacaggcaccgggcaccacgcctggctaatttttttttttttttcgtatttttagtataggcggggtttcaccgtgttagccaggatggtcttgatctcctgacctcgtgatccgcctgccttggcctcccaaagtgctgggattacaggcatgagccaccgcgcccggcctgtttcctgactttttaatgatgaccattctaactggcgtaagatggtatctcactgtggtcatgatttgcatttctctaatgaccagtgatgataagcattttttcatgtgtctgttggctgcatgaatgtcttcttttgagaagtgtatgttcatatcctttgcccactttttgatggggttgtttttttcttgtaaatttgtttaagttctttgtagattctggatattagccctttgtcagatgagtagattgcaaaaattttctcccattctgtaggttgtctgttcactctgatggcagtttcttttgctgggcagaagctctttagtttaattagatcccatttgtctatttttgcttttgttgccattgcttttgctattttagtcatgaagtccttgcccatgtctatgtcctgcatggtattgcctaagttttcttctagggtttttatggttttaggtctaacatttaagtctttactccatcttgaattaatttttgtgtaagttgtaaggaagggatccagtttcagctttctacatatatccacgttttctattcattcctcagtccactcaagtttggttcaacaaccaccttccttaaaaccagttttatcaggattagcactgatatctttgctaaatccaaagggtgctttacattatttgaccacggtgaatatttcctccctctggaaattttcgccttgtcttccatgacactactttcttctgggttttcctaactctctaattttttcagactcctattataagccccctttttctttgcgtacatcttatttcacaggatttcatctttagctcttttttctatttaatttttctcagatccccacctcaaggcaaaatattgcacctaagtcccatacctatttacacgactgcctactgacatgaaatcttcaagcctaacatacatgaaatggaacttaatatccccccacatacacttgcttctcttatagtctttatttcaattaatgactaggatctacttaatgctttagggacctacccaggagacatggattccaaatggcaagggaggagagtggtagggaaagagatggcttccaggaggaggtgacacttaagctaggcgactaatcaagggagaattgaatgaggtgtttggaagtgatgcaatgtgagttagggaagacgctccatgtgcagaaacagaagcaaatgcacaaaggaaaataatgctacactttttttctaaaagtggagagcaactcagaattgatgaagtatactttttttttttttgcaggaagaataggcaagaaatatagttggtaaagtaggcagaaaatagatcatgaagaatcttttatgccattctaaggagtctggatcttatcctatcaggtcagagttcacaggttgattgttcacagactacacaagtggcttgtttggcttatgccgtgctttaaaacgtgatgaattatttgttgacatttaaaagctaaaccgtttcacataaaatctggatttccagtctcttttgaagaactggaagttctggccacattttcccgcatttgacaggctctaatgtcaccactctgcaatagtccccatctgatctgctttgttccgttgtcacttctgctacctgcctggcacctgagagctttggcagttgctacttctgcttcagatgatgagaaattattgaagcaagagagtaataccagatatttgggtcagaaagatcattctggaagaaaaatagaggacaggcaccggggcatagcgaagagtgccctaaagaaatgaatgcaaattctagagtaacagtggatatgtttacagagggagaacaaacacatcactttgccttagacaccatttatcctcctaaaccgcgggatagctcagaggagacaagactcatgcagtactgaggtgacagttgaagatggcctcagctagagcaatgacagtacagatgaaaaggaggggccaggaatcaataaagcttaatcattgattgtatgtggcatgtaaaaactggaaggaatgtaaaataatttccaagtgaatgataagagaacaaggtgctaaaaatcttcacttatcacactaataaaaaaattattctgtattgaacaaatttgccttcatagtgattagcttactagatctattttcacatatgcctagtaactataaattagtcaattatacatcatttctaagtaaaactctaggaaagataattaaatgcaaaatgaatggaaattttaagaacttaacgatcactaggaacaactaaaggttttttgagaaatgagccatgctaaattaggctcgcttatcattttgttgcttgtgtgtttgttttgttaagaatgctaggctaagtcaggatcacgtagtgatagagtctgagagagtaggcacaattaataaaacttctctaagctgctttgtcatgataggtacatggtagtcattgcattttttaacctgaacacattatttctcatactgtatcagctttccatttttcttttttctttcttttttttttttgagatggagttttgctcttgttgcccaggctggagtgcagtggcgcgatcttggctcactgcaacctccgcctaaggttcaagcgattctcctgcctcagcctcctgagtagctgggattacaggcatgcaccaccatgcctggctgattttgtatttttagtagagatgacgtttcaccatgttggccaggctggtctcaaactcctgacctcgtgatctgcccgccttggcctcccaaagtgctggaattacaggcgtgagccaccgctcctggccagctttccatttttgaaatgattctccacattatcctagtttctctttttcaattttactttccatttttaattttttcatttggttttcagtcactaattgagtgacagtgttgtcttctacccattgaactttagatatttctagttttcccaaactatatgacttttatttaaatcctcaatattattacacctattgtatatatctttacctctctgactcataatttctcacttctcatacgcacacatgtgtacacacacgctatatatatatgtatattctatagtatactatatggaaacgatttaatttttattttacttgctttcatttt

SEQ ID NO: 5646 - DNA, 97952 bp, Homo sapiens
ctgaatgactactgggtaaataacgaaattcaggcagaaataaataagtcctttgaaaccaatgagaacgaagacacaatgtacctgaatcacttggacacatttaaagcagtgtgtagagggaaatttatagcactaaatgcccacaggagaaagcaggaaagatgtaaaattgacaccctaacatcacaattaaaagaactagagaagcaagagcaaacaaattcaaaagctagcagaagacaagaaataactaagatcagagcagaactgaaggagttaaagacatgaaaaacccttcaaaaaatcaatgaatccaggagctggttttttgaaaagagtaacaaaatagaccactagccagactaataaagaagaaaagagagaagaatcaaatagacacaataaaaactgataaaggggagatcaccactgatcccacagaaatacaaactaccatcagagaatactataaacacctctatgcaaataaactagaaaatctagaagaaatggataaatttctggacacatacaccctccccaagatgaaaccaggaagaagtcgagtccctgaacagaccaataacaagttctgaaattgaggcagtaattaatagcctaccaaccaaagaaagcccaggaccagacagattcacagccgaattctaccagatgtacaaagaggagctggtatgattccttctgaaactattccaaacaacagaaaaagagggactcctccctaactcattttataaggctagcttcatcttgataccaaaacctggcagagacacaacagaaaaaggaaaatttcaggccaatatccctgatgaacatcgatgtgaaaatcctcaataaaatagtggcaaaccgaatccagcagcacatcaaaaagcttatccaccacaatcaagtcggcttcatccctggcatgcaaggctggttcaacatacataaatcaaatcaataaacataatccatcacataaacagaaccaatgacaaaaaccacataattatctcaatagatgcagaaaaggcctttgataaaattcaacaccacttcatgctaaaaactctcaataaacaggtattgatggaacatatctcaaaataataagagctatttatggcaaacccacagccaatatcatactgaatgggcaaaagctggaagcattccctttgaaaactggcacaagacaaggatgccctctctcaccactcctatttaacctggtattggaagttctggccagcacaatcaggcaagggaaagcaataaagggtagaggaagtcaaattgtctctgtttgcagatgacattattgtatttttagaaaatcccattgtctcagcccaaagtctccttaagctgataagcaacttcagcaaagtctcaggatacaaaatcaatgtgtaaaaatcacaggcattcgtatacaccaataacagacaaacagagagccacatcataagtgaactcccattcacaactgctgcaaagagaataaaatacctagcaatacaacttacaagggaggtgaaggacctcttcaaggagaactacaaaccactgctcaaggaaataagagaggacacaaacaaatggaaaaacattccatgctcatggataggaagaatcaatatcgtgaaaatggccatactgcccaaagtaatttatacattcaatgctatcctcatcaagctaccactgactttcttccaagaattagaaaaaactactttaaatttcatatggaaccaaaaaagagcccacatagccaagacaatcctaagcaaaaagaacgaagctggaggcatcacgctacctgacttcaaactatactacaaggctacagtaaccaaaacagcatgttactgttaccaaaacagacatagagaccaatggagcagaacagagacctcagaaataatgccacacatctacaaccatctgatcttcgacaaacctgacaaaaacaagcaatggggaaaggatctcctgttcagtaaatggtgctcggaaaactggctagccatacacagaaaactgaaactggaccccttccttacaccttatacaaaaattaactcaagatggattaaagacttaaatgtaagacctaaaaccataaaaaccctagaagaaaacctaggcaataccattcacaacacaggcatgggcaaagacttcatgacaaaaacgccaaaagcagtggcaaccaaagccaaaactgacaaaatgggatctagttaaactaaagagcttttgcacagcaaaagaagctgtcatcagagtgaacaggcagcctacagaatgggagaaaacttctgcaatctacccatctgaaaaaggtttaatatccacaatttacaaggaacttaaacatatttacaataaaaaaaacaaaccaccccatcaaaaagtgggtgaaggatatgaacagacacttcttaaaagaagacatttacatagccaacaaacatatgaaaaaaagcttaacgtcactaatcatctgagaaatgcaaatcaaaaccacaatgacataccatctcacgccagtcagaatggcaattattaaaaagtcaggaaacaatagatgctggcaaggctgtggagaaataggaacacttttacactgttggtgggaatgtaaattagttcaaccattgtggaagacagtataaggattcctgaaggatctagaaccagaaataccatttgatccagcaatcccattactgggtatattcccaaaggaacataaatcattctactataaagacacatgcacacgtatgtttattgcagcactgttcacaatagcaaatacatggaaccaacccaaatgcctgtcagtgatagactggataaagaaaatgtggtacatacacatcatggaatactatgcagccataaaaaggaatgagattgtgtcctttgcagggacatggatgaagctgaaagccatcatcctcagcaaactaacacaggaaaagaaaaccaaacactgtgtgttctcacttgtaagtgggagttgaatattgagaacacatgaacacagattggggaacaacacacaccagggcctgttagtgggtggagggtgaggggagaaaacttagaggatgggtcaataggtgcagcaaatcaccatggcatatgtatacctatgtaacaaacctgcacgttctgtgcatgtatcctgctttttttttttttagaagaaataaaaaaacaaattttgatcacctactatgtgcaaagccctctgtcaagagcctttggagcaagagagctctgctttccccaccaaaaaaaaggaaccatccaacctaaaatgtcaatagtgccaaggttgtgaaattctgtactagaagataaactttaaacaaaagatgaatggagaaactacaagataactggtaaccttgagctgtaaatctgcatactgtattattacagaacagattgtaaatgcagaacattatagaaatgtagaaatgatgatgtaaaaatcatgtaacaaaagttgggagagaaagtaggagaggaaattgtggcagtattacaggtaagttgagttacctaytgttaatagccataggtcaaaagatgataatttaacattataaatcaagttatagactaggtatatttgaacagtataaatgttgacactaaaactgcaatcaactaaaatcagatggaagaggaaactgagaaggggaaaatgagaaaatatgctaattgtattgcttataataaggagggaatagaaaccatacacagaaatagaggattaagcattagataaagttatagttataaaagtggctcatctttacttcatagcacttatcacagggtaattttgcatttacttatatgattgattgattacaatcactatcccagtgggtaactaatgaagggaacaggtaaggtctgtttttgctcactaaatatattcggtccttgttatttgcagtagttctgttctacaaacaatgaattactcattactgaaccatttctcctggaagaaatatggggctaggttcctgcaaacctctggtttcaacattttcatcaactgatcaacactaattttgttttatatttgtttctatttaaagacactttaataaatataaacagttgatttgttaacattgaacttagggccaacaacactactcacacctgaaggaaacttatctaacacatatcttgttctctgtaaggcccatcacagccttcttgtgctcaggaacactagacagtacttcaacactatgcttggggcccacagtgaaatcactaactaaaagcacaaacattcaagaaacatagagctaaacagacagggaaaacagtacccgtttacaatatgagagctgaaacaagaaggtagaggtagccttgttccacctcagctggaggcatgtgtgttgggtgactcattttcagtgctctgcacatatccacgcatgactgagaaagccctttgagtaccaattctggggttacaagtaaattttatcgatgagataaacttgaatctactaagtccaccaataagtatcagtaaatgcatctgtggaattgaattggatgttatcacctgacaacaaacatttgtaagttattagtgagtgtatttattgtgattctgagctgtgcaagtcaaggaatttctatgaaagatacataaatgttaatacacatatctgattaatacacatacctgtatgggtttttttctcatgtaaagacagcttagtgaattttggaggtaagggtcttcgaagaagcagtgggggcttttgcattttaatgaataataagtgctgtttttcataatccttggtttaaatgagaattgaaaaggttttgaatatgtttgaattgttgaaaaataataagaatttagattacatcttaaagaaaatcattctgtaccaatactctactgaatccaggcagaattcctttatgaaaaaaaaagagggtaagaaaataattctttaaaacttctattaatagaaagaatccagttaaaatgtagggttataagtaaacatagaattttaaaaatatgtgtattattactacccaggatcattctacaattttccatgttagtacaaagttcaatttgccaatgctatttcaactagtaaatactgatttttcagaatagtcgaaatgacattttttttctctctctccaaaatgttatcgctataaatgtagaaagagaatttggtcagaaatgtgtagaagatgccttcattagataagcctctgaagacccaccatatctaaccattcacaaacaaattgttttctttctataatggcttgtttttcaaccactatgcttgggccaaaacaattcaatcctaaaataagatgggtttcactataatgagatttcccagggctgctggatcccaactcatactgtttagaaataatgcgagaagatgcacccccaaaatgtgcttttagtttgcagggcaacatcaaaagtgcctggcacggcattattccattgatagcctagaagggaacaccctgaaactgcacaaatgggccgtttaccgccaaaagataactgcacacaagcgctcaaggtgtactccctggtcatatgttccacacgatgctggaaatctcccttccgtagtacccaaagaggggcatggaagtgctggactcccacactaccctttaggataatcggccgctttccaaaccaactggcttttcgtctcctatctccttttcctcggaatctaggcagcgaggtaaaggtccagcgagggtcttcctgcaggaggctgttcccgaagaagcaccacggatccccaccctctaggaggccaaggagacacaccctagcaaccggagtccgctaagccagcccagccacttgacgcgcaggcgcgggggcgggacaggcgaggcgggcgcgggacaggcgaggcgaggcgggcgccgggaggggcaggcccagcccacggtgcagcgcgcgcggagccctcgccttcctccgacgcactgtggggctgcaggggaagctgcgggccgtgggggccggaggagaagccggctccacgcgcagctgctgtacggaacgccgtggtgacaattgttattactatttttatgcttaatggcaatgaccactattatttattattttctctcgattacaggatgctttacttgggtgtctagaatatgggctggcattctttaaggctgcacttttgtgcagccgggtcccggggctaattttgcagtgctctcgaaaagcgggcattcggttttctttctcttcctttcatgcaacctgttttctctttctgatcctttaaagttcctggctgaggctggattgtgtagaaataagggcattagggatccaagcgggccataaaagaaacccatttctcactgtcatcgtcctctkttctggttatcatattgtgacgtgtcgcctctgtcatggtgttgatgaacctgtgtgtgcagtcatagatacatcgtgtgtgtttgcaaaaatgtgcgtgtttctctggagatttgarggggaaagagcactagaaagagctcatctgatagatgcggaaatccgaactcagaaagtaaactaggtagagcttccttccaggtttggttttttctaagtactagcgcaggaactttataacagaagttggaaaatgagagacttctgtataaatctttctagctttggggatctttcaagattcacaccataaccatgtcttcctttttctccttagtagcaaacatgttttaaaacaatcaatgaaaaaagtagaaaagttttaacaaaaaagtaatcagactctggaaaatattatgcaacttgttttcctttacagtagtagtgtactgtttcttttccttgtaagtttactgtgtcccaattatactgctgccccagactatgaatttatttccacttttgctgttatctacaccatagattcattagtttctcagaaatacaaagctgaaaataaaaggcagctctgtggctaagattagtctcaagtaatatatatcgtgcatattttgtaaatgtgaaaaaaggtttatatttttaagcataaaaaatgacagtgtaaattgagtcaggtacctatgctcttcaagatcgttggaaccatgagaactacaggaattcagttttactgactgacgtttggcctttaaaatttatgcttagctttgtgtagtcgaaagcaaggcttctgaatgctttttcaaaaaatgctttgtcacacttggaatccgcaggcatccaggtatcattccttgcagatttcttctagcaagtatgagactaaaacctagggcggtttaatatgtaatctcaggtgtgaacattttgtcttctatttctaccacttagtaccaaacatttaggcaaatgagatagttattatgaaaattaaatccatggcttggtatattttatatgtatatatgttattctaacacatctgactcgctttgtctatggaaatgatatatcagtataggatgagtttagacaggacaaacraaattcaatttagattattttatagttcttatatttttgaaaatattatcccctcaattttctttcttcttttgtaaaataacgtgtttttgaaataatgaataactcccttttggattttaagggtctgctttttctgatgtatgtacggtcagcctatttatttgttccgtcccctttgcagtttggcagaaccttatgaagaagcttcccaaactgaaccacagtgctttcactctattagcaaattgtactaaagatgccagcgtaatgatgagtgccaaggttatagacatcctgcattttttaaatgttgctaaaatgagataaaagccttatgcagaagcaaccgcaggcaccccgcaggtaatgctatcgatttccctaataagtgggaaacgcttggggaaccttagatttgctgttggttctgttgaaatggtggaagtgatgtgaaaagtgttgctagacaacttcattattttccatagacctatctcttatttatttatttccctttaaaataggacagaggtttgctaaacagtttggccattgtagttttaacctaatattttaccttatggaaataatggagtaatttgtgtttttatgttcatattaatttttttaagtactgttaaagaatgaatagttatttttgagcacatatttgttcaactactgagtctccagagtaacacagggcactaaaatgcttttgagaaagaagtgttttattggtctgaatttacctgtttatattaattatatgtacggggaaatgtcttcttcaccagtmacagtggcttaaatgtacccacttatttcatgtgttttcatgctgttgcctagagaatagttttatattttctcaaatgttaataaagatattttgaagaagctgctactctttttatccccatatctcactgtaaagacaaacacttcatttgtttttaattattttcagccaattatttctttttgtctttcaaggtgatagttatttcctttgtttgaactggagatcctgggattcctttaaaaaaattactaataaggaaatgtcatgcaacctttatcatggaattaaaaaaaaaaatcaaacacaaggaaaggacaatgtctgtctgttttcaaaagtgccttcatgaatttagtcattcattccagaatcatttattggaaacctactatgcataagttacttcactaggtgctaaactttaaactttattaaaacaacttataatgattaatttgaggctttataatttagacattgaaatgaaattttaaatcatttccaaagactacacttatctgcattataactacttgagggttttttttaaaacaattttttattttattgctttggtagaatagtgttgtttattcacactcctttgattctcagaaacattttgaggttttttttttagctgcagtgatcattttagactgtctgcaaccagctaatattagatatttgtatatattgtatgattgtgtccttcaccaaaaaaagttaaataatatttgtttccttaatattaagcgcttagcatgagcaatgtacattagtatggggaaggcactgttttaaatgttgattttattttagcttcacaattgttatattaattgaggatgctggcatctgcattaaatttcaagcacaggaagcatagcacagctctacccagctgggttcacatttggctgccacttgtcagccctgtgcccttggaccagctacttaacctaagccccagggtttcctcatttgtaaaactgggttaaaatggtacttaccaaagggtcttgtgaggagttaaagagataatctgtgtcagaggcttagttctgtgccagccacagagtcagtgcgcagtagatgttgttagaaaattaaaataaaacagcccagttttccggtctccacacccctgctttatgtgatgatagttgacgttaattgaaatgttggagggctatacatcctgggcatttatccacaaaatttatccacaaaatttcacatttaactttcctaatgtctccaaatgttggcaactctagtttgcagttctcagactgtggcacaaatgctatgctctaggcagtgtcccacattctgtcacaggtctttatactccyctgggyggcacaggagctgtgggagagctcgtgcctgaaggagtcctggtacagtgttgtaaggaggccttgactctcccccacgtgagttgggtctgcgagctgctgtcaccattgattgagccgggctgaatcgatgatgtatttcaaccggtaacccaaggaagaaagcctctttgttctcagcatcttccaggccacttggtgtgcctaacaaaggtgaaaaagggctgcaatgtgaagctcctttgaatggctagagggaaaggtgttaaatgcacatgatctttcttaggtttttttctaatgtgcacaccggactttggtagatgagtctactgagtccctgtactggctgggatttagtcctaaacttaggaggaacatgtactatatcaataaagtgtctgaactgcatgctctctattcaaccctcagcaaacacctgtagcaattagaaccgcaggtgagaaaaaatgctttataatgacttattcttcattctaatgtcaacatatgaccttaaacagtagatatgatttccttttcaaacctagcattctgcttwtgcctactgccctattgagtatatgttttattcgtaagtacatgaggctaaaagttgtgtatgggagtaagggcgggacatgtaagagtccattgtattctgtgggttgagtgttggtaaagaatttgtatttcttataccagaactagacaactagaagtgtaactcacatttcagtgtcacatagtttagtatgctgttgacagttctgctacatttctgacaattgcaatctccactttataatatgttgccaaatttataatacgatgccaaattttatcagggtagaattaaagtttcaggatatttctctctccaccctgccccaggtagcagaaaatttcttcatttcctttgccaggttttccaggtgaggtaatccctaaccaaggaaaagaatatagtgtctagctctattcagaagscatggggaagacagtttgtggggctttattcttctccccactgcaattccaagaaagcaactatgcttgtatgagtttgacatattaggctctgctgtttgaagaaaaggtcctatggctataagaggttgcatgcaaaccaccaaatcagatggttttaggtgttttcagccttgagacagtctgtgtttctgcttctcattggatggtaccttgccctggaaagttttctcatggaaaacttgcatggccattgctggggtaccttccttgtgcccaggagctacacacacaccatcacttcccaaaccatctgaattaggcccagtggaggctctgggtcaccactgctctcagtgggagcaaaggaagccagaacgttcctttcttcccaactccctacttctctcccagactcacaacattagaagggattgcttccagaggatttgtaacttggtgtatcactttacccaagtgttcctacttaagaaaagaaaaagcaaagtgcctcaccctgtacactcactgactgaggacattggcagtacatagttgtgagacacttgatgtccccagtgaaggtaaaaagaagacagcactaatggggtcaatgatgataccagctttctgaaaggagttaaagtgagagaccacaggggttgaaagtggagccatgagtataacaaatccggtttggcaccatttgcttaatagaaatcagttagttaaaaaccagaagggctggttttgctaatcttgtactgtgcactgtaggacaagctgtgatgaattggaatggctatgatttctagacccataccagagggctagagttagttggcctagtgtgtttcttaataaatatatttatgtttcctacttactttcatggggcaaagagtcaaagataaatgttttctgtgagctgtaaaagtaatagagcattgagggctttgagagcttcttacagtcgtggagatgtggattttaaaggccagaacttcctgaatgagttgatgacatgttctggctaaagggttaaggaaccccagaagggaatgactccagccaaaatggaagaccggctcttctgcttgatctctagacctccctcagatgacctctgcccttcagaaacatctgcccaaagattaacaggcacccttctttctagtacttcatagcacctctcccaagtagaagggacagacttttgatggaacagggtgaagcacaggaagtgagtaccctctggggaggccacacagccatagtcagagatragattaagatcttgtcttctgaaactaataaaatgctctttatatgattttatactgttttgggtattttggatatagggtctcactctgtccccaggctggagtgcagtggcatagtcatagctcgctgcagcctcgaactcccaggctcaggcgatcctcccacctccgcctcctgagtagctgggaattacaagcacccatcactgtgcccagctcatttttaaattttttttgtagagcagagtctcacagtgttgcccaggctggtctcaaactcctgctgaggagatcctcccacctcagcctcccaaagcactgggattacaggcatgagccaccatgcccgaccttgtatgttgtctttcgagaaatgtttattcaagtcctttgcccattttttagtaagattatttgtcttcttgttcttgagtactttaagttggatgttagccccttatccagtatatgatttgcagatattttctcccagtccatgggttatctcttcattctattgtttcctttgcagtacagaaagaaaatagcatcttattgtaattagtatttgattattaatgagtttaaactttttttgtatgtttatkactgagtgtattctgttgtaaatggcttatccagtcccttgtccatttttacatggtagtattttttcttcctccaatgattttttttttaattttaatttttttttttttttgagacaggtgttgctctgttgcccaggctggaatgcagtaggatgatcatagctcactgcagccttgacctcctgggcttaagcaatcttcccacctcagccttctgagtagctgggactatagcgcatgccaccacaccaggctaatttttwaaaaagtttttgtggacacggggttttgacatgttgcccaggctggtctcaaactcctgggctagagcgagctgcctaccccagcctcccaaagtgctggaattacaggcatgagccaccatgcctggcccctgtatgatttttaagagatccctaatgattttaaagagatactatggatactcaatatgccccgtttgcctactgaagctgtgtaagatgaaatatgaagtggttacatatgtgagccctaaagttagatagacctggtttgaatatgacagcaccatttaccagttatatgactttggtcaagttaaccctttaagtcttagtttccacatctgtaaaattgaggcaataatggcacctaccccaaacagagttgtgaaaattaaatgagaaaatcctgaaaatgcttcaacacagttcctggatcactgaaaatgttcaataaatgtcaactactattttttctcaatgataattcaaaagttgattgtataaaggtagtaccatactcattactgttacatattactgatttgtgacatataactgatttgttgctaaatcactctaaaatggttcttgtgctctttatatacatacacacatatacatacatatatatatatataatgtaaacaaagtcattttacattcaagcatgtatagtttgtttagttagttagaaatcaatgctagcattttcagtctatgtgaccagtagtgctgatgtggatggcctcttgtccacccaaaatacataggaatgcsagataaaatatgtagctgagatgaacagaaaaggaaatccctgatgttgggagaagaaaaagaacttaatgtcagcgaagtgagctggagatgaagtcctggtggtccacggggggtctgatttttaggggtggggaactgggattgtcctacctacatgggaagtggagatgaactccctagtctgcagcaagcagagaactgaaataaaacagcctgcataaatctgagagcctcaaaattgagaccctttctctgaaacagggactagagaatccattctctagcccacagcatatcaaggaagctgaccataggctaggcaaacaatatattaatactggacaaagtagactctaatrggcttattttttaaggatacaaagaaatgattcatcaaggtgatgtgccagcatatgactgtytgcacttaactgcataacttctaaataccagaaacaacaatggacaaaatgacaaggagctattgataaatctacctctaaaatgagaacctttttttaaaaaaagcacgtctcttagaaaataaaagctcaagcaagcaaaagattcctaaggatatgggagatttcaataaaccaagtaatacacttgatctgatcgatatatagatccctgtatccaataaataaagaacacacattccccttcagtatacttgaaatatttaccaagatgggccacaaaggaaatcttaaaaaattctaaaggggmgcttagtagatattccagtttgactagagaagaagttgggtaggtcaggctaggaatgtaartctgagaggatcttaaatattaggatattgacaggcagtggagagctactggaagatttagarcaggaaagctacaggatctgcattaagagatgaatctggaattgaggccaagttattctcttaattttcaagggcgaatgaggaaagatccagctctgacagaataatgagttgtgcaaagtgaaggccaaatgacatcaccggagatagcagtagttcaaagaaagcaaagcagaggaattgaactgctgcaaaatgcacggtaggtaacagggcagtgaacgcagaccaccctgggcctcgggggtcagcaccaggttcacagggcaaagcatgaatttaattccagaaagtcactactaacctcattagaaatcttagtgtgattttcctgtgtgttttgaacttaattttaagcttatttggatttatagttatgatctaactgcactagcagcttaccccaagtttgctgtttgcttatgtaacagaaataggtaaagacaactctggaagtctgggatagttttttcatgtatgtattcatgctagagaagttctagtctagttgattctcctcactctacagatatggaaaattaagcacagaagggtgactaatcattaattatagtaataaaaatgattaamtattagtactagcacttttagaacgtatgctgtgtgttagtcattatactaagtactctccatgcatttcttcatttatgcctcgcaactaggctatgatgtaagtgctatttacttttcctgtctgctaataaggatactgaggcttagatagattaagaagaccataaacccagggactagatttgggacccaggcctttgtaactccacagaatgagctcttacccactttgctatcccaacttgacttggacacacaagttgccacccaatcaaatttagattcaagatctcttgacttgtggtctagtgtatttcctgtctcacctcaggcctctattctctacatttctttgagagtacacagctaaagccacagagtagttttagatcttattgtaagaaaaatgcttagttaggctcatctcctatgtcagaagttcagaataattaatcatatttccgctttctgacttttcagagttcctgggatgttttaattagacacttgacatatttttaattttctctatcacttgtagcacacaccaggtgttcaggttttggtccagatattggttcaataaggatttattggatgcattaatgaaaatctagaacctccaaatctagaacctccttacttatggacatgttaaatttcagaaggctattttccaatacatttgtgtataaatccttagtgactaaaacagattaaggagtatttcttagaggtccccagaagcatttccactaaagatgggtataaaagttagtcctgtgaaactttaaaatcaggtctgttttccgcctttgagatcatataaaatctatcagacattctttctattaatataattgattgttttggtctacatcaaaaatctattgaggcagttaaccctcctcttgaatgacatctgcaactgttttaggttacgctttaaggtgctcacttgataaaccacaatattaaatcaactctccacttactcaatacctacaccagtggaactgaacagggtgggagaaagcccacttggaatgcccttattttaaattcataatcacctactttttttttttttttttttttttgagatggagtctcgctctgtcacccagcctggagtacagtggcacgatctcggctcactgcaagctccgcctcccgggttcaagcgattctcctgcctcagcctcctgagtagctgggattacaggtgcccgccacgacgcccagctaatttttgtatttttagtagagacagggtttcaccatattaggctggtctcgaactcctgacctcaggcgatccactcrccttggcctcccaaagtgctgggattacaggcgtgagccaccgtgcccggccagtcaactactttttaattacaaagggaaaaatagtaactttacagtgggggggcccctgcagacatcatgtaccccacaatatgatgtgctgagagagaacaacatcactaatgtgttactcttgccaaaaatacatacctgaattaaattgtgaggaaacagacaagcccacactgagggacagtctatgatggactttttcgaaagtgtcacgatgatgaaagacagattgaagaactgtcccagattaatggaggctaaggagatatcacaactaaatggaatgtgagatctggattggatcctagtccagaaaaaggatacttactaataggataatctatcaaagttgaaaaaggtctgtagtttagttaataatggtggatcaatgataatttcccaatattgataattatactatggtactgtattaatgttaagatgctaatatttgggaaagttgggtgaagggtatatgggaattcttttaactatttttccaccttttttataattctgaaattatttcaaaattaaaagttaattaaaagaaaaatatttttaaactgatcatcactagccttgaatattactcagccattataccatcttccccaaagcattcattcttccaaactcctaaacaatatttcagacactctcctttcactacagcccttgtgtagctccttccccagcctcaytcattgtgaaaataggggcaattagaagaatttccccaggtgcacctcccagcacctgcgaccctttactgtgctttctctcctgcccttgtggataagctgtctctgcagctagccagggtcaagtcctccacttgtttagtagatcttatcctctcatctattcaagaaaattgctcccgcaagtctctctctctctctctctctctctctctctctctctccgtctctctttctccatccccaccccaaccctttctctctgctgctgggtaattcccggaatcatagaaatatgctactatttctttcttcttaaaaaagaaaaacaactcttgagcccacttcccctttcagccagcttcaacatttctcttcttccttttacaataaatcttctgaaattgtttacaattactgtctccaatttctcccctctcattcttttgggaaaccgttccagtgggactttagcttcactcttccatcaaactatctttacacgattcctagtggcctccatgtttgcgccttctgtggtcagttggttctccatcctcttacatggcctatcagcagctcttcagagcggctccctctcctcccctacagatcagtcttcattaggcctctaagtcatcacaatcacctgatttatctcctgcctctctgaaaacttcttcttagtatcctttggtggttcctctttaatttcctaacctcttatgttggaatgccccagaatttggagtttatctcttcttttttttttcatttccatagctttagaggtacaaatgggttttggttacatgaatgaattgtatagtggtaaagcctgaaatgttagtgcacctgtcaccctagtagtttacactgtacccaatatgtagttttattatcccttaccctgctaccaccctcccttctccttcatatttactccataggtgatctcaaccaatctcacagctttattatttatttttattttttgagacggagtcttgctttgtcatccaggctggagtgcagtggtgtgacctcgactcactgcaacctccgcctcccaggttcaagcaattctcctgcctcagcctcccaagtagctgggattacaggcatgggctaccaagcctggctaatttttgtatttttagtagagatagagtttcaccatgttggcctgtctggtctcaagctcctgacttcaggtggtccacccaccttagcctcccaaagtgctgagattataggcgtgagccactgcactcagccctcacagctttaaataccattgatatgctgatgacttcaacttagtatctacagtgagacctgcagacacctatatccaactgtctactcagatctcctgattggaaccctaataggataaacaggtctaaaattgagcttctgcaattctccatccccaggcctgattttcatcccgtcttctccatgtcagttaatggcaactccatccttctagcagttcaggccaaaggccttagattcatacttacctcttcactttctcatgtgccacaaagaatctgtcagcaaatcctatcagctctactgtcacaatgtacacagaatctgacaacttttgtctcctctgctaagagtttggtccaagccacatcatctctcacctagattattgcaacagcctcccaatttgtctcactgcwtctgacattgcccttctttggtttaatcatgacacagcagttagaaagatctttttaaaaatgtgtatcagatcttgtaactctgttgatgagaccaccctccctgcaatagcttcttgcctcctctgctgtaaaaggcaacgccctgtgtgatcaggcctctctgaccttatctgctactactctacccctcttttgcctcttcgcattggccttgaaaatgaaacacacactcttccctcggggcctttgcgcttattccttctgccgggaattctcttacccctgatatcttcagggcttgctccacttgcactccctcactgtctgcccttacctccctcatgtttttgttcaaatgtcactttctcagaaaggcctttcctggtaacgtcattaagaattttaattccacacyaccctcaaccctgawtgcatacacacacatagacttacattccccttctgcgctttaatttttttctccctaagacttattactatctaatatgtacttagttatcttaaatatcgtctgtctctctcaactggaatgtcaattccataaggttaggaactaatgtcttatttatgcatttgtatctccagtgcctctaaaagtacctgagataaagtaagtactcaagtatttgttgaacaaatgaatgaatggatgaatgaatctgcactggaaccccaatacaaattttggtgaagcaggcattgaaccaatggaatcatccaggccttgcgacaacttttagcagcaattcaccatgatacgttactcaaaattcctagacttcttctaaattaacattagccatccaatatttaccacaccaaagatttcttcctagttcctagctaatgatgatgattgcatagatcaagcccatttcaacattttgcatgatttattatcagtctctcagtgttattgttactgctcaaccaattcactccatatgcaccagtaatactcatttcatcaccatttttatgtgtttaaaagatctctgttttaaacacataattataattgtatgccccttctttatgttctttcagcattcttaagtcttttgcactctttgtaaatgctgaagttatgtttctaaccctgcagtgacttccatgtttctgtacaaacaytgcaaacttgccacagaccagaagttgtaaattagtgatgtctagatgagtcagttacagattagccaacatgatatttaattgaaaaaatgttgccagtatattaaaaatcagacaactttttatgtaaaaatccagatttctggtttctcttaagcctacattctttctgctgctacctttagataagacttacattttcccgtgtgtggcaatccctgtgacatctgtgcaacctgtttcacttcattgagttacctgcctgacccctgtagatatttgacattgattcaaaccacagtcagggaaatgacttagagacttaagcaaccctgtgtgctcaccaatggcacctactgggaccggcagagttatccacttattcggaagcactgctttctatctccggacaattataaaatgaaagtttctaagttcagtaggtttgctaaatctaccaaaagcagttttggaaagcccctgttttattcattctggtacttttttttaaattaaaaaatgtattttgtttctcttcccttatccttcctttcccttgatttagacaggaaagagcaatgagaggggagatgtggtgagaggatccctttccctcctatggtctcattcctttgactggagttcataagggagtaggcggccttcataagtctgaaaccctctgctgtgtagactactgacacagccctgtagagtggtcgtgggagcccctcaatcagttgggttaaaatgtgtggccacttgcacttatatttatcaccttttgtggttacctcataattcgtctaaaagaagacctccctctgctgattaacaggcaccctgccttcatctataaaargtacatagccaaaggacaataggaaagacaagtagaactagttaaatgtcactgaggttcaatcctgataactttgtataggaaagaggtgggatgcagattgtccaaggctagactatgaattccaccagagcagagagtatgtctgcctgctgcgcctctctgttgtcaaagtttggctgagtgagtagcttgtgaaaagtaggatgaatgaggaaaggaatgtatgaatttagaggctgtagtcattgcaggcagaagcaagttctcagatttgctggacatttccagagtttggatgatagaagcagatcttacacactggtaaattggaaatgggttattgatattcaagggactttatttttagccatgattttcttgctgtgaatattatttttcttaaartaaacataatgtatagtgctcgtacctcctcctttattgatacttatcttttattgggcacagaaaaacaggaataaaaggtagtcctttattattgaaatacattccattaaggtgcacaccaaaaattgattaaatgggcctttcttcttttttcccctcttaattttagatgtcagtttttaaacttcttctcatttgcatccaatgcgtcctcctagacagttaactctttcctacagttgtagtcatctccrtgctaatgaggctccaatctatatcttctgccctgacctagcactaagctctggatacataccttgcattatccacaggccagctctcctgagcttcttcagtgttgcctcaacctcattgtaatccattggatttcatctttatcttccctaaatgccacagttctgtccagggcatcaccactctctaaattctttagatgatgtcttggtccatttgtgttgctataaaggaatacctgaggctgggcaatttatgaagaaacagacacatttggctcatggttcagcaggctgtacaagaagcatggtgccagcatctgcttgtggtgagggtccaggctgctttcactcatggcggaaggcaaaggggagctggtgtgcagagatcacacagcaacagcagaagcaagagagaggggtaaggtgccagactctatttaacaaccagttattatgggaaccaacagcgaggactcactcactcacttgctcagtagtaccaagccattcatgagggatccacccccatgacctagacacctcccacctcacattaagctttaccttccacattggagatcaaatttcaatatgagcttaaggggacaaacatccaagcatccaatagcagataattaacctcaaaattatccttgacttgtccttctcatttaccctcagtagcctctgaaatatctcttatgtttgcctcttgctccccatgccccttgctaccatcccaggcctagcggtcattgcctcaaaccttgtccacagccatggtttcctaacccttcttgtttccagccacgtcccctccattccatttttctgccaccaaactaacctaaaatggccaatttcatagtttcactctctgctgatcaaatttcctgattctttttacctatgtttgttttgtgtcatcttcaacattttcttayatacagtaaatacttgcttaataaaaagtactaagagtgattgaaataaggaagttcggtcatgtgaattcattggagctatgttgactatcctttggcctagtttatagaaaattaccagctgattcatatctctatttaaggaatggagaactttgccagaaatatttttatattgcagctgcaaataagatagagttttcatctggacctcaatttccttaccttacaatagagaaaaatgccacctatggatatcctagatttgctggaagtattacatgtgatggattaaggcacccagcatgggatatcccacagatgcaaaatgaatcctacttgagtcttagtacaaaaagattgaatgaatgaatttgatggcaaaatgaaatgatgaatcattttatataaatcacaatttataaaattcagattcaactaaaatttggcactaattatgacctctgtgttaggtatattaacacatacgtcatcttctcatgtattcttagaagtaaccctgtgatacaggtggtctttttttcaatgtacagacaagtttagctgagaaaagggaaaatgccttactccaggattgttggtatatactggaattagggtttgtctctaagatttatgattccatatctttttgttttacatttttctttactttctttcttttttttttaagatggagtcttgctctgtcgcccaggctggagtatagtggcactatctaagctcactgcaacctctgcctcccaggttcaagcgattctcctgcctcaacctcctgagtagctgggacaacagatgtgcgccaccatgtcccgctaatttttgtgttttcagtagacacagggtttcaccatgttggccaggctggtcttgaactgctgacctcaagtgatcctcccgcctcagcctcccaagatgttgggattacatgagtgagccaccacatctggcctyttttgctttttctacgtatcatgctctcaaatatttttcttaccagtttttttcgtgtttttttttcaccttttaacatgagcattgttaaaatgctcacgacttaacgtttttactctcccattgaattacttagttcacactctttttcttttattttctgtatgcttattttaaaacctttgttcctatatttgtattctcggtggttcgaagagtctcaaacattgtctcagcagcagcatcatatcttacaaaagttgaggaaatactgtatttccagcttaggaaactgaaggtaagtagcacaatcaatttcaactggcatctgtttcaatgactctgtaaatgcaaatgggttgtaaaatgtcagtaaatatctagggagttgttataagctacaggtaagtgaattttctacttttgaaatggttgtagcctgcatcatttgctgagttccactttttaatacataggaatactgcagagacaacatttttatgtgtttgacattttatgaaaaaaaattgcaagtcatgaacagccctctttctttcttaagctacctgaaaataataactataattaacttttsttacattgttatcagaaaggaatagtcaaattagcattaaacagatgtaaagtcaaccttcatatggcagctgtgtatataaattctctggaagacctatcgtgcttagagaatgaattttagatatatatttattttattttattttattttwttttttttgagacagggtctcgtactttcgcccaggccggactgcagtggcgctatctcggctcactgcaagctccgccttctgggttcacgccattctcctgcctcaaccttccgagtagctgggaccacaggcacccgccaccgtgtccagctaattttttgtatttttaatagagacggggtttcaccgtgttagccaggatggtctcgatctcctgacctcgtgatccgccggcctcggcctcccaaagtgctgggattacaagcgtgagccaccgtgcctggccgaattttagatatatatttaaaatgtctaattactttagctctttggtttaatgttaaaacgccatattgtttatagaatcagcttgctttctcaactaatgaaatatgcattgaaattgctctatgtgcaacgcaccatgttaggtgctgtggaagggtgcaattcctgtactccagaagctgacatttcagttagatgtatatagcatcccgctctgttcatatatgctggcccctctgttcgaaatggccttcatcacttttctccctcctttatctggccagcttctatatatttctcaaggcccagctatacatcattttmgtttttaactgacaaataaaagaatatatatttatggtatacagtgtgatgttttaatgtatgtatacattgcggaataattaaactaagctaattaacttacctatcccctcatatacttttttttttcccgtgagaatatttaaaatctccyttagcaattttcaaggatatagtacattaactatagttacccttttgtacaataggtctctaggagttattcctcctgtctaactgaaattttgtactctatgaccaacatcttcccrtttttcttaccctccccccattgctcaactactccctgcttctataagtcaactttttaagatttcacataaaagtgagattaggcagtatttgtctttctgtgccaggcttattttacttagcataatgtccccctgattaatctatgatgtcacacatgacaaaatttccttctcttttaaagctgaatagtattccattgtgtatagagaccacattttctttattcattcatgtgatgctggatacttagattgatgtcacatcttggctgtcatgaataatgctgcagtgaacatgggagtgcaggtatctgttctgagtgcatttcctttgggtatatgcctctgccatgcctggcacatttctcattaagcctttgagatttttgcactccctctcgctgcctgtctctgcactccccttgtctataaatctgaatcattctcctagaaccaagaacagaaccaactacataatttgtggccctcagtgcaaaataaaattgtggagtcctttgtttaaaaatgaagaatttttagacagcgacagcagagcattaaaccaagtgtggaggccttctgggcacaggcctgtgtgagactgcacaggcggctggattatatggtagttctacttttaattttttgaggaacctccatattctccagaatggctatactaatttgcactgaatccccaccaacagtgtacaaggtttccttttttctccatatccttgccaatgcttaccttctatccttttgataatagccatcctaacaggggtgagatggtatctcattgtgattaaagctatacttcttctaagatgccttcctacctggcaccttactgtcattttgcttttggtaccatatgcatctttctatcagagtttatcacaaggtattataattatgtttggcaacctccctgattgcaaacttcccaaatttatatgactgagtcttttaggtttgttttctgagtacctggtacatggtatgatcctaataagagcttgaggaatgaataaaaatgcaacaaacacatagagatatatagtcataaagattagttgacaaatgtggcatgcaataagtgtcaagaatgtcttataaaaagtactataggctttagcgggagaggaaaggatagattggtggtcacgggaagattcttggtcaggctagcctcctagcctgtgcccagaagggcttcacacttggtttaatgctctgctgtcactgtctaaaaattcctaatttttaaacaaaggactccacatttttattttgcactgrgggccacaaattatgtagttggttctgttcttggttctaggagagtgattcagatttatagacaaggggagtggagagacaggcagggagagtgagcacaaaaatctcacaggcataatgagaaatgtgtgaggcttccagagggtcaaggacaggccagcctgaagacactagagggcttacgttgttgctctgaggcttggaagatggattgagccaaagtttggacatttttctagcagcaatgagtaacttcagatgcacagggagcaggagaatgaagggagagaactgtagccttatgaagagtcatgtggtgctgctatgcaggatggagagaggagcactgagacaaaaaaaaacagggaaatcaggaagctaatccaaatgtgataaggcaaaagtggcaaagaaagaacaaaaccgagaaatactatgagggaaaaataaatgaaactttgaccacatgtgggaattgcaaaaaaaaaaaaaaaaagtaggactcaaggagtactctggaccatcctgggggtgtagtccactcttggcagaatgaaggaagagatgggctaggggcagcttctttgtcaaatgaatgatgagttcagttttagacactggagattattattggaatttcaaaatagacttgtttatttttcacttaaatatgaataactgttcatggagaagagaaattggaaaaggaaaggattgttaacagtgtcaaatattgcataaaaacaaggacattgaagactgagtagagtccagtttcagaagagtgatgagaacagcagcccaatagagattctatggaaatgaacaaaggtagcatttcttaaattcataatcctcttgtccaaaccactcctcctgaattcctcatctcattgaatgttactactctctaccacccagtttcccatgctccttccattatattcaatctctctcttcctctatagtcaatcagtcttttcttctcctttctgcctatcaactgtctctggaattcacccacatatcattatcccactgccaccatcatcaccttatgccctgccaaggcaaaggcctctgggatggtccagtctttattctccccactcttcttatagtccttgccatcttattcttctcactggagctagggggatttttctaaaactcaagtataattgtgtcactttccacttatgactctgttaggaattgtgccctaccaaaaatattgaagtgctaaatccaaatgcctatgaatgtggccttatttagaaatagggtctttgcagacaatcaagttaagatgagatcattaggatgggccctgatccaatatgactgtcatcttttttaaaaaggggaaatttagatgcaaatgtgtagataaaagcagaaattggggtgatgcctttataagccaaggataacaaatgttgccagcaaacccaccagaagctgggagagacacatggaataaattatctctcacaactctcagaaggaaccagtcctacaacactgtagttccatatttttaacttcagaactgtgagacaattcattttcgttattttaaaccactcagtttttggtactttgttaaaacagccctagaaagtaaatatggatcctaaaatggctccccattgcttgcagggtggtggttaatttttcatgtgtcaacttgactgggccatggagtgcccagatacttggtcaaacattattctgggtgttttggtgacagtgtttttgggtgatgttaacatttaacttggtagactgagttaagcaaatggccctccctaagggagtggccctcatccaatcagctgaaggcctgaatagagcaaaaaggttgaccaccccttgagtaagagagaattcttcctgactgactgcctttgaggtgagactggcttttttctccctttagactcaaactgaaacgctggctcttcctgggtctcaggcctgccagccttcaggctagaactacaccactggctctcctgggtctccagcttgctgaatcgtcatgaagatcttgggacttgtcagcctscctaatcacatgaagcaattccttgtaataaatctctttatacatacacatacatgcatacataaatacatacacacacacacacatacacacacatcctattgttctgtttcactggaaaactgattaatacacagggcaaagcccaaattccttaacacagttaaaagatccactatgacttggtctctgcaaaatcctccagcttttctctttctctgcactttcccccagcttcgctctcttgactgcagtagcatccagctttggtcatatttttgacatacctttatttctcccacctgatctttcacacatgccattcctttatgcttatagtacatttccacctttcctttccatgtcattcttcattaatttattcaacaaacatttctgaaatgttggatatggtgtttagaagttaataaagcaaacacggcccttggcctcatggaattcctagtaggagacaccaatatcaaatgaggcaataagtataccagagatgtcagcagtatgttggagaccatgaaataggtgataacactagccttaacacatatggaaaagctgaattctaaccctataatgagagacgccaaagagaagtaattcaaatcccaccatggacactcagcaaagctcagaactccgaggcaccagatacctttggaggcagagtgcaagagggacttgaaaaataggaagattagtagaaagtttatataaggagcagtaagacattccccaccttatccccacccacatgttgctwtataaaataaaaaaagaaacattcagaaaaaaagagtttttagctattgctatggtttgaatgtcccctccaaaactcatgttgaaatttaattgccaatgtgatagtattaagaggtgaggcctttaaggggtgattggccatcagggcactgccccatgtagaattgatgccattataagaaagcaagtttatcccagtcttgctttcttgccttcttgccttctgccacgggatgaggcagcaagaagaccctcataagatgctggcaccttatattggacttcccagcctccagaactgtgagccaatgaatttctgtttattataacttacccagtctgagatattttgttataacagcacaaaacagactacgagagaaattttgaggtgaaagcagaaataaaacgttcaatggaagttttgaagaaaatgtagaaaaattctctctgacagtagaataggaaggctaagaggcaggaaatgggaggaaaaaaagaaaattagaagattaatccaagaggcataacatgcaaataaatgtaatcccagggaaatagggcataggaaacagaggaaaggaaatgagagatggagagagaaaatatttcccagaactgagagacttgaatttcccaattagaaaagaccactgagtaacttgcacagtagatgaaaacagacttacactaggacaaatcaccaacaattttcagaacacctggcattaaaaaaaattctaaaaattttcagagagaaaccaaaaatgatgtgagagggaccataagtcagaatgatatcagatgtctcaacagcaaccttggaacctagaacacacaggaacaatcccttccaaattctgagaaaatgatttccagtgtggatttcaaagaatggagatcgttttcagctataaaatgtctcaagaaatttacgttccatagaacgtttctcaagaatctactagaggatatgctcattaaaacaaggaagtagacaaagaaagtggatggcatgtggtccagaaataggagattcagcctagatggagaataaaggagtccccagagtgatgaggtagggaagcttctagaaggcagctgggcagcaggaccgaacagaggaagggcctctccaagggggaaacaaggaatggattcatttcttgatgttttaaattgaattttagctctgttggagagtttatacagaattagtaataagtacrtagaaacctagcatatcaaaaaaagatacaaaaacataatgcaaaatattcctaactcagttatgaatattttgagttactgtaaaagctgagtattgatttaaataaaagggtattataaactgttctggaggatgatgggaaggttaacatgtatatgttggactgggggatgtgagagggtcaaatatttatctctcaagtaggaaggaaaaaatatatgaacatatatatacatatacataaatatatgtaggtatctgaacccaatcaagatacaccataagcataacatctagaaatatgtaataaaataacagaagaattagctaaaactgttcaaaatacttggttctagggaatgggaatcagaggtgaaggagtgtgtcgggagactggtgtttcatgagaagccttgaggtaatatttgacttctaaaaccaaatacatatattactttgattaataaattaaagaaaacatatgtccacacgcacaaagtgtacacaaatgttaattgcagcatttttataatatcaaatagtaggcagcatccaaatatccatcagctgatgagtaaataaaatgtgatatattcatacagtggaatagcattcttcyataaaaaggagtgaaggtcaggtgcagtggctcatgtctgtaatcccagcactttgggaggccgaggcaagaggatcacctgagcccaggaattcgagaccggcctggccaacatgacaagaccctgtctctatagaaaaaaaaaaaatttaaatatccaggtgtgatggtgcgtgcctgtagacccagctactcaggaagctgaggcgggaggatggcttgagcctaggagttcaaggcctcagcaagctataatcacaccactgcacttcagcctgggcgacagagtgagcccctatctcaaaataaatgaataaataataaaatgaagtagtgacatgttacaacatggatggaccttgaaaacatgctaagtgaaagaagctcgtcacaaaagagcatgtattgtgtaattccctttatatgaaatgtcccgaataggcaaatttatagagagagaaaataaactagtggttggctgtggctgggaatttgggagatgggggtgaatggggaggaatctctaacaggtacagagtttcttttggggatgatgaaaatgttctggaattatatagtgtaattgttgcacaactctgttaaaatacaacaaaccactgaattgtatactttttaaaggtgaattttatggtatgtaaatcatattgcaatgaagccattattttaaaaattaaagaaaaaaattaacaatcatacctaattcatagagttgttgtgaggaataaatgaaataatggatgttaggggtctagtccagagcctgacgtaaatattaagmgattagttaacacgtacataggatatactacgtgccaggcactcttctaagttctttacatatatcaattcacttaccccttgcaacaactgtctaaaatagacactgttcttacccccattttatagactaggaaactgaggccagtgcaagtaactaatttgcccaagatcacacagctagtacaacagtagagctggaacttgaccccagccagctggcccagcatctttactcttcaccactttgatgctccctctctctgcctcccaggtcccatgtctgggttagtgctgtgtgctcctagggacgctgcttttcgtctgttgtgcttccaagtagataactcttcacttgccttttttccttgtctgtgtcttcaactasagtggacattctacaatggcaaggactgtacccatcttaattcatcttcattccctgcccatgatatrttgggatgagggtgggctgcagagtgaagcaaaggtgtttttctcttcatacaaatcccatgagtgcatggagaggaagtggggagagctgaagatgctagcattaagatgctagagaaacacgagacaattgatggagcaagatatctaaggaagtagaatattaagagtgagatagtgttgaaacactgaccttgggaagaaagaagaatgccgcttccattaagactgaaagagaggaggaagaggtggatattgtggaagtagagaggaagctcataccagackacttggatcatctcagtcaagaaggggcaacagaagaatcttgggccaggacaaagcataggagggtgaagtggaaggttgaggcaagaggagagagtttagaataaatacccaactttttggggtctgtgatctctttactaatacaatggacccttctcccagaaaaaaagtacatacacacaaaattgtgcatttagttttaggggtctatggactccaggttgagaatgcctgttctcaagacttagtaaaattgaatagaagtatttctgaaagtaatttgaagtcaagcatcttgactttttagcattccaagtttgtgtttctgtgactttcctcagcaatatttagaggcctgagagtagcaggtgatctgatatctgggactgaggccagaggcttcagggcaggagagggtgrratgaagtctgagagggtggtagggcttagaggaaggcaaaacccaggccaggaacaggtggcagtggaggctcatagagggtgggctgagaaaggtccactccggcttcaggccataagggggcgcactgtctgtacagaacataaaaacgtaagaaaaccaaaagtcagtcttctgtttactagtactatgctgcacaagcaatttaaaacaccaacagcaaaaaaatacacttctctgaaaaagtcttggtctaggacctaaacaattgcctgaaactgggtagacttacaccaatgagaggcagataaagagattaagattgagggagtagggcagggcttgcaatggtgccggccaggatgtggctgagggggtgtgggtgcctgccgtggatgctagggtagaagacgactctattaactgggtggctgtaagcagtacccaggtcaatgcctttcatcttctacaacctcgacgttgcctggaatcctaaatctttttcttcacttaacaaacatcacctctgctcaaatctgcaactgctttgatatcacactgcctttttcacccctctattatagatggcatttatttacttacatgttttttccccactagactatactccttgagaacagcgattgtgtcttatttatttctgaatcaccaattcagacaggcatgcaaacacttgytgaacyaatgcacaaatrtattttgctcttcttcatagattcctccggcctcagatgaccaggcaccactagatacagaayactgtgctttccttctccaaggtaaaggaataaatatctgttccccttcatgaagtgttactgttgggcctttatgccatcctgaagccaccaggatgtggaaccagatcagggaggtccacagttacaaccccttgtatctgtaacaccagcaggacattatctacagagtcctgctgcagggccccgaatgaagacagcattttgctgctttgtagcgtgagcagtgctgtaacagtgatgcatggatgttcctctggtgtcctgaaagaatgtaggtgcttcttgaaagctctctgcaacttattaattgggagtgattatgcgatggagaaaacagagtcccatcaccccctsagtcttccctgggaaatcacaagagggctgatagctctctgtgaggtgaaccgtttctagaatccccaccgtctcgtcctgttcttccgcccacccagttcctcaagatagcccctgtgggcttctgatgaagtcaccacaccactggctaatgaagtagataaaccagaacagtttggtttaacatttaaggtcagaaacaggaactttctagaggagaaatcaaaaaagcaaaagaagtataagggcagccctccaaccagtcagaataccgtgaccacctgagaggcccgtggcccagcggacacggacgcatgtcaactctggagcagatatcttcagcgcagcatctgacctgggagtacagccacataccctcattcctaaacggcagattgactactgsagycacacacagtctccgggcaatgtggagacatgtctaatatttagtcaacataactcagggtgccacagtcttcacaactgttgtgagcacttgaggatgctscatttgaagataggaatttgccctcaagcatctggggtttgggtacagaacagagcttcccctgccaccacctgctaattttataaaatgtgcattcaaaaaaaaatcctgcctgtaagaaggaattaagctacccatttaaatataacagctgcctgtgcaatctactgctgctctttataggaaacgcttaaataattgagatacttaattgggttaaagagatccctagcacatagatgttctataaataaaagaatgagtaaataatctagtaaccttccttttcatgtccttcacttaaagagatcgttctgttttgtttgcaccaataagatcactgttagaggactccagagaggtttgatttcaggtggggtggggctttcccaaggaagtcccttttcatttgtttcaggtgtactgccacctttttccctggctctttcactaaaaatgaaaaatttgttgatctttgctgtaagtaggtaggcatctgggctttgcttttgcaactagagtcaaagaagtcaagttatcaggctgatcttgccttgctatctagaatcagaaaggtttaagtagcccagggactactcaaagacagctggaggagaaagggagagagaaaaatgcttataaagaggtgggcaaaagagcgggaccttgtctcaaaaaaaaaaaaaaaaaagaggaagtggtaggaggtgtctgaatttcactgtgacctgttctgtcaggtgatttttggtggggcggggacatgaaaaaaaagttaaaatgtccttataaagacaaaatctttttctttcctggctgatgatttgtcattctagtcacttcctgccttgtgaccacacacccrggcttgacaaagctgttctgcagatcagaaagaaggggttcctggtcatacaccagtactaccaaggacagcttttttcctgcaaggtaaatgttcttcatgtgtttttgttggttttaagcgcttgtgatgcacttcggcactgtttctgtggattgtgggttttgccttcaggggaccagagatctgagcatgtcacctgagacctctgtgattcctgccactgtctaactggccaggacatctgccgccacctcgcgtggccatccaagatggagcacctcggctctctgggctgggttcttctcaacttatctgcagttatcacccctgcccaaaattaaggtttctttttccttttaaaaccaaaccatgttctggtttatttctattgctctatttcacggaggctatttactgtgattttatcttctttaaaatgttttcaggaaaagcgcgtattgataatttagattgtayggcttattggcccaatgggggtagtttaattttagttcctgcggttctgtttttctaaaaaacttctttacagtactttagtggataaattatctagagtcatatgttactgaatgtgatactggttatttgagtgatttttggcgccaagggtttttaatgggtgtgctttataaccacatggaattagaggttttctcttttccatttgttctctaaaaataaaagcaatttgtataatgcttaattgtagtgtttttgtaggattgtctgaattatttgttatgcttatgaccatatcaatgaatattcactcaaattctgggagaaaggcttttatctacaatagaaatttttacacagttgatatgggatatttatttcagaaactgcccaaacatagacactttggattttgtagtataagcttttacttaattaccactatcacataacactaagaaccattgacaaatgataactataaaagccattcagactggaaatgcgaacattaatcaggatgtttatcaaaaccgaacttttcttttacacagcaacttgttttctaaaattactctgtcagaactatcagtaagcaaataaaggtggcttatccacacacatcttgattttgaatttacatacatttgtcataagtttggtttctattaagtataattgtttaaagaatgtctgtgtagacaaatttgaatagaattaatcatttacctataaatgtgaatttctggaaactgcaaaatgtgaccaccaatgttactttgcacatctcacctgaatagtttcaaacaagcaaaaatgtgaaactgagataagagggacttgaaccccgtaaaagaacagactaaaaatatgttgtgtcttattttaagtaaaactattaatgagaataaaataaattcgaatgtgaaggaatgtcagtatttttcttatatttacgaaggaataaaaaagaactatgcgaaagttaattcaaaatataaaggtcccctgtttaaagttaagtttacattgctaaagcatcaaccccatatgttacaaagatattcctcttcattctagctcacccccaggaacatcaggggaaaaatcttctaggtcttgccctttgaacaagcactgctgtggtgggatggagttgtgcctaggaggacatttccttagcaatcccagagacccttttctttgtagcatttaaatttttgtctcttttgtaaattatgccttgaaacaattggtaatttgggaaacaatttcagtgctttaacttcatttataattctatctctgaaccctttggggaagggaagaccaacaagtaaagtctcatttacttgttgttaaagtaccatttaacttggagaggacaggaaattaataatagcactcaataattatgagcacgtagtgtaagcagctactctttatgcattacctcgtttaatcctctcagctacctttagagataaggaatgggctagataattgaaggaaccggccataggtcactgggcagttggggtggggggcagtagatggccaggatttcaggctcctactgactgtgtgtgttacagatcctcccttccaggccagcatatttttctcagaggtaggtgattatagacttttattactgaagctagctaacaagatcttggcactcacagttttaagagagaataaaagagagagagcaagagaaagaagagagagagagagagaagaaaaactttgtaataaatttacaaacatttttatttttataaataagagataccattgcaggttttatataataatgggctgaagaactatttttaaattaatgcataattttactaaagaattgtgtgcctttacaaacttgcctcgacccacttccccaatcttatttcttgtcacttccttctgttcaacctcccactaccccatcccctcccccgccactgctaacccacattttggtgcaccagaccacaagccaccagaaagttccattctctttcaccttttttcactgcaactgtttctttaattgcattcttctttatttttaaaacttctgatcatttttcaaggcggacttcaagaaacatacccttttggaggccttcccatcttctccctgcccccactaaatgtttctttggtgtgcatttgctcaatgctttgatcttggagtaagtataacattaatcacattgtcttagtttcaagtacttatttgctgacagacctgagctccttctccatctytcctggcacatgtagatactaaaggcatttattgaattgaaaatttgtcacaagtattttttttctcagcttcttacatacgcatgaaagactttgattgtacttattaacttaatatttactgagtttccatttattgctatgaatgaagatgcaacaataatataatattttgcattctaccatgtttcagctttaccgaagccctagtctcattttagcttcaaagtatcatatagacattgacctcaagaaatttaaaaaattgtacaatgactaacaaacagggaaaattacaatctcatttttttagtataaatacattggttgggccaaaacttagctacccttgccaaaactatatrcccaataatgggcctctttgatgacaaagaacacaagggcagttgttaacttttacttagtcactttggattattctcagaaaattctcaagtcaacttctccttgttacctaaagagtacaggcccttctgtgtatacaggagagatggcaagcaacttttaaaatcagcttaggtaaaataaaattaagaaatctgcttataaggttatacttatgaagagtcaaacacttataaaataagattataaaggcttggactttattactaatagtagattttatagtagagtgacattatttcagttaatctaattttcttcctagtgtttttttatctgctagtttcccaacttacagatatcaaatgaaatgatactatttcatctgtataytgaacactgcagaaataaacattagaattaggacacatcaaaatataaaactaatcagtgtccacagatttgaagagtttcaagtgttcctattttgccagatggaagygcactycttaaaaaagtgttaatgttctacagkgtcttcattttgaggctctcggaagtcacctcctgattagatgttggtttcctagggatatctccctatagctgctgtggccgtggtgttccccagatggcatctccttgttgctttcctcagttcccttctgatccaacttcctgccttatactattgactgttcctgttgttttggtttgtcagtttcaatgcttacatcagtctgcccagaaattgcataactgctccatcttgtaagatatcggtgggggatgggggggagtggaaggcgcttcaattaatcatcctaataataacgttaatacttacattgaatcaggtgtttttctaagtgctttaaccctatgaaagcatttagttgtcatacagtcctgtgaggtagtgtctggtgtcctcttcatatttgaaggcaagttcattcattcacgtattttatttaattttctacaattggatcaattttgtcttaactgttgaatttcaaggcaacttcctggaataaacaggtagcaaaccatggtgcttatttgtaactaagccctcaagttgagctcaaataatcataatacttccccaaataaatgcatctatatgataagtgcttttataaacaaattattctgtgtcatcatatcatcatcatcatcattatcatcaccatcagcagcagcagcagcarcaacagcatcagtagtcagcccctctgtacacttgactgagtagaagttggttgttaacaattacaggcctctgcatgggtcacaaaacatgatctccaccctcaaaaactttaaaaggttcttagtcttttgtttgtttgtttgtttgttttttgagacagagtttcactctgtcgcccaggctggagtgcagtggcgcgatctcggctcactgaaacctctgcctcctggctcacccaggctggagtacagttgcgtgatctcggcttactgaaacctccgcctcctgggttcaagcgattctcctgcctcagcctcccgagtagctgggactacaggcgcccaccaccacgcccggctaattttttgtatttttagtagagacgggtttcaccttgttagccaggacggtctcgatctcctgacctcgtgatctgcctgcctcggcctcccaaagtgctgggattacaggcgtgagccaccgcgcccggcctttaaagtttagaataattttagtcaagtggcattcacattttctagtctgttgtgactgatagacatgaatagattaaacattctactttttatacccaagtacacatatctatgattgtatagtaatggccaaatataagtgtcctaaaaactgagaaagaatgaaacattgctttaaatgttagtggaagaagagaggtaaaagtgaaccacttactgggtttaagtaagttttgctcaacttcagagccatggctgtgtcagccccacttgcaagtacaaggagcctgttactcaaagatggtcagttgttctttctggcggaaggaaaagctatgttaaattggggaactagcaaacccacagttctgtggttgcagcattgattcttatttcagcatctgttacatggacagaagggagggtctccctccctctctctctctcgctctctyacacacacacacacacacacacacacaaataaacacacatacacggaaacacacacacacactcactcacacactccttcttgactggataagctaaagtgaaaaagagattatgttttccatagcagaaaagctgacaccaaattcagcaagcagattaattatgcatgtgaattgcaatctcccagataatttgctttccttctttttctggttgcactttctagagggaagtgaattaatggaacaattaccttgtatttaaataataccctgcattttgtttcctcagtctggtagtagtcactaaaatttatccaagctatgtatccaaatgtgtgaagtaaaaggatacacaaatgttatttgtataaaatttgcatattttccctattcagcattccttaggcaaagtttaaaattagaagtggatctttattaacctcaggtgcaactttttttccataaaaaccttttataataattcatgagattataatagatgtgwgtgcattcaatatagcttccatcctgaaaatgttttttcagtttttatttatttttaaattgacatataacggtatgtatttatggggtacctagtaatgtttcaatacatacaatgtctagtgatgagatcagggtaatcagcatatccatcatctcaaacattttttatttcttgtgctggaaacattcaatcgcctctcttctagccattttaaaactatgtactgttaactatagttatcctatagtgctatagaacatgagagcttattcctcctgtctagctataattttgtatctaaacaaatctctcctatcctccaccttccccctacccttcccagcctctagtaatctcaggtgtaacatttaaaaagtagatcctttgtacctccttgacatcatctgctcatatcaccctcaccagaaaggccagcttgaacaaagaagagtgggatataaattctttatagagaaagctaggtaataggtgcaaagtgggagtaaggaaaaaagagaagatcaygcctgtagttttgcactgttgagcactcttttgtcatcttaaaaatgcgaactgaacttcccccactgtttctaatgctttataaacagttttaaagtttccctttgaaaatatggaatatggtaggcaccttggaaaactttggattttttccttttcttgctgtcattcatgttgggactgttcctcaaaatatcatggattctgtttcttttctgtgaccactgagaatgacagttgtgatacttcatctacctggtgatgttcacacagtttttctcctccctccgtacccaccctactgttcactgcacgcagttcttcctccagtatcatatctccagtaccagttctttaaagctgagtgtctgcagctcccaggcacaaaagaggcaaatgtggtataaagaaaggggagcaaaggtagagacagatttggatttatattctgggctcttggtaaatgtggaggctgagcaagtctctggagcctctgaagttcagtttcctcatctataaaatcaggcaagtgctatctactcgctaggtgtgatgtgggttattttccccttccattttcccatgttgtcgtctakgtagatatggagcatatctactccacccagcgtcaccactgacttactgagcccctaatatttactaggcatcatgccaaacgcttgaaagataattactcttttattttcatacatagctaggtaaagttgttattaattatatccttattccagatgaccaarctgaggttcagggagggttaagtgacttgtctggggtcacagaaccagtaactggcagagtcaagatycacacctttcctctctctcattttatgttggcagtttcttaaaagtataatccatgtctatttaaactgttttgtatcttctaacatgatccactagttgcttcctgataatatgtctatatacttttttgtgtttccatgattattgaatgattatttgtaattccacattttctttcttttttctttttttttttttttttgaagatggagttttcgctcttgttgcccaggcacaatcttagctcactgcaacttccgcctactgggttcaagagattctcctgcctcagcctcctgagtagctgggattacaggcacacaccaccacgctcagctaatgtttttgtatttttagtagagacagggtttcaccacattggccaggctggtcttgaactcctgacctcaggcgatccccctacttcggcctcccaaagttctgggattacaagtgtgagtcactgcacccggcctataattccacatgttctatcaggaagagatcccaagtctccttttgttaggtcggctggtataccaaacatatttgagaaataaatataaatgcttgaggattttatggtgggaagtctttaaaataatagctgtgaagatattagattaggctatttaggcacttaaaattttgataaaagaaatgttatacatattccattgtacgttggtattggtaaatatttaccaactaaactgtaacttttaaaaaaaatgaagataaagagagcccatcaaattaatacaaatttcctgtctcaatttatctgtaacttctccttttgtttttttctgcaaataagcttgtcattagagattctaaaatccaagaagcctattgagaatgagatcacattattacaaataaatagaagtttctgttatcattgcttgtatacaaatgtctgctgtacattgtctcactgtttttcagctcagactacaatggtaaaaatgcctggagaattagagagtggagaggaggtagagtgtagtgcaggataacagaatcagttctgagcattggtgcatctgacagagaggagatgttgcccagtggtcctcatcacagatgcccagagatctcttttcttttcatggctcatagtgtatgtggttgggcttttcttaagattgctgtacatttttccactctggccatacttcctcaactgttagaaggtactttccactgtcagtactcaggcaaggcaaagcccggagccccttcaccactcaggatgagctaataccaatgctgttggctttgggttggtatcatgtaccagttctgcaatacctgacttcaaggactccgaataagaaatgtggtaccaaagccaaaataagccagactgagaacattaaaacatagagcatggatgtgagatctagatttacacccacacaaaacacatagtatacacacaactaatctttgcttttaagttgcgacttgacaatatttcctacagtttatactagaaattgggatttgttctccaagataattttgcaaaagttctagttcttttacattttcttttaacttcctctgttccttcccttttccttctttctttccttcctctcttcctctctttctcccttcagtcaccaggcactgttgtatatattttaaacactctgtctcacctaatcctaatgctgccctatgaaatgaacggtgtgattgcattattagcaccccttctttaaagatgaagaaactgaggctcggaaaatttaagtaacacattcaaatacacacagcaaaaaatagttgagtcagaaaattcagcatttcaccataccatgtcactgcctagttgattcattttaaaaacaatatataatgatcctaatttcataaaggaagcgaggaacattagcttttgtttggaatgcctttacatgggtgtatccctgtatcctagatccacacatctaagaagtaaagcacatttcayggaccgtgcatctcaaaggttttttaaataaaactttaggttcttaaaatgccarctgacttgtgtttttcccacgcattgcttcraccaaactaagactccagaggttccacttacttctctttttggaccagtcactgacttactttgagactttggggagtgacttcaccctccagggcccctatttccccattctaacatgttcagttccctcctgtctttgcagtattttctaaatgggagataatgacataaggagaaagctatgcacacacaaaccaaaatggtttccgggcagaattattttgttgtttgtattcacattacctgtggtgagtggagtatagcctgcatcaccgaggttttgcctctagaaacaagagctagtgagaacgagcagcacgctgacaccacctcaccaacctctcatcctggaggtctcctcctgcatccctgtctgtagccacacccaacctgccacagcttcctgtgtgtgcttttgctttgcactttgtagagctattttctctttcttttcttttctttcttccttttttttaatgtaatggagccttgctctgtggcccagactggagtgcaatggcgtgatctcagctcactgcaacctctgcctcccgggttcaagtgattctcctgcctcagcctcatgagtagctgggattacaggcacccatcaccatgcctggctaatttttgtatttttagtagagatgggttttcaccatgttggccaggctggttttgaactcctgacctcaggtgatccacccatctcagcctcccaaagtacagggattacaggcgtgagccaccatgcctcgccctgcagagctattttctctgcctgaaatgcccttttctattttgtctgtttggaaaactactggttccctaagacttagctcagtgggcaacatcaccttctctggaaaaccttcttttgccttcccaggcagagttaaatacagttgttccatggtatccacagggcactggttccagtaaccccctcggtactaaaatccatacatactcaagtcctgcagtcagccctgtggtacccacatgtacgaaaagttggcccttggtcgccctgagtttcgcattctgcgaatacttgtattttccatccacatttggttgcagatgctgaccctgaggacaatgagggctgactgtattgaagaaaattgcgtataattggacgcacaccattgaaacctgtgttgttcataggtccactgcacttcattctctgtgctcctgtagctccatgcaaataatatctttaaaatattcatattagtgtagtcttgcatttgcgtgactattttgtttactggactgtgtgcccctcaggagcaaggattctctgctgttcatcttggtatctttagtacttaggacaaggtatgtgctttattaaatgtgagtgaatgactgaggtgtggaggccacgggcaaagaggacccttttctccaccagtggcaggggggacacaggcagaaaagatcaagcctggttgtgttcttgctcttcttaatacttcctttaaagatgttgagaaaccgaagacacatttagaacttccctaaagagcctaggaagggcccagtcctaagtaaaaccttgcagaaatatgtgtttccctaattaacatgaggtcagagctttgaccttcaagggcaaccccaaaggatggcagggaaactcgagatacaggaatcccatagccagaaatgataggaaaggcaggaggccactccagtttatagctgtgcgaccctgggccagctatttaaacctcagtttcctcaaagtgggaatcatagtaataccctataggattgtggtgagaattaaatgtgaatgcatgtaaaacatttagcactgagttaaccactcattaatgttaacggctattattactgaccaactggtcttttcatttgttctttagctatttgccctttctctgactccaaatagataggctttctatagagagagcatggagtctctgatgaatgaagaaaaaaacagactgatctttaagcaatctcctactgctctgttgaaatctaggtcaaatgtcacttcctctagggggccgcctttggctctccaggggagagctattttttccctcttcctgtggatctaaaaagtttcgctgtattctagttactgtgtctctctcccctactcaacaggccaaagccacgtctgtgtgttctcagcatctaacacaggacctggcatatagtaggtgtttggcagatgtctattgaaggaagaaatttacaaatgtatgaatttttttagtgacagacatttagaattactgggggatgaatagcattgttcagatagtgagacgcaaattacatgcaggtaaatgctagcacctatatttccagcttgctccttggtacaccgcatatgtgcatcccaggtgggtttgcccctcattcagtcactgctctgtctccaaggttcctttccctcccacctcagcagcgctcagcttacaagcaggccctacagagttggatagagacccactgccaagcattaccggcagccagcaggttttacagcaacagtgccaagaagcccagcctcaggatctgcaatctcagacagaatcgcttttgcggctggcaaggtagggctaggcagcaggcacaggtgccatttcacagaytacctcgggccagcagctgccctttagacaccaaattaactcaccaaagttgtctttccagcaaagtggtttaatgtgaatttgaagcatttagtagccttgttttgggtgtctgtacctttcagtggatgggattgtctaagtatgtacacaagaatattattgttaaattcctcaaagaaggtgataggggacttttcaagtcctgtataccattaggttatggattgttttgttcatgtacacagctcatttactgagtacctcacatgggccagacactaatctgctaggagagatgaatggwaacagggaccacactacagagatctggaccaaagctcagaggaagggctcactgattctccccagcctccagaacaggatgcctgaaaccatgatgattgttgcgataagtctgagggtgtcattttattattgatctatgaatttggctgtcttgtcttttgaacatttcatctcgtggtgagttgttttaattgggtttgctctttggttgctaaggaaatttggagggccttagtgcaaggtcaagaatcaatgtacaacaaggtgtggtggtgcacgcctgtagtcctagctacttgggaggctgaggcaggagggtggcttgagtccaggagttctgggctgtagtgtgccatgtcaattgggtgtcagcactaagtttggcatcaatatgggagcaggggaccactaggttgtttaaggaggagtgggtgcactggctcacaccagaaatggagcaggtcaaaactcctgtgctgatcagtagtgggatcacacctgtgaagagccactgcactcctgcctaggcaacatagtgagatctgtctctttaaggaaaaaaaatagaataaatgtatagagacaaatgcagggggtaagaatcatcgtgacctagaagatgccagtgtacacaatatttgtatgtgatttggcacatgttaattgcagcctaaacctgaacagtgcctttgccatacctagaaaaattccccttcatgtacaagaaacatacatgaaattatattcgtaagacatttgaaatcttgggggattgttcttactatatgtgaagaaggtcttaattaaagagaagagtcctatcttagggtttaaaacttattaaagaggaaagaagagaaataaggaggcctggactctggtcccagccacacctccaataagctctgtgatgttaggcatgtcctttaacttgggtgtcatttcatgcctctgtgacaggggagtggccagatagatcatctctaagatccctccacctctacattctatgactgctattcttactacattcattctataaggaagttggcatagacccagaagatagcaaagaaaactatgaaagatttggagaataagccctaaaaaagcaggttacaagaatataaagagaccaaggcatgtgatggaatctttatgaattgaacagctcctgttatttcctctgagaatagcccaagagagaccttcaatcgtatcagaaaagatttaggttacaaagtagggatatgagacaccagagaggttgtaggatttccttatttggatatttttaacaaaatagtagatgactctctttctgggacagtttgagtaccgtcttgcctagaaactaggagtgaactggatcaacgtgtcttaagctgtgtgtggtaacatcccataaaacaggtctcacgtgctgctctgggaacttccctgatctgtgcgggggcagtccagcagctaggcagctgagcagagcgcatctgcctggggccagtgaggagaatgcatctagacagagcttttcgtgctgctgaggtaagagcaggaacacagccccccagcccccaggagcgaggctgggctgggagctgcccactccctcacttgctccatttcacagaaggcacctccgagccaaagctacagctgctgatggcgccagcagctatttctcagctcatttgcaatactttctaatctagctctaatttgtatgtatacttgtcagctactgcatagaattttggaacttttaacatagaacggactccgcttctcaatttatgaatgagaaaactgagtcccatagaggcaagatggagcctaaagttacacagcctaggtctcctgactgccaagcttggcacttccttctatttcctgccagttatttccattttgatttctttggagatgttcaagtatattaattgtctcaatatcttaattgcctgggctgctttaggtattttatatttttatttttttgataagcctctgtgctaatttcttacacttatctagttttatttttccctcagagccttgtgtttaaccttttcacttgttcgtttttgatcgtcagaactcttttcattgcattaactatttcacagtaaattagctgtaatccatgtgctgcatttgaaacttgatatttaactgtgggcttcatgcctgaagcccctcaccaaccccctagcagccagggcagtactttgcatacagacacatatatggagtgaaagaatgaatgaatggcatttgatatcaaggtaatagtgcaatcatggttaaacagctagcccataatattcaatttattgaaaagatgcatttggggtactctgagctttcagtaggggaaagtctggatcttaaattgcttctggtagaatgtgggctaaagggtagctgtagaatttaaagatgttagtatcaggagcatcactgtctaaagctcagggaaggagagagatgctaaggcacagaaaggcctccccaagccccagcctggagtatccccttttcttgcaggaggcttgttcttgtgtcacacccttaatgggattgggcaacttggtagaaaacagaggtatcaggaatgtactaagggagagaaggaaggaatgagaactccttagctggcgacagagccaggctctgtaagatgtgctacacagcttcagaagcccctcggtgtagtggtcaaaccagaggtacccagagcaatatgaggttgatgaagtttggagtaatctggattgctagcttcccataagtgtttatgtggcctgagataatagtgtcagaggagagccgttgagtctctcctcctgaatagccttccccctaccttccaccctgtggcatttacatcagagcctgcagagagaagaattctgtaggctttgagagaatccatgtatctgcagggagaaaaaggacaatctggaggagattctgacttgacaaaaagattcatcagagtccctttaactggccatctgtttttaaggccatttataattatttggtttcttaaaaacaaagtcattttaaaattatattttctgaatcatcctttatgtaaaagttagtcatatctgtatccatagagatatgatatcccaagaatatatagtaaattccatatattcgcaaagtaagatctcctacagtggtctactttataaaatgaaggggacaggattaagtaaaagcaatgttttttccttaaatagattaatcttgatggctttttaaaaatgtatgggtattttattttgcttcatagtcctacatattttatttttcgtttctttagttgtcatagtctaatgctaaagcttacaatattaatgttattctagatgatgtgttcttttggattactgattgttcttgagatgtttggaagttgtataatttcccctctggaaatgtactgaaatttattgaggcagagctaggaacttgagtcctgagtgtccggtttgactttaactactgaatcaagttgcaggaaaagtggggcacattcaaaagagtcccttggcaaggtgataccaggtcacagatgcctccctgatcctggcaggttatatgattcagcatcagtatattgaatcaaaatactgactagcccagcactaccatctttcagaaatgattccaccccttgagcatctctctctagacaggtcaccttttctagcctttctgcttttaattatcagttatgaaactccccagagaaaattccatttacatttttacatttactttagaggatgttttttcttctgtaaattctgcagcactgtgttcaagagtaaactcccacaaattgtttctatattcagactttagagaacttaagttcaggtacttttatgataactcatcctcagaaattcccttcgctactgacttgggaaataccagcaccctttaagcagaaactcaaaactcactgatttaagaaatgaacaggctttgtggcttttgcagtttgaggtggggctttttttttcttaaggttttaaaaataatataattttttaaaatgaacaaccaatgctttttttttggccaacgtcttgagattctacaactattgatttaataaatttaagtgctctcacatgcactcacacaaaaaactagcagcccagacgtgaccttgatgaatgagttgtctttttataatagatttttgatttgggcagtaattcagaaggggatttcccagattgaccacggatttgcagaagacctgaaaatggtttgtggcagggcatatttagatgatgtagtcattaaaaagggccacactcaatgcaggagcagtcgggcagagctgaagaaaccactcacttataccttggaagatacatgctttctttagcccctccttttaagctccagatgcctcagcatgcccattactgcagcagtatctgtatagtttgctgcctatatggtgccagtaatttgcaaactaaagccatcaccaactaatcttacttatattacttattaatcttataatattatcataacccatattttcaaatatgcgtgaattaaaatgggtgcatttttgttttttttttgtttttgaaatggggtctcgctctgtcacccaggttggagtgcagtggcatgatctcagttcactgcaacctccgcttcctgggttcaagtgatcctcccacctcagcctcccgagtagctgggatcacaggcatgcaccaccacacctagataatttttgtatttttggtagagatggggtttcaccatgttgcccaggctggtctcgaacacctaagctcaaagcaatccgtgcacctcggcctcccaacatgttgggatcacaggcatgagccactgcacctggctcaatgtctttcttaaaaatgatctggtctgcctgtttttacactaattatgtcctcttcctgctgctttgctttgtgaaattactgccctttgcacattcagtttaattacttaaaggtctctgctcagttatggaccttaggggcccttttaatggtaactccatccttttcctgctctgctcatcagcacctgcatttacaagctccagcctggcattgccttgagaatttgtacatggataaaacatttcttctcattagaacttcagtttccttatttataaaatgaggacattgtaataaattatttatgaggttccttctgtctccaaaagttaggttgtgtttccaggatatgctgctcatgctgatggtaaaagggactctctccagatatctattcatgtttctgcccaacaacaacaaacagtatcacagcaatgtcagttgctgattatcccttctccactttaccttttaaactaagttaatccacttctcttttgcatttgctgttaaatcactgaagcattttggattttttaaatttaaaggtgttcttgctgtttgacttctctgagtttatcctctccactcataaatctcgtagaaaaatattgttacagatgctcaaggcttttcatcttgacctacctgctgtggtttaaaaataatatgattttaaaatacatgtactttctatgtcttttaaatgaatgggccactgcaatttttatggtaaaaaaaatttcccattataccatgatctttagatattttttagattttctttttttacccaacactgtaattgttttgtttcttcattggccctacttgtgacacttagaatgtagtcttgttctctgcttctacttatatttatcgctagctgctgatagcgctctaaaatctaacattcttgtgtcaagggataaggccaggtttagagtcagagatcttgtttgtcctccttacctttgacattgttccatgctttcaggataactaactgggtcaatatagacgtgcttacctaaaatgaagaatagcacctggcttatagtaggcattcataaaatatttgttaaatgaatgaatgtatcttataatcccataaacacctatgaaccaagaggtcttaagacatttaaaaacatgaagggctggacagccggagagctggagagccttctattcatgcatatgtggatatggtagagggtatagaagagacctaagccaagttagtcacaaggatttagcaaagtatattaatacaaagttctatactaattccttaaaacagaagccttgatttctgagcacaggaaagcaaaagctttctactagaatgactggacaagctcactatattgtagttttaaaaatctcccatggggctatccatagtccatatacttaataactcattgkttttttttttttttttttaattgatcattcttgggtgtttctcgcagagggggatttggcagggtcacaggacaatagtggagggaaggtcagcagataaacaagtgaacaaaggtgtctggttttcctaggcagaggaccctgcggccttccgcagtgtttgtgtccctgggtacttgagattagggagtggtgatgactcttaacgagcatgctgccttcaagcatctgtttaacaaagcacatctggcaccgcccttaatccatttaaccctgagtggacacagcacatgtttcagagagcacggggttgggggtaaggttatagattaacagcatcccaaggcagaagaatttttcttaatacagaacaaaatggagcctcctatgtctacttctttctacacagacacagcaacaatctgatttctctatcttttccccacatttcccccttttctgttccacaaaaccgccattgtcatcmtggcccgttctcaatgagctgttgggtacacctcccagacggggtggcggccgggcagaggggctcctcacttctcagaaggggcggcagggcagaggcgccccccacctccctcccggacggggcggctggccgggcgggggctgccccccacctccctccccgacggggcggctgccggctggagacgctcctcacttcccagacggggtggctgccaggcggaggggcgcctcacttttcagacagggcggctgccgggcggaggggctcctcacttctcagacggggcagccgtgcagagacgctcctcacctcccagacggggtcgcggccgggcagaggcgctcctcacatcccagacggggcggcggggcagaggcgctccccacatctcagacgatgggcggccaggcagagacgctcctcacttcccggaaggggtggcggctgggcagaggctgcaatctcggcactttgggaggccaaggcaggcggctgggaggtggaggttgtagctagccgagatcacgccactgcactccagcctgggcaacattgagcactgagtgaacgagactccgcctgcaatcccagcacctccggaggccgaggctggcagatcactcacggttaggagctggagaccagcccggccaacacagcgaaaccccgtctccaccaaaaaaatacgaaaacgagtcaggcgtggaggcgcgcgcctgcaatcgcaggcacttggcaggctgaggcaggagaatcaggcagggaggttgcagtgagcccatacggcagcagtacagtccagcttctgctcggcatcagagggagaacgtggaaagagagggagagggagaccgtgggttgagggagacgggagagggagggggagggggagggagggggagggggagggagagggagaactcattgtttagtgaataaatggatggatgggatgtgtgtctaacaggaacatgaaggcagagaacccgagtagacagcctgggagaggagaaaagacttggggattggagttttggctgcttctccacccagctgagtgatttgagatctgtatcttaacttctctgagatactgttttctgatctatacaatgagaatatacatacctatgccatcagcctatattgaaggacattgtaagaaacacaaaacctgtgtttaccccatcccacaaatggcctcttcttaaagcctgtgtgaagattttgctgtcagacatcagatctgctgccctaagaaaattggtttgtctcatagatagtgaattgtataaccgatgatactttcctttttgccttagcttctagagaacttggagatagattttcagcctacttgtagcaaaacatgcggggtcttaggcatgtattttaagtattagagttcctcccgaccatcatcttatttcagttacgctttctttcttatcaattacatcatttagttggtttaactcttgggtttggatatatctttgtaacttagctcaaattatttttggaaaaaggcattctgaaaaagaaagagaggaaggaaggaaggtaggaaacaaggaaggaagaaggaaagaaaaaaggacgagagggagggagagagagagatgacaagaaagccagatagccagtgcctgtctcttagggttattgtgatgtgttagtgagattgtatttttaatacaattaacccctcgacagtttctgtcatcctttaaaagatccaatgtaccaatactttcttagatatgtaagacaataataaaataaaatttttattgatatcaaaaatatatttttaatgaatacatttaaatttaaatgaagacatatataattctatgattttcaaatcatgctccctggagttcccacagatgaaggtgacaaggagataagatagcaggggcaggggtacatttgggttttttcaaccaaagactctcagagttgttatttttatttgtttgcttacatgtaaggtttacatgtaaggtttctgtcaacaaagggttgcttggtggaacaaaagtttgaaaccactgatatatgtatgtggcaggatggtaatttgttggataatggatatggatttgcaaaattgagtgtaatgcatttttggcctacaggttttgatgttaattaagactgttttctgtttggtgtggttgttggtggccatcaagaacaaatacagcactatagaataatatgaaaatataaaaaagaaatctactgaaaacaacatcctgtcacaaatttttttttaaatcgataacttccctgaactatccaaaatataactatgcttagaaacaccccaacccccacactcccactccacttatcccctctgcaccagtaagttcaacaaacttcagtgggtctccgatttgaaacatgctggtgtggattagctaggggcatggagattatcatccattttctgttttattttcttctcacccactagagggcagcagtgatgcacaggaaaagggaaattactcaagcactgtttctcagcaagactgtcgcttttctgagaagaaaacacctagaaagcgcctcagattcccatagctgaattatgagagggtcagcttccctttgttcatccctaaataatatggagaattttgattaacttcctttgaagttataaactgtatctgttggcttggtcaaatactaattttaaatatgaacacgaagatacctcttaaaaaagacatttatgtaaaagtgaagtgttttagttgcttattgctgggtaactactctaaaacgtagtgacttaagacatcactcgttttgtcttctctgttcttttggttgactgagcacagctgggcgattcttctgcttaatgtgatgttggctgggaatgtggtcatctaggagctcaaatgggccagaaagcccaaaatggccctctcaggttgctggcattgatgctggctgtcagatgggatctcagcaggtttgttaaccagtgcacccagttctccttcattggcttctttatttatgtggcttaaatgtctcatgtcatggaaattgggtaccaagagggagcatcctaagaatgagcattccaaaaagaagraagcagaagtttccagccccagacatcatttctaccaccctctaatggtcaaagcagttaaaaaaccagcccagattctaggggagggaaataagctctacctcttgatgtgaggagcagtctgtatagaccgagagggaagaaattgttgagagccatctttggagaccaccacatggaggattgagaaaaagcgtatttctgacttacattttggaaagatagttctaaatcatgggggatgcagaagaatatttcttcatgtaataaatgggaattgcttcttaatgtggtattttaagaattcaaatgcacaaaagttatcccttatgttcttcttctctccagatctgttacctaaagcaataaaaaatggccagaggatcagtgtccgatgaggaaatgatggagctcagagaagcttttgccaaagttggtgagtagacctggtaccccaaattgcatcattctcttcttcactgagtagcttcagggtagattcaatgaaatgggaacatgagcaaaatttcagagatgacaagaaaccagtagtatttgtttagaggagctgggagaacttatttttgaaaaatatgcttcaataaaatgactttctctatcaaaacatggaatatggactctactcttacatagtttgttcctggaaatggtttgtaagtctcatcttttatatcttgtcttctgttttgctgtttccttgattttaataccatcacatactttctcttactctttatcactaaacctgtggtttccttaagagtttctataagagttctttgtggaaacagaggtaccttatagaaattatgactcttttactgtggatgttgaaagtaatgctggtgcccctattcagtagcaacagtcatcttgtgagattctgactcttccctgggatcatgccttaatgyctgaatgatagcctctctcgtcccttcaccttccatctagtcttccctcacctctctaaaagctgttgcctgaatcgtcctgaagcttcagtatattgtgtacattacagatactgatggcaatggatacatcagcttcaatgagttgaatgacttgttcaaggctgcttgcttgcctttgcctgggtatagagtacgagaaattacagaaaacctgatggctacaggtgatctggaccaagatggaaggatcagctttgatgagtttatcaaggtgagtaccatgcagaatacaaggagacacatytgaaacttggaacttgaattctgttttaaaaaatatccagaaagacattycttacctccttgcttcgacattacatattctttcctttgtgattttcttgatcactgcttgagtttctaaagatacattatatttttgcagattttccatggcctaaaaagcacagatgttgccaagacctttagaaaagcaatcaataagaaggaagggatttgtgcaatcggtggtacttcagagcagtctagcgttggcacccaacactcctattcaggtaggctcaactcctgggttggagcaggatttcaggattacagattctaaacttggtattcaaacctaagggatgtaaacaaagacagaagcaaacacagctttatggatgactcccaattttcctgtgactaagtgggtcagttctgggtacataatataggagcagtcctagctctgggtagggtccaatacaaaatgatttgatcagcatttaaacaatcattaaaggctgcccagattcctttctaaatcttatggacaaaattagctactcaagcttctatctttaaacttcatgataatttttaacacctgctaagtgatcaaaaaattatgttttcattgatttggaataaatttgtaaatttattccgaaggctgccatccaacagccataatggaaacttccaacaggccaaacagtatagttgttgcaacatttccaaaactgaattattcaaaacgttagttgatcttaaagataaactcatgaggccgggcacagtggctcacgcgtgtaatcccagcactttgggaggccaaggcgggtggatcacctgaggtcaggagttaaagactagcctgggcaacatggtgaaaccccgttctactgggtgcagtggcgcatgcctgtaatctcatcgactcgggaagctgagacaggagaatcgcttgagcccaggaggcagaggttgcagtgagccgagattgcaccattgcactccagcctggcgacagaacaagactctgtctcaaaaaaaaaaaaaaaaaaaaaaaagataagtcatgattaaataccatctatagttgctaagacaacgtttggccttttgtttttaaatacaggaattttcagaacctttgctgggtcaaatgtgcaatgtgaatctttaaggcggagatacattcactacacagtrtttcccaaacttttatgactcaggatttctctgagggacactactgttttcaaaaactgtcagtttgggaaacatagtgctaggctgtgaagacataacttgagtttttattaaaacatctaaaaatcaccttctggcagctttactgttaggaaaaaaagattatatccaaatgattttattttatagcaatttaattataattgtatcaagaaactcagaggtacaataaggattgtccacagtgatccaacatttaaaccagcagagctaaaagcggaatcctgagttttgtcctgtaagcattataccacatttgtatttatatgtgtatatatatatgtatacatgcacatataaataaaatatttttattatttatgtatttatatatagaaaataaacatatgtatatatttgcttctaaatgtaaatatatatctggattatgcgtatatataggaacagagagatagttttggccgggcgcggtggctcacacctgcaatcccagcactttgggaggctgaggtgggcagatcacgaggtcaggaaatcgagaccatcctggctaacacgatgaaaccccgtctctactaaaaatacaaaaaattagctgggtgttgtggcgggcgcctgtagtcccagctacgggggaggctgaggcaggagaatggcgtgaaccaggaggcagagcttgcagtgagccgagatcgcgccactgcactccagcctgggtgacactgtgagactccatctcaaaaaaaaaaaaaagaaaagaaaagaaacagagagatagtttttaaatctgtttgctctatgttttatgacttggagtacacagactcaatgcctatttcccaagtgatctgagatttttaaatcttaataaatatgagatgataagataatggactgaataaactcacatctctctgctgggaatgagaatttaagatccacatgcataattttgtttataatagagtttcactttgcaaatgagtcactttaatcatttacttgcagaggaagaaaagtatgcctttgtcaactggataaacaaagccctggaaaatgatcctgattgtcggcatgtcatcccaatgaacccaaacacgaatgatctctttaatgctgttggagatggcattgtcctttggtaaataatacttctttcttggtttccaaagaattgcccattttctagaccatcaacaattaatcgttatttatcgtaggccaactttgtttggtgctcagctgcacctagaaggcttttctggactttcacttggccaggtccaggacagcaaactaaattcaaaaacaatttataatgagaaatgtaaaattgctattgcttgagtggagaggagggataaacattatagagataaacatggaagatatagttataccaagtcaaaagcattagatgtctaatcaatgtattagataattaagtgggggaaacttataaaatactgattaaataatgactatagaaggacattaaaaagtttatctgatgacaagtttaaagtataaagttggatcaggcatcaagcggaaatgtagacattatgtaagctcagaagtacatagatagtctcttctataatgaggacaattttcctggttatatatttttggaatatatgctgcttggcttcatctgagcgtggctcaccatgaaagcagatagaattgataatagcagcaggatgatggaagaagtccttaaactgtagtccttaagcaaagaaacctttgagtgatgcacagaaatccacaactcaaacattgaggacacctggaaaagggggactgcatcctacccacgggaggcctctaaatatggtgctgctcaatgcaacgtggtgtctttgaaaatacctctgtagctcttgcttcagcaggttctctgtcatcacaggccaagttgtaagtgaagtgacttgaggtgctcaatatgtgagggactcaggacttaaaggataacaatgggtgggaaagacattgagctttctcctctgctctgaccagagcaattctacttttgatattttatttattagtttgtcctgagaattcatttttaaaaggttcaattgctataaaaaaatcaaaattctagcttttaggttgccacccaaggcaccccatggtcttcccccaatctgctagttttaccttctaagacccctgtgactcattggtactcagcctagggcactgagaaggatataaaaatgttatcatatgattagctgaagatacaaagtttggtcctgtgtcaaatagaaatgtagacaataataagctcagaattttgtagacagtcttttatataatggggacaattttcatggctaagaaaataaagtacttatggtagaattactttggttatccacccagaatttcctaatgtgctaagaaaatcaggataattttgcagctgtttaggtgrgagaatgaagtggggtcctcatttccaacctcaatatatgaatgtggcttcagtagtattcacctttcccgcagatagtttgagtctagtcaaacggcataactgattttatatctaaacatcacagattctgttgctatcttcttkgattatggtattgctagaatttaaattcaaygttactgggctctgttattcagaagactgctttctttaatttaattgtttctctttcagtaaaatgatcaacctgtcagtgccagacacaattgatgaaagaacaatcaacaaaaagaagctaacccctttcaccattcaggtatgtcttcccaccrttaccataatacaggatttgtttggcatcaatgagcatcataactgctgagtccgcctttttcaggggctcagacatcattcgcaaaacccaggctttgggctggtgacttgtcatacttcagggataaagggatacatttctgagcagcaargaagggagactggtggagtggtagcagctggggctttgtatgtttgttttggccacttaggaataaaattcactttggctaaagttttaactcaagctttccttagcaatttatctttgatttgatgccaaataaacagcattttagatgaaaacataagcctttctaagaagcgagggggtgaaaarcgggaagtactctggcagccttcatagtaattttggccacagccacgagtataataaatataacttgcttttattccatcaatttgttgattaactggaatagtaaccagcagtaagtgtatttctgtgttgtgttccaatattttaacattatcataattcttttgctaagaaaccatatctaacttcttaaatcatgaacgatacattatctcctgtgtggatttaagcaaccttgtgtactttaaaaatggaaatggtaaccaaattgagaacaatgattaaacacatatgaatgcacttaatgttaaatttactcataatcttgaccatatatagaaacagtatttttcactcatcatttaagcactagaacaaggacccacttttcttctgatagttcttttcctaattcactggcggcctttgctttgtttttaatttgccaattaaaacaatttctatacatctctgacattgatatctcttcctttttaaactcaagaatagtacatacagagtctggactgaaaactcccttgactctatctcgactatatgtgagttacattacctgcattgttgttactcataagaacatagaatctatgagtatgtgtgtgtatactcaggttccctagttattacagatactcaacaaatcaacctagcaaaaaccattccatcttttccaggaattttaatcgtatctatttttcattttcgttttctttttttttttttttgagatggagtttcactcttgtcgcccaggctggagtgtgatggcatgatctcagctcaccgcaacctctgcctcctgggttcaagagattctcctgcctcagcctcccgagtggctgggattacaggcacctgccaccatgcccagctaatttttgtatttttagtagagatggggtttcaccatgttggtcaggctggtctcaaactcctgaccttaggtgatccacccgccttgacctctcaaagtgccgggattatgggcatgagccaccgtgccagccttttcattttcttaacacccaatcttcaagtcaaaaagctcttctgctactctcttttatgatcttgatttacatcaacaattgtcttattcatgatggccagtgacaggacaatgactttctcaaaggtgtccctttatttttggccagtagagatgttttgtgtgtcagcttcatcacagagcaagatggaaaaatataggcctcatcagtctcatgccaaccagaatgggccttcaacttatggtgctggtttgattgaatggaccactgcatgagtggtcggtgtctgggttactggattttctcttctggttatgagtcactgtttttttctcaatgttaaaatgagtgaagaccatgactctaaacctgtgaccttcgcagaaggaaaacattgttactgttgccatcggtattatttggcatctacaaagtcatagaacaaaaacttgcatacattttctccctcaggaaaatctgaacttggctctgaactctgcctcagccatcgggtgccatgtggtcaacataggggctgaggacctgaaggaggggaagccttatctggtcctgggacttctgtggcaagtcatcaagattgggttgtttgctgacattgaactcagcagaaatgaaggtaagagcaagtcccaaaggtcatttatgacacagctttctaataacttacrcgttggggactgtaggaggaagatgtcagaaattctcaagttttgaaaactacacagttatattgattccatggtattcatgtcacagattctatacacacagaccagacgttttttaatgatagagcaaaagctttttaagaccatagactaacaataatgtttgtttggagcatagggctcagtcttgaatgtttggcactctaacctcaagaggttttttcagagctcactttgcctttagatatttgtaacaaataagaggacttttaacttgcactttgcgaagtaagcaactcacattcatatactatagtgaaggtaccagattaggaggaacttggtctatttcttatcaaaactatagaggaaggtataggtcaaagggttcaaggttgcaattatatgggatgaataagtggagatctaaacagcacgagggctatagttaataatattgtgctgtatactggtaatttgccaagaaagtagatttcaggcactcttcctacaaaaaagaaagaaagaaagagatagagagagaaatgaagaaagaaagaaagaaaaagaaaggtaacgatatgagatgtgagtatgttaatttgcttgaccaacagtaaccaccttactgtgtatgtgtctaccaagataagtataccaaaacatcacgttacacaccttaaatctatgcaggctagaataaacatttttaaagaccgtagaaaattccatttagggtttcagagttctcaactaaatatgtagctgtcaatcttattgcgtcttctctcaccatcttatctgtatgtaaacagtgacagccccctggcttagacagaggtagcccaccttgataagtatcatgcaaaacacgatgttatcttttagttatcaggtacaaatcctaccaatatgaaatctgtagtcaagttctaatctttagttatacatacttttttatttatatgtccaaatcacaataaccaatgaaaaatcctgaaatattatttaaaaaccaatgtattaaacataatataaagaaggcgggggagaggaaatagggatcttagaacctgtgagaaagaatattgatcttcaaataatgacctcagctaaatttaaaccttctagctgagcaaaaaaatacttactcatctgggaaaacgtagaggagagttgattacattgttgagttgctataattaggcaggtaagcacttgaaatataaaacacctatgggaatagacaagagaacattgttattattacaaaattgatctcttaaaagcaaaaatgttgtcatatygtgaaatgtggtttgacagacccagcaaaacatccgagccagtagccttggttatttttatggctctgcccaaatgttcttaaacatagcgttgagattcactgtgctttgttttctccatctggaaaatggagataataaataagctcacaatggcttacgcctctttttagggaataataataaaatatttaatccatgggaaaggctacaagaacctttaccccaaagaggtaacgttgttatctttagctttttagcagagcttaatgaaagttataaccaacccccctcccccaacatcgctgcatttatttttctgtggtttttgtgcttcttcagctctgattgctcttttgagagaaggtgagagcctggaggatttgatgaaactctcccctgaagagctcttgctgaggtgggctaattaccacctggaaaatgcaggctgcaacaaaattggcaacttcagtactgacatcaaggtaggaggagcgttgtttgaacatgactctctgcaggagtgaaggggaatttgggcaataataaagaaaagataaagatttggggcttcctctcttcagaagttccagggtagtctggtgctgttttggaggtgctcactgtccttgagagcccatctgctgctctagtcctgggccatacacagacctgcccagagtcctagtgcagtgtctcgattggagtttccatatcaggaagtagagggacaaaggtgagctagaggaagagcaagagaacagtctgctgtccaagtaaagggaatatatgtaggtctgtaatgtctctggtttcataaatgggagcagcagatgggaattccctgtaaaaaattaaatgaagatgactcttctagttatactaataacagcaaacatggtgtctgcaacatgccaggcactgttctaactgatttatatgtgtattctcttattgaatccttacaacaaccccatgaggtaagggttattatcctctcattttacagataaagagacaaagaggtccataggggaaaggctgaggcaggaatacactgtggttttcaagtatatgaaaagttccctgtcaaggtgaaagaaaacagctattggcaatgatgacagatggatgaagatagaaagtggttaaggagcagaaaggaatggaaagcggtccctagaaggaaagagtaggagatgctgggatgcaacaccaggaaaatacttcagtctccactttctcaaacattaaataacttttccccaaagagaaagagtcagaggaaagttcacatgactcaacaggagtacacctaggcttgtaattctttgagtaacagtttcccactgctatatgacgtgcattcagtggcatttagaactcagcgtgtgtcaggcactgtgccagtcagagtcaagcttctagatggaaagcccccaytttttaggatctaagctaaatccatctttctaactatgcatctttcatgggctattaacattcttctagcaccaccaaccgacctgggttttaacaggagctggctgtcatgctctccctttgtgctcaacagttaagctctgcaattgcaaaacttttcagacaaaattaggctgtcagatctcagctgtaaatttacctaatttcctgtcattaaatggctgtgttctctagaaccaccattttgtgctttgggaagtgtctgtatgagataggagctggccagatgagcacttacttatacagtgttgtgcctgttctctggcagccgctgcatggcaactgactccgtgctgtcatgtgtatgtctgagtagccagccagcaaccttgggagaygtctttaaatcgtgtaaattggcaaaggcgaggagaacacccaggctagagtgagtgagaaggttcatgagagtcaggtgaaatgaggttactcttagccaaactaaaaagatgtaacccrgggcaggcagatggtattggtgcctgacacctgcatgtgactttcactgacttcaaaatagctacagtgaaaagtcagagaagggagggtagatagaagggagatgaagatcattttccccaggtgcaacatcaatgattcacactctctggttctcctctttctaatgccaaaagtggtgagcatacctctcctctgcccaggccttacctaccctaaccagttgtagaaacaaaataatagctgatttttcgatctttatgagaaattgagatgctattaaatgatttaaataaactwcctgaaaatctgtatgctttcattgactaagaataaatttatattttaagactataattctgagaattctttttgtcaataagcatattttcagaatctaagaaaacttgagaattcaatacctgtatctaatctgctataactaaattgaaccatttttctagcttctagataaatatgaaatgcacttttcttaatatttctccttttacgtaaagattgcttgttaatgcttcaatcttctgtctttgacatctttttctcttgctgattgtccatttaaatgtattttaaactcgctttaaacttgtgcttcctttttctgtcacttttttttaattaaaccttagctgactgacttctacagcaatataaaggtatatatatattttcctgtatacaatttaattcatgtaaataagttgtttttctcccctaaagacaacagaataatatccacttctttagggtgccttttgtgtatatcttgtctattttattgttacgctccttttaaaaagaaaagcaaatgtgatatgtaaagagacaaatagaacattcaaattagtgaatgtttctagctttgttaagttacattctggaatgatagctgaatatgaaataaaatgtttgcttttgggaaatcattgttatgctaagtatgtaattagctgtgctattttgaaattggaatttcttaatttctcacaggactcaaaagcttattaccacctgcttgagcaggtggctccaaaaggagatgaagaaggtgttcctgctgttgttattgacatgtcaggactgcgggtaaggccaggtcccagttgtgtttggagaatatgatgctattktcatgttggcagttccattaccttgtgtggccctgattctggagttccatgactgggcatttctgcctaaagccctgttaaaacggtaaaactgtgagcagtttgggataataattgatgaaaactgaatctggaaatacaacattaaagaaagaaaccaatagtaattaaacaccatccagcatgctaggcaattctatatatgttcatcatttagtagactctataaccccacatgggtctgaatgttataataaaacttctgttttgccgccactttaatactgatcttgagaagtctctttgcccgtttctgtgcctcatttaatatcactggagttaaatccaatgagttcatgttgaagtcaactgattcctaatgagaagtagagtaaaagtaaatgacaagtaaagctcatgaaatgcataatgtgtagcgttatctagtaaagggtcatattaagaaatcatcctaatttaaagttttgttttctgaaaattggtggtttcatgtactttaaggacagtgggccatatttcagcaaaattttagggttaagagtcacttacaaatggctagagattctctagaattatttgagcacattgagtggttcaaaatctgaagtctgcaaaaataaaattgatattatatatttatcaataataatacataggttaactgataaaatttattttatttgggttgcaagtataccaactcaatgtggagacagtggttatgctaatcatatgttcttactggcaagtgtaaatatcttttgtgaactggttatgggaatataaattaataaataaaatttttgatagacaatctcatgtcatctgtgcacacaaataataaaaaggaatcttaatggttggaaataattaagataaactcaaatgatcagttttcagaatctactgcatctcttttgaaacagagcaaccaaccactcatctgaaatagtttgataaaggagatgagagatccttgttacttaacctctgagattccttttacttgtgactttctgattttggtgcaggtgcatataggcaataatgtgctgttattaagtgtctgcctgagataaacactaatgatttcagtgagattcccatttcttttcacattatgcaatctgctttgtgcatggagagccttgacccagccctgagacatccttttgcattgcaggagaaggatgacatccagagggcagaatgcatgctgcagcaggcggagaggctgggctgccggcagtttgtcacagccacagatgttgtccgagggaaccccaagttgaacttggcttttattgccaacctctttaacagataccctgccctgcacaaaccagagaaccaggacattgactggggggctcttgaaggtaactgtaaacgatttgcctaagatggggaaaggcactcacaattctaattcaatggcaattcaaactcacttcctaagcaaatataaactatttacatgtgcaaacaggccattaattctctggtatgcaacaaagagaataaatagattcatcaagtcaatttcagccaagcaggaataatcaaataccattctatcacgtccattaacaaagcgttcatccattatcagaattaaatgttttaggaaagataatgcatttagttattagatgaaataaatcctgagtttcaaaaagataatttacgtacttaatggactgtgttgattcctagagacaagaaattgccaccatccatttccaaaaaatgatatttaaggtatgctgggatatgcttactgagtttttggttttcttttgtttcttacgggagccacagaaaagtattttgaggcagaatccctaacagttgtatttttcaggttaatgctctaagattcaacaaaaagcatatagctttaattacgttctaccaggtagaggtgctggagatgtttacttgwcttttttaaaaaaatcatgaactagtcccaatattgagacaaaggtcaactaatattaaatgaatatcacccaagcaaggagattcagatttgaagtatgagttgatccttttccacagtgctttactctcactagaaatgcagcataatcgtgctccaacactcctgcattggtgtcatttgctgaattatggtcagggggttgtgtgtattttgttgactcccaaatctatatatcaagcccacaaatcacccatttcagctgcttctagaatattcctgtttggatccttggctatcatttgaggtgcagcatatgcaaaacagaattgattattttccctcccacccccaaccattgcctttccagcccacctcccatcccgtttgccctcttttttttttttttttttttttttttttttttttttttgagacggagtctcgctctgtcgcccaggctggagtgcagtggcgggatctcggctcactgcaagctccgcctcccgggttcacgccattctcctgcctcagcctcccaagtagctgggactacaggcgcccgccactacgcccggctaattttttgtatttttagtagagacggggtttcaccattttagccgggatggtctcgatctcctgacctcgtgatccgcccgcctcggcctcccaaagtgctgggattacaggcgtgagccaccgcgcccggcctgccctcttttagaaatgctccatttccattaatcataccatttttttttctttagtcaccaaactaaagagcttggatcctactatatcttcctatccttcatccctacatccactaaatcagcaaatactaataattcttcctttggaacattttctcaattgttatgtttcttttatgctattccaagctcattacctcatacactaattattttaatggatcttggagtctccatttatcaaatgcttgaatgtatcccacatgctaatgtcaaacactctgtcctctgccgtgtttaattcaaatgcatatcgcctttcagtgattctgcacactgctgccagtcacatcccggtactgattttattatatctctgccttgctcaagaatttattgtagtaattttacaaagccataatgactgccgttgtctgtcaactaaaatctgctacctggtatccaaagatccccaattctgaatccttcttccagataggcttatctcattgggctgtacaacacacacccctgaccaaaccagttcctgatgttcttaatagagaccttgcctgttgctccctttgtatgcatatttatactaccttctactcccaccccttgctatctccccaaatcctctactctttcctttttctgatccagattttgctagctatccaaggacaagttcaaattccaccccttccaagttcagtccatactgttcttttccctgtctcaattcaaataacaaatatatctacctcataagtgagttctgtagcttgtatgatctctgtttgatgcctaaaagtcctgttttttccagcaagaaggtaagcctttgagagccaactgaacagctaccccacacaggattccacacactattaatagatactatagaaatacatgcggaattgaaatggaaaagaaaaattaacacagtataagaaccctcgtccaaatccaatacagtttattttatttctttctttcattctactttcagtttttattgcatcctctttagttraactttggtcataaaaaagctatgttttcttcggtcccaaaagataacccatcttcattcatctaggtgagacgagagaagagcggacatttaggaactggatgaactccctgggtgttaaccctcgagtcaatcatttgtacaggtaggaatatttgggaactcattctaatgtaagatagagacctcaaaagagccataggattccaaataccactatgatgtgcattctcttcacaaaatgtgcataccttgctggaaggggaaaaagtgccaagttgagcttcagatgttggatattcagttgaaaaactcacctgcatacatcagtctcactgtgtgctcaatatataaatcatacctcaacaaaatgaaacatttactatatgtcataagtgatcttacatataacccgctcacaagcaggcaaaacaacagatgttaagtttgtggtgaagtgtctcctatgccacttgttaaagcaattttcttcttytttttttcaatatttctttttttttgagatggagtctcgctctgtcgcccaggctggagtgcggtggcgcaatctcggctcactgcaagctctgcctcccgggttcacgccattctcctgcctcagcctcccaagtagtttggacttcaggcacctgccaccatgcctggctaattttttgtatttttagtagagacggggttccaccttgttggccaggatggtctyratctcttgacctcatgatccacccgccttggtctcccaaagtgctgggattacaggcgtgagccactgcgcccgttctaaatatttcttttacatttatttagttttacaaattgtaaacctttaggtacaggggacatgtgcaggtttgttatataggttaattgcatgttgcaggggtttggtgtacagattatttcgtcaccatagtgctctttcttttcctgaggcagcatatgttggatggaagggcatagctagtcacacctgggaagagtgagtcccccaatctctctgagtcatggtttcttcacctctatagatggagctacgactaccaagtgtgcagggttgttgtgaatattctttgaactaatatgtaagaaagtgtctggcccattgtaggccctgaataaatgttggatatctgagaatccttttgtgtttgttttgttcagtgacttatcagatgccctggtcatcttccagctctatgaaaagatcaaagttcctgttgactggaacagagtaaacaaaccgccataccccaaactgggaggcaatatgaagaaggtaaacaatgatggttctgttgttccaggagacaggcaaagtcatagcctgcaagagcactctaaatactttataaggcagccaaacgtagacaagtaatgtttttccagaaattaaattctagtacagcaatcagaaacctgaacagctttattaaagtgtgtccattatttcagtcrattgcttatttataattccatgttggatgtcttcaaacattatcatgcaaaaattctaattaagataattagagcaagcagagagccacagggatttttccctcagcaggatctttattctaatttctaaagaattggagcttgtactgacagcttgacttgttcaaacagtttgtcgactgtcaacacagtgggaacattgttttgaaacaacagggttgacacagccatttctcagcatttcttattgccgtgactgttaatgatccatgcgtagctacaggaatatctgttcacatgtccatttgctatgtgtgcagaggatggagactccaaattttccatgtcaatctccatgaattcaccttttttagaaatattacatgtaggtaattaaggatggctctccatttctgcagtgtgatatagctgtgaacatattcatagtaatgaattcatttcagttttccacattatgaatattttttatgaaagtgaggggttctaaggacagatggaaaattctttaattttgaatcctagaattgcagaaccagttgagrcttgagaggtcattcggtcttaccatatttatttcattttttatctttatttttattatttatctggtatttatcataatcaagatgatgacgttaaatcgttttcctttctgctcattcagcttgagaattgtaactacgcggtagaattggggaagaatcaagcgaagttctccctggttggcatcggtggacaagatctcaatgaaggaaaccgcactctcacactggccttgatttggcagctaatgagaaggtagtatagcttatggaagtggctttttcttgaatacattatttacttagacaaatattagcaaatttttagcagtatgagttaattcagtaaaagtatgttttaagctaagcttcataaccagagaaacactttttacctttctgctttttttttttcagttctatcagtttttgtttcaagtatcgtgaaactctgttattaggttcataaacagtttagattgttgtttcattctaatttactcatccctttgtccttatraagtagtcttttttatgcctactaatattcttttctctgaaatctattttttctgacattaatagataatagctactattgcttctrtaggcttcctattgattagtggttagcatggcctatctttttaccatccttttacttcaattgatctgtgtaaataacaattacttttaaagggactttttaaataaaggggaaattatgctatatttatctacacatttactatttctagtgctcttcctactattttatagatcaagatttccatttggtatcattttctgtctacctaaaatatttctaatagcacaagtttgctggtgatgagtgatttcagcttctatatgtctgaaaatgtctatttcattttcaaaatatttttttctctgagtgcagaattctaagttgatagttttttctttccgtactttaaagatagtttcactgtcttctggcccacattgtttccaaggggaaatctattgtcattcttattgttgttccctcatatgtagtatttcttttctggcttattttaagatttctctttattacaggttttaggtaattttattatgatgtacattgttgtttctttttttttttttttttttttgagacagagtcttgctctgtcgcccagactggagtgcagtagtgtgatcttggctcactgcaatctccacctcctgggtccaagtgattctcctgcctcagcctcctgagtagctgggactacaggtccacgccaccatgcccagctaatttttgtatttttagtagagacggggtttcaccgtgttggacaggctggtctcaaactcctgacctaatgatccgagtgcctcagcctcccaaactgctgggattacaggcatgagccaccaygcccagctccattgttgtttcttatgcttgaggtttgttgaacttatagratctatgggtttatactttccatcaaatttggaaaacttaactttcatctcttcaaacatatcttccatacccaccagccctggttctgggggattccaagtccatgtatatttgatcgttcaaagttgtccctaagctcaccgatgctttagtgatttattttctctatgtttcattttgtataacttgtattgctgtgttttcaagttcactaatctcttttattttgcatgtctaatattccattaactccatccagtgtacatgttttttaacctggacattatagtttccatgtatagaaattttgagtcatttttatatttcccatakctgtcctttcctttaccttcttgaacatacagaaaataattacagtaacttattttgggatctgtttctactaatttatttttatcttcattatgagtcatattttttggcttctttgcatgctgctaattttttaattatatgtcaaatatcatgaatttgaccttgctgtgtactggatatttctgtattcctttaaatattcttaaatttaatcctgggatagacttaagtaacttaaatacagtttgatccatttgaggcttacttttaagcttaattaatctagagctcattttgcttgttagtaatgagaaaatggtcttctgagtactttgcttgatgctcatgtattatgaaatttttccactccagctggtgggaacaaatttttccagccttgtgtgagccccaaggattgctctcgtggctcatttctggtgggtttttccccacagcctctagtagtttcctcacacatgtgcactgagtggtcctcagctgaagactgagggaaaccctctgaaggccgctgaagctttctttctgaatgactctcttctctctatacagttctcaccactctgatagtctttcccctaaattctaggcacctgggcttccttcatttctcatccctgtttcctccactcaagaggatggccagctgtttgggttttctcctcctatgctgcagcttggaaactttttccatgctggaaaaatcttaaggctaactttgttttcttcttttcaggggccactgtcctgtgcttcctattgtctgatgtmtgaacaacattgtttcatatgtttttcactgtattataagtgtttaaatgtggkccctgttattccatcatggccagaaacagaagttcctttcatasaaaactttagatatgttttggaactgaatataaacttgactaatgtgagaagtatagggtgatattagttaaacaaaaataggttataaaaagatacacaaatagaaaataaattataagaaaaagaaacaattttggtacaaaatcataagcttgggaagacttttagrtaggaattctgtaagtaataaaataatttacttgtaaatgcttcagtctttccccctatactaatagctctgacaaggcaagaatcttacatcccctcattagatcctatgttagtgtgactyaattcattttcctacctggaaggaagccccagaaactgcatgtcacattacattctgtctggmaagataatggcaaagacaaggttcgtggtgtgcctaggcactgcagctttagttccaagccactgtctgcagatcctaataatggccggctctggatgtaatcgtgtcagtatttccagataaggtaggataatcagaagtgatcataaaagatttcactccctgattcacatttgctttactaagtatagagctccattacccatttccacactggggtctctttaatgatgggggcagatgtcataaggctcccctggtgcagaaaactccagaactaaagaaactccaactctgtcttttagtttactgcatgtatccagaacatcattgaaaactcctcagggctgttctcaccagtgtatttccagatgatatttccaagctatctttattatcttccacaagttttaaatttttaacagattagcaattcatactgattgctttaaaaaccaaagcaaaagtccttttagttgcaacagttaaactgactcatgggtttcaatattaaataatctttaatatatgctattttaatgattaaaaagctcaagccagcgggtgcggtggctcatactgtaatcccagtactttgggaggccgaggcgggtggatcacctgaggtcgggagtttgagaccagcctggccagcatggtgaaaccccatctctactaaaaatacaaaaattagccaggtatgctggtgcgtgcctgtagtcccaggtactcaggaggctgaggcagaagaatctcttgaacctgggaggcagaggttgcagtgagccaagatcatgccactgcactccagcctgggtgacggagcgagactctgtctcagaaaaaaacaaacaaacaaactcaggtcaaccccattctatgttaaatttcataatatctgaaaaacgtcttgcaatatgatctttggatgttttataaaaatgtggctcaaagccctatttaatggctggcacatacacaacaaggtccactctgctgttgctgtctccacctggttaaaaagtcatatttctcatgagtgtttactacayaagaatcgtgcatttaagaaagtagacagaaaaatatattactgtagaaggagaagtaatgactgataattatataaatggcaccggaagggatttttttccctgcatgctayatattaaaagatctattaaatttacrgctggttctagctggaatttatttcattgaattgtgctgatgtgctaatttggtcatttatctggacaataaatggcttgtcattttttcctatgagagcaaatgagagatatgtacttaaacttccctatccccttcagtagcttggaaatcattctcagggtggacagttggcaaacagcatatgcataaacttgcagataaaacccttgaagcaagcargctgccagcacatggcaatgatggctctgaagcaaatgaacaaagaatccgaagcagacaawtaggaaactctccccaggtcaaacaggctgtggatggtgaagtcaggatgggtccttgaaaaacaaaatgcctggtttgttcctctatgccaaataataaataagtaaaacaagtgttggaaggcaggaaagtaagcaggtactaatcacatccctctagtgcctcacatccaaacctcatcaactctcttrttgaaggaggaactggctaaagctggagctcataattctgtttcattttgacaaagagcttttcagcacagcacattttacaaacactggtaatactgagatcttgtctggagggctccatttaatagcacaatcgtcccaaagcaggtttgataatatgcagtaattatctcaaaaggaaaaatctagaaagacacaggccaaattagtttttgttttacatttcaaatctgtatttagatgagcaattgcttagtgtactatctagaatggaggctctagcctaatttttttttgagacagagttttgctcttgttgcccaggctggagtgcaatgrtgcgatctcagctcaccacaacctccacccgccaggttcaagcaattctcctgcctcagcctcccaccaaatagctgggattacaggcttgtgccaccacacccggctaattttctacttttagtagagacagggtttctccatgttggtaaggctggtctcaaactcctgacctcaggtgatccrcccgcctcggcctcccaaagtgctcgaattacaggcatgagccaccgtgcccggcccagcctaattctattctttcttctctttgtgtttttttttttttttatcgttttacttacaagtgggtgtctgattccatttcaaacctctgcatctcagttgaggtgacagaaagactgccttgtgttcactggaactctgtgccactatgagaggctgttctcaaaccccagcatggaataagctgcctccacaatttgctatacctctataaggttccctgttccttagtagcttctcactcttgcagacaaactttagtataaaggtgggcttcccctctgcaccatttagttcccaggcttaggaggtgggtcaagaacactgctgccgtttacatgagcatgtggacaacgccgggctgcaactcctgatgaagggaagtgagaactaggtctcaggacaagagaagctaccagaagactgattaaacttagtttgttccgtcaggttatatatagagaggacctaatgaagcaagcactaacctaccttttttttaattcagatgttcattaggcagaaattcttagatgttacagtaaatgctaataacttaatatgcatgctatctggaaataagaagccagttatgccataaaatgtaacctttatgaagagatcaaaagtaggatcttttccaaactagaaatattttgaaaatctatctgcacttaccccatttatactcatgatttctcagcattttggtcccatctcttggaccagactaaacatctttcttatccccttgctttccctgggagacagtcactctatttatttcacccgcctctctgtgccttcatttactagatgtccagtagtgctaggcagtctgctaacctctgatgaacagggcacatggaccctgtccgagggcacacggtggataccaatgccatcacaagttctgggaacaggtttgaagcaagtataccaatactgatgaatacactgtgcaagctggaaaagtgatacttgagctgaggattgttcaaatgattaggaattcactagaagggaagggggcccaggtagtgagtacagatgagtcccagaagcaggaggcagaaggaggatggaggtgtgcctggggagctgctgatggttctgtgtggttgaaatgtgtataggtctttgtgtgtgtgtgtgtgtgtgtgtgtgtgtgtgtgtgagcacacgatgggcaaggaagcagagagggaagaaggaaatcacagatgtgctggaaaagaatactagagccaaattgtaaagggccttgtgtgctgtgtgctggagcttaacctgtattctttgggccatgtcgaatcacattaaatgtgaccaagcagggagctgtggcatgtgtctgtggtccatcccgtactagggaggcttgcttgagcccaggagttcgggggcgcagtgagccatgaccatacctgtgaatatccactgcactccagcctgggccatgggccatgtagtgagaccccatctcttaaaaaaaaaaaaaaaaaaaagacagaccagaactgtacttcagaaaggaaattctgtgaggtggagaaacagaatgaagaggagctaattgatttgagggagacttacgaggtgtaattgataggacatcactgtcagtttaaatgtgaattttgataaagaaaagttgcacaagccattttccttcctctcttcaataatgggaaggtgttttcacctagaagaagcagggcattgctcttatttcagggactaaacttgaaaaccatctggaaagtcacgggagaactgtactgtccataggagcaggaactagaggaagatacccgatggattatgtaagcaaaatcctagagcacacaagtggagggtgacctgaatttaggtagaaccggtcagatgagattcagtcacaggattcttgagtttcagtttgagaagcacacactgtaattctagccctgaaggtctttcatgtgtaatttgatcccctcctgccaacctgaaccgtgaagtccacaaacccatgtgttcctggactgctgggctttctcccatgcatttccctttcagaagtgagtagctttagggaatggtggttcttctctgctccagagacagtgtgggttttttttttttyttttttttttttttttgagacagagtctcactctgttgcccaggctggagtgcagtggcactatctcagctcactgcaacctctgcctcccaggctcaagcaatcctcctacctcagcctccctagtagctgggactacagacaagcgctgccatgtccagctaattttttgtgtgtgtttttggtagagaccgggtttcgttatgtttcccaggcaggtctggaactcctgagctcaagtgaactgctcaccttggcctcctaaagtgccgggattactggcgcctggcctagtctatagaattttaagaggttaaagcctcttcttaataaatgtcccccaacccctccaaaacaacaaacaaaccaattctcataacagtaggtatctaaggtaattcttaccttcagactaaagattatctttgtcagcatatttctaacatttttacttatataaggcaaaaagtattttatactttttctttatcatgtaggctactcagacttttccaacattgagttatttcttgattttttatcttttttaaattgccacaggttggaatcttttccttcattttcctttccttgcattttttccctttggctttttctttttgctcagagcaatgatcatgcttagaaaggaggtatctgctttacatttcattatactagccataaagtcacgtcttaagttattctaaaaggaactaatgttgtaatatgttctttttttctctcaaatgtaatggtgtccagactgtcttctatgacatacccgaaaaaaaaattccatccttagctactttttgtttatattaaattctttagcaactgttctccagaaagcattctttattttgttcaggtatacactgaatatcctcgaagaaattggtggtggccagaaggtcaatgatgacattattgtcaactgggtgaatgaaacattgagggaagcaragaaaagttcatccatctctagtttcaaggtaaaattctttgtcttctgctagaggccatctgagctctatgcctatctgtattgttttcattatgtgttcaagtgaccttcagtggtaggtattagaggctccccctcccatttcaattttgcttaaatgactcgttattgttttgatgttcatcagccatttcattaatgaatttctcaatactttctcccataagttaatcataaaaacccatcagtaaaaaaaatttcaacttttattttggatttagggggtacatgtgcagatttgttacatgggtatattgagtgatgctgaggtttggggtacaaataaatccaccagcgaggtatggagcatcgtacccaacaggcagttttctagcccttgtcctcctccctccctccccattcacctagtttctactgtctatttttaattttwatttttatatttttaattttaatttattttttaatattttttattatttatgtttacttttcatatctgttttttgtgacaaggtctcactctgtcacccaggctggggtacagtggcatgattgtggctcactgcagcctcaacctcctgggctcaagtgatcctcctgcctcagcctcctgaggagctgggactacaggtgcacactaccatgcccagcaatttttgtttgtttgtttggaaatgaggtctcactatgtggcccaggctggtcttaaattcctggcctccagagatcctcctgcttcagcctcccaaagtgctttgggattataggcgtgagccaccatgcctggcttattcccatctttatgtccatgtgtactcagtgcttagttcccacttaaaatccatgattttaaaagcaagattttaggcattgttctttcaaagtaatataaactatgatagtattcgtaaaatgtgggcacctccatgattcagattaatattataatggtgacatgtaaaatgctcaaagatctcccttgtgatgttttttgtaaaaaagcagttgtgtacttctatctaaatctcatttttattaatagcagcattttattaaatttcttgactcatgtttcatgcattaactggattcctcctcaaaggacgtgtgcacttgatccacatcatcrtaatgcctgtgccatcttaactacatttttctagcttgaaggtcaggattagggggaggaacaccttccgagytgtattaacagggttggtgaggtggttcgtcatgatatccatcctgtgtttcaaaatcaagaaaaaatgaaaatctctttccacaagcagtagcagaagatattgtcagggcagggctgtcrcaggagtgtccacctsctgtgagctcatcacagataaccgtcacctctgctccatctccagcctactgttcagtctggagagctgagcagagttaggagtggatgctggtcactgatgcaagcagattcttccagaaagagatttggaaaggcrgcaagcagattcttccagaaagagatttggaaaggcagtaaagaaaagcaaagttgaaaggagctctagatattgaatgggctctggctaccaggggctccttgttcatgtcttagggcatcttcgctgacattgtgaagctggctttactgttttcctcattttataggtgaggacatcaaagctcaaktaacttcctaagagtatggctagtaattgtatgtgatggtccacaaatgggaggaaaatgccttttacctgtggggtgaggctgtagagtgtagtgtatctataggtcacttagctgttaatatgaagtggccagttacatagcccaggggtgcttctctccgtaaaatagctgctgctccagcccattacattaggctgtggcttctggggtgttcttatggggacaaggtttgacaagcgatgctggggttcactattagaaaggtttggcaattcttttgctccttgtaacactcggggctcattttctcctgtcttcttagtaagttgttgcagaattgattaagtaaaagaggccvcataatgtactgaaagaaatgtcatactagccccacattccttttatgtgaagcccttttaaaaatgaacacaacccactctttaaaaaaaaaaaaaagattcagagagtacatttgcaggtttgttacaagggtatattgtgtgatgctgaggtttgggtttccattgaaccagtcacccaaatagtgagcatagtgctgaacaggtggtttttcacctttaacccacttccaccctccccctgcttgtatttatcaatgtctattgttcctacctttatgtccatacatactcaatgtttagcttcctcttataagtgaatagatgcagtatttggttttctgttactgtattaattcagttaggataatggcctccagctgcatccatgttgctgcaaataacatgattttattctcttttgtggctgcatagtattccatggtgtatatgtaccacattttctctatctagttcattgttgatgggcacctaggttgattccwtatctttgctattatgaatagtgctgcgatgaacacaagcatgcaggtgtctttttggaagaataatttattttcctttgagtatgtacccaatattgggattgctggttcaaatggtaattttatttttagttctttgagaaaactccaaactgctttccacaggggctgaactaatttacattcccaccaacagtgtgtaatcattcccttttctccacaacctcactggcatctgttattttttgactttttagtaatagcccttctgaatggtgtgcagtggtatctcattgtggttttggtcctcatttctgtgatgattagtgatgccgagcatttttgcattttttcatatgcttgacacaatccactattttaactttacgtctttctctagttgtgctaacttccttccatttattatttgagaatgactacctgctgttggtagacggtgggttttctgggaagttactgatgctcctacagaaactacagtttatttgaaacactatgtggaatactgctgcatttcccagaccaggctgtatatattatatatttaggaagaaaaagccacccacttcctttgagctgaatgggagtaactttgggacacgttgatgaaaccctccctktgtctctgcataggaccckaagattagtacaagtctgcctgttctggacctcatcgatgccatccaaccaggttccattaactatgaccttctgaagacagaaaatctgaatgatgatgagaaactcaacaatgcaaagtacgtaaataaaaataaacctcagattgggagggaaggacccaactggcagctggatggttgtaaagtctaatgctcatgcctttatacaaacatttcattttcactatccgtgcttttccttctcatgactttctgcagtctcatcatcactgttttggatatgggacaatagtagtttaaaacttctagtgccagaatgggagcaagacaaaaaaaaaaaaacaacccaataatgagagtattcttgtaattgataagcaagcctatagtttcataaaaccaatttcctaaccaaatgctccattcatgaatattcatggataagaatgcacaggggtagggttccacagcagagcctttgccagtgtgaaagccactgtcttgtgttttaccattcaggtcacctgccaaatgattcctctagagtgagtatcagcatattacagtttctgagccagatctgccctgttgtctgcttttctaaacaaagttttattgaaacagagcctattcatttgcatcttgtctatagctgcttccctgctataacagcagagttgcatagttgcaacaaagcctaagatgtttaccatccagtcttttgcaaaaaaagttaatgaacatctgctccagacaggtgcttttctcagatcagattccgttagtttccttgggctgccacaacgaagtactgcacaaactgggcagcagaagtttcttctctcacagttayaggagctagaggtttgcaatcaagatgttggcaggattggtttcttctgagggagaatctgccccatgccaatctctgcctccatcttcacatggcattcttcttgcgtgtctgtgacttcacacggctgtcttcccgctttgtgtttctctgcgacacttcttttcttagaaagacaccagtcctactggattaaggtcccacccaactccagcatgacctcgtcttaactacttacatctgcagcaaccctctttccaactagggtcatactctgaggtgctgggggttaagacttcagcatatgaatttcgaagagacacaattcagctcataccacaggtctagaagatacaagtatctagtgcccggcatccctgctttataatcccaacagagcccttctctctgttcccagtttgggaaagtgggaacctgtgctctcgggatgccaaagtttaacacaatttaatggagagaaataaataattaaactaaaattacaatagattgtgatgagaggtgtggaagggacagtatgaggcatccctgaagggataggaaggggactagagctctttagagcaaatagcagctcagctgagctcaactgaaaagacaagtaagaaggaagtagacaggtgaaggagagaggaagaatgttccaggcagaaggaaaaacacatatgaagacccagaaattgtaaaaagccttcagcccagatgttcaaggggagtgtgattaggtttaagaaacttgccaaggccatacagtttttcagttgtgcagctgagattcaaagtccaacttcagagcccagacccctaagcactctcctgtgagggcgagatacaaaattacttagaaaaaggggtgaaagaaattacacaaaatgcgaagaatggttatgtcatggtggcaagattgtgtgtgattttgtttgaagctcccttttaattttcagaccgttttccctctgtgttttataatggggaaaaattaattttactttgttaataattaatatggaagaagttattgagagagagacaaggagaaaaaatgggactactcatgcctgatgctcttaatttaatttgatcaataaagtaaaagtaaagtaattttaggagagcaggaggtagtaaatgtgggcttgggtagagtgaagagtgtctggtgtaaccatagtaagaggtcactagataataaacgaggtgaataaaagaactgccaggtagtagtgtgggctcatttgaaaataaattacaattaatgaaatttatcttcatatatctacaaatagagcaaaaatgttctgatgcagctattatcattctatgtgaaaatatggaatataaatctctggctactctatattatagtaccataaataagtacaaatatatgtgggcaagaattggaatggaacaaagaataaaaaaattgatgtgtaaggctaggattttttttttttctgagacggagtctcactttgttgcccaggctggactacagtggcacgatcttggctcactgcagcctccgcctcccgggttcaagcgattctcctgcctcagcctcctgagtagctgggactacaggcgcatgccaccacgcctggctaattttttgtatttttagtagagatggggtttcaccatgttggccaggatggtcttgatctcctgaccttgtgatccacccgcctcggccacccgaagtgttgggattacaggcgtgagccaccgcgcctggccaaggtcaggatattatacatttttcctcttttgttccttgtcaaaatgttgctgtagttgaaatgtagtctgcaaacttttcctagcacacatgtttattcagttctgtgactctttctgctatgctgctatgtagcccaagagaatactcctggtgtgagtatcaaaagtggcagcacgtgctgtagtggctcacacctgtaatcccagtgctttgggaggctgaggcaagagcttctcttgaggccaggagttcaagcccagcctgggcaacatagtgagacccctgtctctacaaaaaaaaaaaaaaacttaacttaaaaaaaaggcaggagctgaagaggtctccaaggacaaataatacacttgataatgatcacgagactagccagcaagtctgatgctttgtcagaatctttggttgagccaaaatttgtccacaaaagtgtgaggatgctggtgactgactccagccactgcaggagtgagttctgtcctgactatggaacgactgtgactgtgaccctccagggtcccattcgtgttgtgtttctcaggctctccttatttttcctcttttctcccttttagatatgccatctctatggcccgaaaaattggagcaagagtgtatgccctgccagaagacctggttgaagtgaaccccaaaatggtcatgaccgtgtttgcctgcctcatggggaaaggaatgaagagggtgtgaggcccaatggggctgggtgggaggcggtgcactcactcctgactgcccggcacagatgctccagggatgattcaagccattccaaagttcaacttggtgacactctataagattccaaaaagcacatattagtgcagccaagtagcctctcctgtatttaacaaaaagtgcttcattctttgcaggaggcccaacctcctatatataggtttctattcttgatttatttgcttcttcgaaaatctagaggaaaagaaagaagttattttccaggtacccttctcgcttttgccattagccaaggatagaagctgcagtggtattaattttgatataatctttcaaaccagcttswtgtggcttcccttttctttgttcaagatgagggccaggaggggaaacatcacacctgccctaaaccctgttcctggaggtcagcatttgatctgttgcaagcccctctttctgtcccctcttcctaccctgcctcccwtgactttgctcctcacacttttggaaycatgccttccgggggggcccatctcttctggccgtccttgtctctgggccacttggagtgtgtgataaatcagtcaagctgttgaagtctcaggagtctctggtagcctgcagaagtaagcctcatcatcagagcctttcctcaaaactggagtcccaaatgtcatcaggttttgttttttttcagccactaagaacccctctgcttttaactctagaatttgggcttggaccagatctaacatcttgaatactctgccctctagagccttcagccttaatggaaggttggatccaaggagggtgtaatggagcatcaagccactcggcggcagcatggagctataactaagcatcctttagggttctgcctctccaggcatttagccctcacattagatctagttactgtggtatggctaatacctgtcaacatttggaggcaatcctaccttgcttttgcttctagagcttagcatatctgattgttgtcaggccatattatcaatgtttacttttttggtactataaaagctttctgccacccctaaactccaggggggamaatatgtgccaatcaatagcacccctactcacatacacacacacctagccagctgtcaagggcagaatgaatctatgctggataagaaatggtggaactgcgttatgaagagctaatttactggacaaagaattccaaagcaaaaccagaacagtatgaatttgagcaggtctcataggttgagcaatttccccctaaaccaactgaaggctaaaaagcaacaggccattgtgaaccaatgcaagacgccctctatcatggtgaaaagctccatcaatgaggtatcttctttagtggtggtatgtaatggaacttagccatttttcaaagcaattgaaatgcattgctctggatctgttccttggcagtggactcagaaagccaacatgtggctcctcccagcccataaccagtatttttgctgcttctgaatacaaattggttggttttgacttcagattgaacttactgtagcctcagatgatttcccccctccgcctccaggaagaaagaatgttactgccttaataaaaaatgaaaagagaatgatgctcaaaatctttccaaataaaatgttccytatattaggtgtctctggatgtttcattttgaaagtttgctgacagtgtgctataaatcgttcattcattcattcctccaacacgttcgagtgcctagtatgtgcaaggcacagtgcaaggttttaggaatgtgcctatgaactaaacaggcactgtgctcagctgatgcctgtcttaggaaagacggaagttaaacaattaaaataacagatgtgacgagtgataaaaagaagggcagggtgagacatgagtttatgacaggaaacagtctgaggagaaatagtttagctaaaaactgaagaataaatttccgttaggcaaagcagggaataaaattaaagctgagagccaaactcagaaatacactgaacttgtaggagtgaagaggtgtgatacctttcctcacctatcataagagtcacggccaatactatgacaaaagatgggtaacaagagaaaagggtaacatatttctttcatcaaagttttacatgacatgggagcttttagaaatgaaaacccaaagatccaaggaaaactgttcatttttatgcttagatttaatgcagaatgaacggccaggcagaaatgtgattgggcaaaaggctgtgatctaaggctaataaatggaaggggaagcccagcaaggcctgtgtgttccgattcttcttggctgcagtctgtagcattttttcctccagggatcagggcaggacccccctggaatgagggtcttattacctactatcaggcaaggtaggccagagaatttctttaccgtcactgtctacacagaaaggcaggggaaggttagagtaatttttctagggttttatggcttgctttgggggaaaggggttctagtttctatgaccctccttgagaaagaggaattctgctttctgcgagttgcttcaggggagaaagaagaggaggagacaggagggcaggagaagatcggagagggagaccttgtttctgaggtttccttggaggctttccagtctcctttagttcaaagtactctgcacaccaaagtgccacactttggggtttcatttttttctgagccccaacaaacccgatcataaaccaaagtcagacttggggattggtgcaaaacaatgtccagactgattcgaggaggaatctttggggtgagcagcgcccgagatctcctctccagcttggcggggccttacttgggaagaagtgggggtgcactgcggggatgcagaggagttctgctgcagccaacttcctcagttaggctgctgtgacagagaagctggccgtcgatttggcatgatcacgctttgacctgcagaggagccacccacccacacagcagatgggaagctgggcttttgtgcctaagctgtgtgtccgggctttaccagcaacttcttcttggaggtagctccttcctggcctaaacactgctgcaccttctatacttaggaggtcactctgttcccaacatatcaagaggctatagatattgtttctttctatttgtactagactgcactgaaattcccctcctaatcagcaaccactgttaacaatttcttttgtatcctagaaatattctgtgcacatatcacacccacacatcctttttataacaaatatcagcataccataaacatcactctttattccatttttttttttacttaataccgtgtctcggatgctgtttcatattggtgcatacagacctacttcaatctttccaacaggtacatggtcttctactatataggcataccaaactccatttaaccagtggtctctaaatagatatttaagttgttttaatcttctgccccgaaaataaggccacaatggataatattatacccacttcttgagcacagaatgttaattttaattcaacaggtacttatcaagttccttctctagcaaaaatatagcacattgggtagtcagacatggatcctcttaagtttcctcaagttattttattaaaaaccctaagctgggacagatgctttagccaatccaaacttctctgttttatgtctaaagaagcgtgttaaccagcacgcatgcacacataaaccataataaaaagcagaatgtgatcaatgcgataacaaatttctaaattaaatatcatgggacctcagggaaaaaattaattctgaatataggatcaacaaaagtttttggaagaattcagttgtgatgaatgagaagtgggcaggaactgggccttactcatgctgttgttccctacagaaccagggacatttctagatttttagtaagagtttcgtaagttttaaaaaattgatttatattagttataaacaaatgtttcctgaatgtaggaaatgctgaacagaaagaagtaattgtgagataagttgtgaaatagacctacctgcggagtatttagaatagaatggattcctgtctggaaattatgacatctgggttggtctgatgcaatgcattggattatatgaccttttaaagtatcagtcaacttagtgattttgttcacctagactcacattcacacacacacacacacacacacacacacacacacacacacagccctagtctgtccctgggagcacagttgtgatctccattgtaaagaccgggtaaactcttagcctgccttagatcagcctatttcagactgaggcttaaggcacgggacatttccatgtgctctcagtccttgggatgagccctgggcccaccttccttacatttactatgcctstcgtcactgacctctgttctttgttccacccagtgtgcagatgggcttgcagtaaacgccagcagtgctatcttcgtgaacttggcattgttttgcccagtacgttcctgccaatttcatgatccagaaagcagagctgatgctcagaacaagttagaggcattgaccgatcctcttatgcaatctagtcactttgacagtttcctaataaaattcctgtaattaaattttaagctgtcaaagagggctcttactcagtatgctttctccctatttctgaaagacagtttaccaactgagcctgtgaatgagtgacaaaaagaaaactgcgtaaatgttttctcatgcctaacatctacatatatttaataacccacatcaggccagggacaaaaacaggtaacctagtcattgcccagcatgtcaccattaacaactcagagacaggtcagtaaaatgacaggaattttttattttatttggcaagttggaattggagagttccacttaaacatatattttcgttaatggaaatctaatatacatcatttagagaattagaatgcacacaaacactgaattctgaaggtatacggaagctaacataaaaactgttgattcagcagtcatttctggacttgtctacaccatgggtccactgttataagtcgcaatgttcaaacctgcttgctctaagtgtagtgctcagaccgggggcatctaygagccggttagaagtgctgaatctcagcccttaccccagacgtactgaatcagaatctgcattttaataagattcctacgcacattaaagtttgagaaatgctgtcctagaagaataaaggtctcgttaaaagatctacagttgatggaaggctaaattaggctcttttaaattaaattacactttctcacttacactggactcgagagagtgaaataacttcccatgaatgtttcccgatcatcagtattcacttgatgtggccagagtggctcttccctctgtttgggtacttcctccaccacccagctttgccctttgctgtgccccttcccttggtttcccccttccaggtggcactcgctctaagaagctgatcttctggtcctgctggcacctgcattgtgtctcttgacatgatctcttgccagctgcccagggctgcctctttaatagatctgacccagtttgtgccaygtcactcaagtcttccctcttatccctccaccgcctgtcaaactggcttttctcccaccatgcctggagcaatctctctatgacttccagtgacagggaactcattaaatagtaaaccattactattccaaggccctgcagtgtctactcttaaccccctaagcaggcactttgcaatgactttctggggttacaatagcctcattgttaagtctgccaaatgcctaataacaaggagaaagaggaaaatgtcttccaagtagagcgactatcatatgcagtggtcctgaggatgaatgaaacttgatatctttgaggaactgaaagacaaggataactgatgggaagcaagaacggccatatcataagaagcagcggtacttgcaaaaagcttaggaatcacctggggagcttattaaaacacattttccagatctcaccttgagactcagtgcctatagggctggtgaacctagcaatctgcatttcccacaaacatccaaggagattctgcagcctgtgacttacagaccatacttcaagaggaactggtgtagaccagctgttctcaatcctgactgcacattggaattatctcaggagttttaatcaatgctgatgtctatactcctccctacaagagtctgacgtaatgatcagatgtgcagccaaggcagctgggtttttaaaagatccccagatgactctaatgtgcagccaggtttgagaaatgttggtctatagcctggagtactgcgccaaagagcaggcacaggtggaacatcttaacagttgggcagaacaataacaggcactgttgattcagaaagtaggaatgaaggcatggacacattgcacaggtaagctttgctttcttcacaatttayccatccaatcaacaggcatttgcctgtctgggtacccagtaaccctcttaagtgccacaggcctcaggcttagtcttgcaagccaaagcaaggtcattagtacctgggattgagttctctgcgttcaggcctcaaatcccctttttaaatggcttctgggatagcctcatctttcctcccccttagaaatacaggaggccagataccccaagacactgtttaaattataagactggttcacttttcatgaataaacatgagagataatgtgtgaaggggaaaaacatttaccaatcatgygtcttcaaaaccttccaagattatgcagctttaatggctgaatgattttgaaagaaaaacttgtaaatggagctgcacctgaactcataataaaaaggcatcagattaattgagtctcagagcttccctaacaataagcctgacctgcatatccaagttgtggccggccaaggccaagagggcmtttgcccttagtctcaggctgctccagtttgacagaaagtcaaggcaggccactcctgacagggtacactaataaggacagagggttagggcacttcaagaaatacttgccatattatttttgctactcattcttctaaattggctggagaacaagttagctgggtcctagggtccacgatccagtcagatagatcggccagaactagatggcctcttgaggtggtgactcatcacctaactctcagaatgcagcagaggaagactagctgttcccaagatcctgatgaactagataagcctcctgcagagaacacaggaggcttcctggcttcctgccaactcccttcctggtttatctttttcatgtgaattttaatatattgagaacctgcttttgccagttagtttaaatgttaccccattcaatcctcacaacagccctctgaggtaggttacagaagaagctgcatttccagaggctgagatttgcctaattacccagctaggcatgggatccgtcggctccaacttctgtgttctttttgctccccagtagaggtgacaggatccacagagaggcatctcaaagagggataaagaatgagaagaaatttgtctttccctcccttccgttcttcctccctcccaccctttcttccttc

SEQ ID NO: 5647 - DNA, 110711 bp, Homo sapiens
tttatcttagaaataaaaaaaatgaataatctctgatttttggcttctctggaccatgaggaattctatcaaactcagtatattgtgcacttatttatggtgtcttctctctgatcttatactgagctgaacaattgaaaacaactgaaactgtaattgggatatgacaccatgaggtgaatataggtcttacaggtgtgtatgtgttaattctttttactccaagattccgtttagtgacaataattgtttttttacttttacaaaacctcagctcttttataacaaatgtgaacatgaatacttaatacaaggagtaagaaagattaaatataagctataatacagtatttttttcatgttgcatatggattaatccttaattgcaactcatataaagctgattcttttctctggactttgatttgctcagtttgagtcctatcttggagtcacagccaacctaggctagtgaatatctactctactcagcaaagcaatgaaaaagtaacagcttaaaagtaacccaccgccacaccagccacttctacctttctgtggctacttgtagttttcattactcacactgttttccagggaaggatttctgggtgtgagagaaggagctgggtgggagaatcccagtagcattctcttttagctttctgcccctgcttttcagcacttttcttctactgtgttttaattttcattctctttttatgagtttaagtacactttgagatatttaaggagatctgtatttatttttctgtgaactttttttttccttcaaggatgctggcctttttctatgaatttctagttcttcatgtgtaaaggagggaattatttttccagttcataactaaatcatccattatgcaattcttgacagggattgaaaacatcaggaaatgatgttttccattagaagagaaagcagtacagatattttcaaacttttaaaatggaacctggttgtcccatcataggcagtattgagtgcagaagacattactcagacctttcttaagaaagggctaatataaaaaatacatttattacatgaattgattcaaggcctgaaaatgatgattaggataaacatgacttttgtcactccactttgaagaaaactctccagatttctcctacaatataaaatggaaaccacagctttaaatggactctctgaggctgggaacagtggctgacacttgtaatcccagcattttgggaggctgaggcaggaggatcacttcagcccaggagttcatgaccagtccgggctacatagcaagacccccatctctatgttaaaaaaaaaaaaactttaaaaaaaattactacagctttatatataagatatatgktggcacctgctgtagtcccaggtacatgagaggctgaggtgggaggatcacatgagcctgggaagtagaggctgcagtgagccatgatcacaccactgcactcaagcctggccagcagagtgagaccatttctctaaaaattgtttaaaaatgaattccctgtttttctattcatattgcttctgtttcttggtccccatatccataaatacagccctctttagcagattctccaagcctagacacctttcatttctccctctccctcaccacccctttgctcatatccaaacaattgccagtccctccacctaaacatttctcaaatccatacaattctaagaactttgagaaacaatctcctcaccttctccaatcaccctcacatatctcacccagaaaggcatctaactatctcctagcctccaggaagggtaagtgctccacctgctccataatccactctcatcattgtgtagcaatgtttctaaaacacctgccaaaacatgttacttccagtggcttcccaatgccccttagaatataattcaggtttcttaacttggcctacaatctgccttcctctccagattcaattctcaccatcttcttcccaaatctttaagctcagtgattctcaaagcatggtccctgggccagcagcatcagcatcacctgcaaacttgttagagatgcaaattctcaagccccaccccaaatctaacaaatctcaaactctgggtctaggactcagcaatctctcttttaaggagccctccaggtgattcttaggcctgctgaagtttgagaaccactgctgtatccatactggactatttctgttccaattcccctacttgcggataccccgacctctttctgtgaacctcaccaccctttctccacttaattaactccttctccttgtcatacaatctgacaagttcatgtaatatgttgaatctaccttgagatgtgttccaaactagagtcgctgaggggctaccagatattgatgaaaaatcccctgaagacagttaaagtggaagataaatctggaaagaaccttcctggcaaagtgtggcccctcaaggatccccccattcacttggtgcttacatagtgaaatgtgagcctgctggaaccctggtgctcatcctgctaaatacactcagcgcagatgattcctagcacaccacaggttgcacctgaagtcctgagtgggggaaccttccccatggtgagttgcaggaagtcaccaaacaaggtatcagactttcactacctgacttcattattaagtgcatcttcagaatgaaattgagaattttatttaaattcagatatacctaaatatttaatacttaaataagtataaatttaaaataataaattttctaaataatagaagtcatttcttaaaataatacaaatatctggtcctctagcatttctctcttctgagcagcactagactcattaatgccatgtagtcgtacccaggttttaaacagtggtttctatggcttaggacaatgtttcctaatgttctaaaatccatatcctctttttaaaaaacagctttattgcaatataatcataatctcttttgatttgttgctctttttctctatcgccacctctttttcttggcaagattcactgatagaaacaatctttttaaattaaaaatgtagcgattgtaaacatgatcaagatataaagtttgaaaattttaaacattacagagggtcgtacagtaaaagcaaagtctccttccatactcactgacctccccactctccacgaccccaatcttctgctctcaaagtaactactcttcagtttatgtctagattgtttatatatatacacacacacacacacacacacacacacatatgtggataatatgtaattcccctaattttataccttagaattataccacatgtatattctgcatcccccttaatggcattttgattatcaatggtgtgggactccctagatctatatatagtattgtgttacttactgtttaaacgtatagcattgaatttggtctacattagctctttgaaagccccactatacatataaggaaagaagggtccagaggtggtgataagtgatttcaaaagattaaagggccaactacaaatggaattggatcttgaatttaggccttttgaatttatctgtcctgctctttcaaagtcaacaaaccccttttacaatactgatgtacctgtggcctcttgaccaagtcaatttggcctattgccaagagcagatttagatggtgacactcgatacagtggcctccaaagtttggaattctttaatgctaatttaccatgctggggatttgaattactgattatggtattcgaataaaaactaaccacttctagggtttaaagttaatgtatacacacacacacacacacacacacacacatgcacacacacacacagagactcctctgcctaaagtgaagaatttttaaacaaattatagctaacacagaacttcaatcaattgcccaagaatacgcttctttctttacccccttcttcatgctatgctgcaaacacagtgataaggaacatgagctctagagtcacctgatctgagtccagatggaggcactgacacttagttatgtaaccttaagtgaattattactttacctctctaagcctcaaagcctcactttccttctttttagtcccatcaaacttgcagcaagcaattcactttacttctttgtaggtaaggttaataagaagtaatgtgacaaggcatgcaaacgctgagtgaaataataatatgactattattatttcattattcattccatttattttttattcttctaatttttctttctcccaagtccatattttacatccatccatctaatcatatttattgagtcattattaagcacaaagttctatggatggcacgggaaaacccagtgatcaatgcgatggagtccttcccacaggagcctacaatctcaagcaaagttcagaattaattagtggttaatctttactgacttcataaaacgtatcaagcacagtgcagagcacttgacactcattatcacatttaattttaagctacctatgaggtggacgttcttttacagaagaggaatctgtagctcaataaagctgagtactttatctaggctggatccaaacccaggcagcctgactcccaaaccctgcatgcatgtctacatcacaccccaggcccctcagctctgtgagccctcctgacttcgattcctcctctgcttgcactcttttaacattagtcatcttaacaagaactctaatctatacaattcaagacgttacactgtccttttaatacaacccttcttccatagattttctagaggcagcatggtagaggcagctcagttaagggcccagattttggagtctgctgcttgacagctgcctgacctacagcaagccacataagcaatctgtgctgcaggtctcacctgtaaaattggggtaaggctacccacactccagagattgtgttgataattaaatgcgttaacataggtgtcagcacaggcaaagcacacagtcagtactgcataagcggtgggcttcattattcatcctgtaattacgtattcatactagaatcatgtatcccataggtcagggaccaccttttctttccttaatacccccaggattggcaaatcttgctctctcaacaaatagtttactcggtggaacctaacagaactaatatttctttctgtccgtaaataaaaatagatcatgcttgaatgtgctactttgcccgaactccccaagtcttcccgcatcttcagttcctccccctccaacctggtgttcatcaggagaggggaaagagcatttcttgcctggcaggaactcaagacctagaagaaagagggcctaccctgccaaggaaatgaccttccccttcctcgcctctgctcctcttcccgtttcctgtcttttccttcttttctcctggtgtttccttctcccgttaactatggggacagacgcagctattcacaagtccgtctgggcagcacactccgaggtaaggcacgaaggtcaggagacaggttcccgtgccccaaatcctggagaagatgagttaaagctcttcgcttcgattgccttcgcccttcccgcgtctcgggagcaattcagtgtcgcctcacgtctggccttgcagaagtccggagttccggctctgaactggagctccccgccattcccgggccctccggtttctccctcaggccatctgaggaattgaggtaggatttcgcgggtgttaggagcaaactcccaccacaactcggtcccgggctccctctccgttgagccttgacctctgcccaaaaaacaaggaatcgtgggcgtgaaggcggccttgaacccgggcggcggggctcggcgggactcgtcagcgccctgctgcggcacccgggccgctcaggtaagtaggaggcgtgtgcgggcggggccgagcgggccccaatccgtacgcgaggcaggaaccgcccgccgcgcccccgagagctctcggcgccgcgcagtcgccgctgggcaccccgagaccatggggaagctcgtggcgctggtcctgctgggggtcggcctgtccttagtcggggagatgttyctggcgtttaggtgagtggcatcttgacagggcgtcttcgactctcyttctctcctcttccaagtgaggtcaggggctgcctggcgcccccttcctagcgggtaggaaagagcagctttggaacctcactcctccatctcacccagyaaaccgccccttgagactcgcttatggggaaagtgagctacttgcgtttccaaagactgccgagccgaattagtcccatttattttttgaaggttatgatcccccactttgctttctgaaggtcatgacccccttttactttctgaacgtgatgacccctttcccagctcgccctcaacattctgcttgggaaaaaaggacgtccattggaaacgccggacttgggagagaggatcaggctaccagttggatgtttacggctgactgagacattgcccaggtctggctaaccatgcagaagtactgggttatggaacctatcctagatttaaagagctggccagacagcagggcaaaccagctgaaacctgcaggcggtaactggcattttgtaggcatttgaccttttgaagtggaagatacaatggtgatagccagcctagaaatgtctcaggaaaagtcaatactgggctagaaagaagaacctttaagtgataatacacattcatgagtggatcgaaagcctctgcttgctttcagttgtctttgagtgtttatgtatttctcttagttgaagctggtcttcttagaggatcacgtctagaatctgttgaggtgcctggtgcctattagtaatacttccagtttgagagttttattgttacatttgctcccagtgcaaccacatggagaatcataaaataatagtaataataataaagtagatctaagggtatttttttaaataaatgactgtaagataagtattgagtctttctgaatatactttaataaaaattttaaattatccctgatattagaagaatgtggaaacattccttttcactctggaaacaagaaaattgtgttgaaaaataaatcggccaattgtttaaattgtggttggtttaatgaatttacatacttgcggagtaagtcagcataaaatttaaaaattaaagcaaaagtgatagagtttgactattaggagaccctgttgaattttgggaaagcagtttggaaggaaaagttcaaagggcaagactgtaggggattaagtgcagatttataacagacgatactttagaaaattagggctatttcgtgcatttaaattaataatattgttcaattactcatactattaaatagtgtcttttatttgggcagcagaattttccatgttgaatcatattatacagtttttcagcaataactgggtaaggttagctgatataggtaaaatacccacataatgtctacattatgtaaataaacatgaaaggaagtacctacttacttgttatgtcattcataaattatgataaagatagttaaccaacacgaagatgattgaagtccacatttaaacatacatkttgaatgctgtgccttgacttccagggytgggttttatcttctacagagaaagggtgaatgcctctcgagaagtggagccagtagaacctgaaaactgccaccttattgaggaacttggtatgtatgtgacagtaccaagaggagccagcacagcttcttggtcgtcatccacctgactgagccctaccagctcatttaattacctgtcactacttaagccctcccagtgggacatctgccccgtccactctgccccatgcaaggtcttsaggggtgtactaaatgacattctttgtgggtttttctcagcacatttccttactgacatctctccacattacctaaagaatgtcattgaccactccctggttttcccctcactgaatgcttctcctttcccatctgtggtatttcactctcctccttgtcctctgttacctttcctttttttgcttcctttcttctttccttcctccctccctttccttattgtcattcctggcttcaagtgttattttttttcaaataatatgactcagcccctcccctcaagaacctcacagcaggctgggcgcagtggctcacacctgtaatcccagcacttgggaggccgaggggggcggatcatgaggtcaggagatcgagaccatcctggccaacatggtgaaaccccatctctactaaaaatataacaattagccgggcatgktggcggcgtgtgcctgtaatcccagctactcggaaggctgaggcaggagaatcacttgaaccagggagtcatcggaggttgcagtgagctgagatcgcgccactgtactccagcctggcgacagagcgagactttgtcttaaaaaaaataataaacgaaggaacctcacagcctacctaccttcttttaaaaaaattcataaaaaatccatggcccagtccctaacctttcaaactgcagcccttcttttttagtcagttaaagggcagctccagctcaaactctccctaagctgaaatctattttacatttctgtcgttttctccctcatcctcccacccacaaccagctctgcttctagacttttcctatgtatggtacccccattctcaaaagattcagttcaaaatccaggaaccattgttccccgcttgtccctcatgcttctacgtgagacatgggctaatctcacctactagttaatgccacacctgcttatttgggctccacagctccaattcttcctgacattgctaacagaaaaataaaataaaatcaggctagattgtgttccctgttctgggaatatgttctttcaccttctcacctttgcttatgaaattccctccaaacttactgattcctctgtctctgcttactaaaatcagctgcaaaattcatctccttcctctgaactctcacagcactctgaagctccgattcacttatgacacctgccacatgccttgtattatagctagcagtgttctctctttcactatcagattgtaaactccctagggccaagaactgtgacttatttattagaatgtgatgagatagcttattttgggatatgattttctattttattgctatatttaaaaatacagaaaaagtacccttttgatttgagttttctgccttttcttgcctctcaatttctaaaaaataaagtaatctgaaccttgcactccctagtcttagaggtggtttgtgctagcagctgkaaagcagaagaaaccaaagaaaacgcctttcctgaattgtttttaaaaacctgagccccttcaagggattctgttggagaagggatatgaatatgtggatatctttgaataatggggatccttaccccactggctgacagcattctgggagaggagcaggacctcagaaggaatggttgcaaggtatctttagggacgctggaccctgtgttccagctaaggtaaagaccttgtgtcaatgcattacatggaagtagcagaattgtctaaattaaagggaccagtaactttggcaatgaataattcgatgatacgtagtgtagaatgaatgccagatggcctttccaaaacattctgcttaggtttagaacccaccacttaaaatgatttcataaccctaacagacaaacccagtaatgactcagattggattttccatcaacttagtggaataggrtatcagagtgatttaatttgattttaaaaataaggaaatgtgacatttactcatttgtttactgttttgtggtgtagtagtattcatattcactmtacaaataactgtcaaaatatataagcctgcaaataatcaagaggtataattagactagatgattggtagggtctagtctgactcgaattgtatcactcaactagatttgagaaggtaaaattacagttaatattgtgagtcttaggtcaatgttctgatttgccaaatattttgaagaaaatggcttaaatagttggaagcaggctgggagcagaagaaagaaatgccatgttacttctcatgtctattggcatatgtttggtgaactaaacaagttagaatgatgatgggtcatgtgtcagtaggacaatactgatatatatgttttgaaaaagctgctttatcaaaggcctggtgactatgagcagcctgttgagtcctttacaaacatctacatcatcctcataaccaatttgtaaagtggatgctgctatctatgctttgcagattaggaaattgacatacagaagaattaagttgcttgcccaatggtccggaactagggggtgatgggcttagcttatgagccaagatcgtttccttctatgcctttttactctctgttgtgtaacactaactttctgatctactgacaacacattttttattttggaagcttcaggaaagtattgcaacagtggaaaacagaaaatctgagatgcaaacagctgaaatattactagatacaggttaatcaaaacaaggcagtctagatatttaaattaagataatggataagataatactcacaaatcacaactggttgaggagtagaggctttacaaagccctgaaaagctgctgaaggattttaggtagggtatagtaggctgtaacagagctggagaaaaattcttatttgtgttttcaagacccagacttttgaggtttattttattggtagaagaaactcttattttgttttccttctccagcatttttttctgggaagaaaagttgaaaggtgaaatatatctttctctggaaatcatatctcatagatctttttgtattacgttcatctttttatccaaggcttttgagggtcaaggattgttttaaccaggacgttatctggctgcccttgacatctaatcaaagctgcacttgaaatatgaatacttcagtaggactttcactaggcaggattatcgagtaggtggcctctgtatttaatacctacgtatcttctcttccactsctttccattctatagcttcccatgtctccaatatatgcttctactccataataggttccatgtgttttcttagctggctatcagaaacttctctccaagatgtgaagtgacgataataaaattaactgatagtaatgctttgatgtgatcctttatcagagtgcctgtaggggatgactggagaaatgaagaaaagagtaaagaaatgaagttatgccaagtagcagtagggttgacaggctaagaagcagtaggcacctattcataagactgattttagacttagcagtgggattytaatgatagttgtgcataggctaataagtgtgtgggaaagtctcagaggaaggtatcctgggggcttttgctcccacaggtgccattgttgctgagatgcatggggcctgtcgtgcaggcgtagtgtaggtgacagctcctttttcaacttgttctcagtcaaaacttacttattatatgtctctttccatagaaaaaaatgctgaaaactagctcttactgagaaaaaagatctaactaaactttcatattaatattcagtaatctttcatattcatttatactcattagtttattactcaataatttcccaatatgattgtataatgtagcgttttaggctttacgttggaagagaaggaatgcttggcagagaggcctgtaataaaagaccttcacgattatgactttccagattttatcactgagtctatagagcagccttctatgggggataaagctgaatctctcaggatatgccctggaaattgttacttaaagagtaaatctaggatatgagtttattttctaggtatttgcctttttctcctgaaaatggggttctaaaaaaggatttagtatttgaggagtctgactcaagctttactatagagtagcatgcctgtgagattctccaaagttaatatggtttcccaagtaaatggttgaacaagtcaacaatttccmaaagaagtttccaaaagatatttgtagtttggactgtgagacgtattttttaagccttcatatatgcatttttctgattctacccttcttttgcagaaagtggctctgaagatattgatatacttcctagtgggctggcttttatctccagtgtgagtattttccatgctgctctcatgctcacatcaatagctgtatagacagtgcattaatgttgtcctctggagctgccagatggatccctatgctctcatcccacctccgggtaaaccagtcaactaaaaaagccaaaacagaattttggagggctaattagaacaccacaggaatgcccagctttgactgcctcatggtgggcaactccctgggggtagtggcatactcagtagggtcttgataaatgtgtattgatttccactcgattcctaggctagtctccagttctgtcctattgctatccattctcatcattgccctatttgactgggcttccgcttctggtagtcatcttcccactaactggtattcctctcaccatgtctgcctttatttggagctctgcaaatgtttgtggatcgaatattaaccacgttactygatttaaaactctaaacacgttccatcttgggttccctgccattcttaacaagtctttcaaagagaaatagagaacagactgcattttaattcccagtactgtcttcacaggaataatcaagaagttacaccagggacagcatttcggtaaacaaacaaaaaaatgtgtatttatgagatgttgaaatttttcatatattaatatttgttaaatcaattgcattttgraatggggatatgattttgaaaaagtatatttaccacattttcaatgtgaattctgattgctggaattggatgtctaatattccatttggggcaataaaataccaccaaagaacatggattttgaatttaaatatttttggccaaaaaaggggtacttataataaccgtggcctgaatttataaattcataagtacacacagtagaatagagtgaggctctcatttggaccttaaactgctgctggtgtcactgctggaactggtgctagtctgtgtgggcaatattttatttctttatttttccatcaaaatcaaggataaaacaaaatggtctagaaaagttttttccttgttgacctaaattttctattgtcagtttagatttttttttattatacttttaagttctagggtacatgtgcacaacgtgcaggtttgttacataggtatacatgtgccatgctggtttcctatacctattaacttgtcatttacattaggtatttctcctaatgctatccctcccccagccccccacaccctgacaggccccagtgtgtgctgttccctgccctgtgtttatgtgttctcattgttcaactcccacttatgagtgaaaacatgcagtgtctggttttctgtccttgtgatagtttgctgagaattatagttttcagtttcatccatgtccctgcaaaggacatgaactcatcctcttttatggctgcatagtattccatggtgtatatgtgccacattttcttaatccagtctatcactgatggacatttgggttggttccaagtcattactattgtgaacagtgctgcaataaacatacatgtgcatgtgtctttatagtagcatgatttataatcctttgggtatatacccagtaatgggattgctggatcaagtggtatttctagtgctagacccttgaggaactgccacacggtcttccacaatggttgaactaatttacactcccaccaacagtgtaaaagtgttcctatttctccacatcttctccaccatctgttgtttcctgactttttaatgattgccattctaactggcatgagatggtatctcattgtggttttcatttacatttctctgatgaccagtgatgatgagcatttattcatgtctgttgactgcataaatgtcttcttttgagaagtgtctcttcatattctttgcccactttttgacggggttctttgtttttttcttgtaaatttgtttaagttccttgtagattctggatgttagccctttgtcagatgggtagattgcaaaaattttctcccattccataggctacctcttcactctgatgatagtttcttttgctgtgcagaagctctttagtttaattagatcccatttgtgaagtctttgcccatgcctatgtcctgagtgttattgcctaggttttcttctagggtttttatggttttaggtcttacatttaagtctttaatccatcttgaattaacttttgtataaggtgtgaggaagggatccagttttggctttctacgtatggctagccagttttcccagcaccatttattacatagggaatcattttcccattgcttgtttttgtcaggtttgtcaaagatcagatggttgtagatgtgtggtgttatttctgaggcttctgttctgttccataggtctatatatctgttttggtaccagtaccatgctgttttggttactgtagccttgtagtatagtttgaagtcaggtagcaatgatgcctccagctttgttctttttcctkagaattgtcttggctatgygggcccttatttgattccctatgaactttaaagtagttttttccaattctgtgaagaaaatcattggtagcttgatggggatgacactgaatctataaattaccgtgggcagtatggccattttcatgttattgattcttcctatccatgagcatggaatgttcttccatttgtttgtgtcatcttttattttgttgagcagtggtttgtagttcttcttgaagaggtcgttcacatcccttgtaagttggattcccaggtattttattctctttatagtaattgtgaatgggagttcactcatgattggctctctgtctgttattggtgtataggaatgcttgtgatttttgcacattgattttgtatcctgaaactttgctgaagttgcttatcagctgaaggagatttgaggctcagatgatgggattttctaaatatacaatcatgtcatctgcagacagagacaatttgccatcctcttttcctaactgaataccctttatttctttctcttgtccaattgccctggccagaatttccaatactatgttgaataggagtggtgagagagggcatcsttgtcttgtgcaggttttcaaatggaatgcttccagtttttgcctattcagtatgatattggctgtggatttgtcataaatagctcttattattttgagatacgttctatcaatacctagtttattgagagtttttagcatgaagggctgttgaattttgtcgaaggccttttctgcatctattgagataatcatgtggtttttgtcattggttctgtttatgtgatggattacatttattgatttgtgtatgttgaaccagccttgcatctctgggatgaagctgacttgatcatggtggataagctttttgatgtgttgctggattcggtttgccagtatttttttgagggaggattttcgcatcaatgttcatcagggttattggcctaaaattatctatttttgttgtgtctctgccaggctttggtatcaggaagatgctagcctcataaaatgagttatggaggattccttcttttctattgattggaatagtttcagaaggaatcgtcccagctcctctttgtacctctggtagaatttgtctgtgaatccrtctggtcctggactttcattggttggtaggctattaattattgcctcaatttcagagcctgttattggtctattcagagattcaactttttcctggtttaatcttgggaggatgtatgtgtcgaggaatttatccatttcttctagattttctagtttatttgtgtagaggtgtttttagtattctctgatggtagtttgtatttctgtgggatcagtggtgatatcccctttatcattttttattgcayctatttgattcgtctctcatttcttctttattaatcttgctagtggtctatctattttgttgattttttcaaaagagcagctcctgcattcattgattttttgaagggtttttcatgtatctatctccttcagttctgctctgatcttagttttttattgccttctggtagcttttgaatttgtttgctcttgcttctgtagttcttttaatcgtgaataaccagatagcatcatggtgatggatcaaattcacacataagaatgctaaccttaaatgtaaatgggctaggtgtcgattttagatctttcctgcttcctcttgtgggcatttagtgctataaattcccctctacacactgctttaaatgtgttccagagattctggtacattgtgtctttgatgtcattgatgtcaaagaaaatctttatttctgccttcatttcattatttacccagtgtcattcaggaacaggttgttcagtttccatgtagttgtgtagttttgagtgagtttcttaatctggtgttctaatttgattgcactgtggtctgagagacagtttgtgatttctgttcttttgcatttgctaaggaatgttttacttccaattatgtggtcaattttagaataagtgcgatgtggtgctgagaagaacatatattgtgttgttttggggtgaagagttctgtgtatgtctatgaggtctgcttggtccagagctgagttcaagtcctggatatccttattaaccttctgtctcgttcatctgtctaatattgacagtggggtgttaaagtctcccagtagtattgtgtgggagtctaagtctcttggcaggtctctaaggacttgctttatgaatctgggtgctcctgtattggatgcatgtatatatactttttaaaatatatattttttattatactttaagttctagggtacatgtgcacaatgtgcaggtttgttacatatgtatacatgtgccatgttggtgtgctgcaccaattaactcatcatttacattaggtatatcttctaatgctatccctccctcttccccctaccccacaacaggccccagtgtgtgatgttccccttcccgtgtccaagtgttctcatcgttcaattcccacctatgagtgagaacatgcagtgtttggttttttgtccttgcgatagtttgctcagaatggtggtttccagtttcatccatgttcctacaaaggacatgaactcatcattttttatgtctgcatagtattccatggtgtatatgtgccacattttcttaatccagtctatcattgttggacatttgggttggttccaagtctttgctattgtgagtagtgccgcaataaacatacgtgtgcatgtgtctttatagcagcrggatttatattcctttgggtatatacccagtaatgggatggctgggtcaaatggtatttctagttctagttctagatccctgaggaatcgccacactgtcttccacaaggttgaactagtttacagtcccaccagcagtgtaaaagtgttcctatttctccatatcctctctagccctgttgtttcctgacttttaatgatcgtcattctaactggtgtgagatggtatcccactgtggttttgatttgcatttctctgatggccagtgatgatgagcattttttcatgggtctgttggctgcataaatgtcttcttttgagaagtgtctgttcatatccgttgcccactttttggtggggtgtttttttcttgtaaatttgtttgagttatttgtagattctggatattagccctttgtcagatgagtagactgaaaaaattttcttgcattctgtaggttgcctgttcattctgatggtagtttcttttgctatgcagaagctctttagtttaatgagatcccatttgtgaattttggcttttgttgccattgcttttggtgttttagtcatgaagtctttgcccatgcctatgtcctgagtgttattgcctaggttttcttctagggtttttatggttttaggtcttacatttaagtctttaatccatcttgaattaatttttgtataargtgtgaggaagggatccagttttggctttctacatatggctagccagttttcccagcaccatttattaaatagggaatcctttccccatttcttgtttttatcaggtttgtcaaagatcagatagttgtagatgtgtggtattatctctgaggcctctgttctgttccataggtctatatatctgttttggtaccagtaccatgctgttttggttactgtagccttgtagtatagtttgaagtcaggtagcgtgatgcctccagctttgttctcttagcttagggttgacttggcaatgcgggctcatttttggttccacatgaactttaaagtagttttttccaattctgtgaagaaagtcattgatagcttgatggggatggcattgaatctataaattaccttgggcagtatggccattttcacgatattgattcttcctattcatgagcatggaatgttcttccatttgtttgtgttctcttttattttgttgagcagtggtttgtagttctccttgaagaggtccttcacatcccttgtaagttggattcctgggtattttattctctttgaagcaattgtgaatgggagttcactcatgatttggctctctgtttgtctgttattggtgtataagaatgcttgtgatttttgcacattgattttgtatcctgagactttgctgaatttgcttatgagtttaaggagattttgggctgagacaatggggttttctagatatacaatcatgtcatctgcaaacagggacaatttgacttcctcttttcctaattgaatatcctttatttctttctcctgcctgattgccttggcgagaacttccaacactatgtagaataggagtggtgagagagggcatccctgtcttgtgctggttttcaaagggaatgcttccagtttttgcccattcagtatgatattggctgtgggtttgtcatagatagctcttattattttgagatatgtcccatcaatacctaatttattgagagtttttagcatgaagggctgttgaattttgtcgaaggccttttctgcatctagtgagataatcatgtggtttttatcttcagttctgtttatatgccgaattacatttattgatttgtgtatgttggaccagccttgcatcccagggatgaagcccacttgatcttggtgcataagctttttgatgtgctgctggatttggtttgctagtattttattgaggattttcacatcaatgttcatcaggaatattggcctaaaattctctttttttgttgtgtctctgccaggccttggtatcaggatgatgctggcctcataaaatgagttagggaggattccctctttttctattgattgggatagtttaggaagaatggtacyagctcctccttgtacctctggtagaattcggctgtgaatccatctgatcctggactttttttggttggtaagctattaattattgtctcaatttcagagcctgttattggtctattcagagattcaagttcttcctggtttagtcttgggagggtgtatgtgttgaggaatttatccatttcttctagattttctagtttatttgcatagatgtgtttatagtatcctgtgatggtagtttgtatttctgtgggatcagtggtgatatcccctttatcattttttattgcatctatttgattcttctctcttttcttctttattagtcttgctagtggtctatcaattttgttgatcttttcaaaataccagctcctggattcattgattttttgaagggttttttgtgtctctatctccttcagttctgctctgatcttagttatttcttgtcttctgctagcttttgaatgtgtttgctctggattctgtagttcttttaattgtgatgttaggttgtcgattttagatctttcctgctttctcttgtgggcatttagtgctataaatttccctctacacactgctttaaatgtgtcccagggattctgatatgttgtatctttgttctcgtcggtttcaaagaacatctttatttctgccttcatttcattatgtacccagtagtcattcaggagcaggttgttcagtttccatgtagctcagtggttttgagtgagtttcttaatcctgagtgctagtttgattgcactgtggtctgagagacagtttgttataatttctgttcttttacatttgctgagtagtcctttacttccaactatgtggtcaattttgaaataagtgcaatgtggtgctgagaagaatgtatagtgtgttaatttgggtggagagttctgtagatgtctattaggtctgcttggtgcagagctgaattcaattcctggatatcctttttaactttctgtctcgttgatctgtctaatattgacagtggggtattaaagtctcccattattgttgtgtgggagtctaagtctctttgtaggtctctaaggacttgctttatgaatctgggtgctcctgtattgggtgcatatatatttaggatagttagctcttctcgttgaattgatccctctaccattgtttaatggccttctttgtctgttttgatctttgttggtttaaagtctattttatcagagactaggattgcaacccctgcctttttttgttttccatttctttagtagatcttcctctgtccctttattttgagcctatgtgtgtctctgcacatgagatgggtttcttgaatacagcatactgatgggtcttgactctttatccaatttgccagtctgtgtcttttaattggagcatttagcccatttacatttaaggttaatatcgttatgtgtgaatttgatcctgtcattatgatgttagctggttattttgctcattagttgatgcagtttcttcctagcctcgatggtctttacaatttggcatgtttttgcagtggctggtactggttgttcctttccatgtttagtgcttccttcaggagctcttgtagggcaggcctggtggtgaccaaatttctctgcatttgcttgtctgtaaaggattttatttctccttcacttgtgaagcttagtttggctggatatgaaattctgggttgaaaattcttttctttaagatcgttgaatattggcccccaccctcttctggcttgtagagtttctgccaagagatcagctgttagtctgatgggcttccctttgtcggtaactggacctttctctctggctgcccttaacattttttccttcatttcaaccttggtgaatctgacaattatgtgtcttggagttgctgttctcgaggaatatctttgtggcattctctgtatttcctgaatttgaatgttggcctaccttgctaggttggggaagttctcctggataatatcctgcagagtgttttccaacttggttccattctccccgtcactttcaggtacaccaatcagacgcagatttggtcttttcacatagtcccatatttcttggaggctttgttcatttctttttattctttttgctctaaacttctcttgttgtttcattttattcatttgatcttcaatcattgttaccctttcttccacttgatcgaattggctactgaagcttgtgcattcatcacgtagttctcatgccatggttttcagctccatcaggtcctttaaggacttctctgcattggttactctagttagccattcatctaatcttttttcaaggtttttaacttctttgtcatgagtttgaacttcctcctttagctcagagaagtttggttgtctgaaaccttcttctctcaactcatcaaagtccttttccatccagctttgttccattgctggtgaggagctgcattcgtttggaggaggagaggtgctctgatttttagaattttcaatttttctgttctgttttttccccatctttgtggttttatctacctttggtctttgatgatgctgacgtacagatggggttttggtgtggatgtcctttctgtttgttagttttccttctaagagtgaggaccgtcagctgcaggtctgttggagtttgctggaggtccactccgaccctgtttgcctgggtatcagcagcggaggctgcagaacagcgaatattgctgaacagcaaatgttactgtttgattgttcctctggaggtttcgtctcagaggggtacctggccatgtgaggtgtcagtctgcccgtactggggtgtgcctcccagttaggctactcaggggtcagggacccacttgaggaggcagtctttctgttctcagatctcaagctgcgtgctgggagaaccactactctcttcaaagctgtcagatagggacatttaagtctgcagaggtttctgctgccttttgttcggctatgccctgcccccagaggtggagtctacagaggcaggcaggcatccttgagctgcggtgggctccacccagttcgagcttcctgaccactttgtttacctactcaagcctcagcaatggcgggcgcccctcccccagcctcgctgctcccttgcagttcgatctcaaactgctgtgctagcaatgagcaaggctccatgggtgtggaaccctccgagccaggcacggaatataatctcctggtgtgctgtttgctaagaccattggaaaagtgcagtattagggtgggagtgacctgattttccaggtgccgtctgtcacagctttgctttgctatgaaagggaattccctgaccctttgcacttcccggctgaggtgatgcctcaccctgcttcggctcacactcggtgcgctgcacccactgtcctgcacccactgtctgacaagccccagtgagatgaacccggtacctcagttggaaatgcagaaatcaccagtcttctgtgtcgctcatgctgggtgctgtagattggggctgttcctatttggccatcttggacagatgcatgtatatttaggatagttaactcttgttgaattgttccctttaccattatgtaatggccttctttgtctcttttgatatttgttagtttaaaatctgttttatcagagactaggattgcaactcctgctttttttttttttgctttttatttgcttggtagatcttcctccatccctttattttgagcctatgtgtgtctttgcacatgagatgggtctcctgaatacagcacacagatgggtcttgactctatccaatttgccagtctgtgtcttttaatcggggcatttagcccatttacatttaaggttaatattgttatgtttgaatttggccctgtcattatgatgttagctggttattttgcccgttaattgatgcagtttcttcatgtcatcaatggtctttacaatttggcatgtttttgcagtggctggtactggttgttcctttccatgtttagtgcttccttcaggagctcttgtaaggcaggcctggcagtgacagaatctctcagcatttgttgtctgtaaaggattttatttctccttcacttatgaagcttagtttggctggatatgaaattctgggttgaaaattcttttctttaagaatgttgaatattggcccccactctcttctggcttgtagggtttgtgccgagagatcagctgttagtctaatgggcttccttttgtgggtaacccagcctttctctctggctgcctttaacattttgtccttcatttcaaccttggtaaatctgacaattgtgtgtcttggagttgctcttctcaaggagtatctttgtggtgttctctttatttcctgaatttgaatgttggcctgccttgctaggttggggaagttctcctggataatatcctgaagagtgttttctaagttggatccattcttcctgtcactttctggtacaccaatcaaacgtagatttggtcttttcacagagtcccatatttcttggaggctttgttcgtttcttttcactcttctctcatcttgtcatctcactttatttcattactttggtcttcaatcactgatatcctttcttccacttgatcaaatcggctattgaagcttgtgcatgcatgaggaagttctcatgccttggttttcagctccatctggtcatttaaggtcttctctacactgcttattctagttatccatttgtatcacttttttcaaggtttttagcttccttgtgatgggttagaacatgctcctttagctcggagaagtttgttattactgaccctctgaagcctacttctgtcaacttgtcaaactcattcttcatccagttttgtttctttgctggcaaggagctgtgattctttggataagaggcactctggtttttggaattttcagcttctctgctctgctttctccccatctttgtggtttttgtttggtgacctacagatggggttttggtgtagatgtgctctttgttgatgttgatgctattcctttctgtttgttagttttccttctaacagtcgcgcctctcagctgcaggtctgttggagtttgctggaagtccactccagaccctgtttgcctgggtatcaccagtggaggctgcagaacggcaaatattgctgcctgatttttcttctggaagcttcatcccagaggggcatccgcctgtatgaggtatctgtcagcccctactgggaggtgtctcccagtcaggctacatgggtgtcagagacccacttgaggagacagtctatctgttctcagagctcgaatgccatgctgggagaactactgctgtcttcagagctgtcagacagggacgtttaggtctgctgaagctgtctgccgccttttgttctgatttgccctgcccacagaggtggaatctacagcaaggcagtaggccttgctgagctgtggtgggctctgccctgttcaagcttcccggcctctttgtttacactgtgagcacaaaaccgcctactcaagcctcagcaatggtggatgcccctccccctgccaagctgcagcatcgcaggttgatctcagactgctgtgctagccgtgagcaaggctctgtgggcgtagaacccgccgagccagacacgggagggaatttcctggtctgctggttgcaaagactgtgggaaaagcacagtatttgggcaggagcgtaccgttcctccaggtacagactgtcacrgcttcccttggctaggaaagggaaatcccctgaccccttgcacttcctgggtgaggtgacgccctgccccactttggcttgccctccatgggctgcacccactgtccaaccagtcccaatgagatggaccaggtacctcagtcggaaatgcagaaatcacctgtcttctgtgttgatctcactgggagccgcaggccggagctgttcctattccgccatcttggaagcttcctttcagtttaaattttcaatgttatgccaaatataccactaaaagtgatgattctataactaggaaatttctttactgttgtgaaataatgtttgtccttcctactgtatgttttcttttttttttttaattttcactggaactaaaagttctgaatcattgctatacaggaagtatatattttcatcacaaataattttatgagaaatgttaacatgaagttttaaataatggatctccttttgtaaatgaacaaacaacttataggataaggattctgttgttttgcttgtttctaatccttctgcactgtaataaattcaggaccttgttcttttggtttctccttttaccctttcttgccatcctagaagatgtttggaagttgctgatttggagaataattctgtgcaatagatatttctagtctatttagggatgacaaacaggatattttcttccctgccttgggacttgacatgcttctctttgactccaagattactcccttcttcacactttgccagctaactcccacttctttgtgagggttcattgtggtggcactttacttcctcaggagagtcttccctggcactctcttgtggggtgaggtgcctcttcaatgttccctcttgaatattccctcacatcccctgagtttaggctgttatagaccacaccatacttaagtgcttgctctaggtttcaagatccttgaactcaagactttggaacatgtattgacatgcccaacaccgaacatactaccaggcatttgcaagtcctcgaatatttactgagttcatgtggtgatggatgagtatagtggaagagttcattgattgtccacatttacctgtagtttgttgggaaaaataagattcctgcatgtctagatgatgattttcatcactttcaccagtgaatggtatgaaaagaattgcttacagtcattaacacacagttggtttgctgccacaaattcctacctaactgctttacacagaaaactaggtgaatgtgaagccatttatcagaagtgtttctttgatcatcacacttaatctagaccaagcttgtttgcagtgccctgcccttatctatctatcagattattttatttctgtaacatccagtcttttcactagctggctatgctccaccttcccccaagctaccaaggtacttgccattgtgttctgtcttgagctgccttcctgagcaatactgtttacttccaaacctttctgtatgtgtggcagagagagtctgaacaataaatgatctgagtgatttaggcaaatcactcttctaggcctcatttccctcatgtgaaagggaagatgtgagataagatgcccctaatatatttatatgtatataattattatatattttttatttttaacatatgtgagtgtgtatatatatacatacatatatacacacacatacatatatatgtatacatatacatatatacgtacatatatacacacatacatatatatatgtatacatatacatatatacattaaattttttcttcagtactactattatctgagccattgagcttggtgacaaattggttatggggaaaagagtagactgaaaattgaattttatgttctgatgttggggagcatagtgatgtccttaactgagaagaatagatataaatgagaggatggattcgaggggagagtgttgattttggttttgactagttgattttgagctgccctttgggaggaggttgggaaggcaagctagagttacagagttacaaataaatgtgcagacttgaaagtccttgatataaaggaaatacctgaatctttatgtataagatctgcaaggaaagagtatagagtgagaagggaggagggatcgataaaaacagaaggaggyataaatccaagagtcaggaagaggagcaggatttctatctgggaactcaacttttgacgttttgataagaaagaagaaggtatactgtagtgtcaaatgccacagagaagcagatcagaagtagaaaagttatcaaaataaagtaatttggagaccatttatatgatctttataagggtatttctacaaactggtgggagtggaatactaacttcagggaattgagagttggagcagttcacattaggcaataagatcaggtgatgtttctaagaaatttgatggtgaggggaagagagataaatgcatatatgaagaggcagtaaagttaagaaaatatttatttcaaggaaggaaaccttgtaattttttaggccaaagaagaagctgttagtgaaaaatgagtggtaaagcaagagagagagggtgtaatctctagagacagaccctagagaacagggaaccaagaaagcaggtaaaggatttaatctaagaacagaggagggacatttcttacttgagaaaagagggagaaagaaagagaatgaataaaactgaagaagaattactgggacagaaaggaaagaattataggaaattcatgttaaatgacatgacattttcagagaagtagtaagtaaagtcatccactcataataaagaggaagaaagtatgggctctagaacagtggtcccagcattttgggcaccagggaccagtttcgtggaagacaattttttccacagatcatggagggggagtggggaatggtcaagataaaactgttctacctcagatcatcaggcattagattctcataaggagcatccaacctagatcccttgcaggctcagttcacaatagggtttgcactcctatgagaatttaatgccactgctgatcttacagaaggtggagctcaggcggtaatgctcactcacctgcagctcacctcctgttgttccttgtaaggcccagctccttacaggctacggacaggtaccagtctgtggcacaggggttggggacccctactctagaagataatgaaataaatttagaagtgagacatgaggaaatccaatagattgcctatcataatgagccaaaaaaatcaataaacagtactaaatgtctggctgaagttgggatagtgactttgtagtggagtttttcaatctgattttagacttgccctatataagagctagaccaaggcaaagggagttcgcacagaatgtgataaggaagcaaagggtgtagctattgatgacgacaggattatggtctggaagcagaagtttgtggctagggacatgccaatcccttctccagatgtgctgacttaaggagaataaagagggaacagtgcctcctctgatgagcttcagtagtgccggtgttgtctgggaaaagccaggtttccctcagacaacattgggacatacgaattgggcatagaaggactgttctaaaaaaagtttgaagatatagctggggttgttcagaaaagattgactacctcaagagggagcagtggaagagccagtaatagtatcataagtgtatgtgtacgtgtgtgtagaaaggacagggagagggaaagaggcagaaagacaaggtgaaataggaaagagagaattgcaatagactgtaaaagaagataaaggtagcagagaagatataaagttattgatattgatatatatccagtgatagataggggacatggagaggaagtggactgttttgtaactggtgtagaataaaccaaccccaaggtttgtcacagtggactcagatgcagcaaaggcttcatgcattcaggatgcctattgttgattaatagctacctgatcctaatagtagaaaggaccactgtccaagttactggaataaactttttgtgatgtttgagtaaagcattcatgtcagaattttcagacatacctatakgaacaaaataggtcaaaaatagtcaactatataagactggtatccttatgttaattcttagccagctatactgtttgccactacatgatataatcratgtaggaatgggaacaatacaattaaactatacaccccttctctctgctttgaggaaggttagttatagaataccaggaccggaaataatcttataatcatgtatttgaacttcttcattttatagatgaggaatgtgaggtacgggcatgtgaagggattcacacaaagtaacagcctagtctcttctgttatatttttttggcttaactccttttctctaaattaaaaactcttccttatcttgaatatggttctttctgtgttcatagccaatgtttagatgacatcagtaacaccccagatcagatcatggaaacagctgacagagtgaaaaagcccagtaatctaaatgaaatttagaactttgaacatttttatttggctttgagattttaaattccttatgaaaatattgttttgatatgtatatgtgtgcacacttgttctttatttttaaaagggattaaaatatccaggcatgccaaactttgcgccagatgaaccaggaaaaatcttcttgatggatctgaatgaacaaaacccaagggcacaagcrctagaaatcagtggtggatttgacaaagaattatttaatccacatgggatcagtattttcatcgacaaaggtaaaacctgtatgtttaggrataagggggaaatgagggaaatagaaaccatttatctccagcccctcaatatttatgtaacaggaagagagaagatgctattttaccatacagatgtgtttttttwaaatgataaataggtataaaaccttgtaaacattgcattaaagaaggaacactagtatttttggccctatgtggcctcctcctcttccttctatccacttgtcttcttgtttgactgtcacaacctgtttgaatactgttctcagaaatctaacatgtaaactaaaggccctttagtttagttgtcactaaagacaactgtgagacgttaaaaaacataacataagggggaaaaaaacaaattagactcatcaaagttaaaagcttttgtgcttcaaaagacaccatcaagaaagtgaaaaacaacccaaagaatgagagatagtatttgtaaatcatatattagatgagagacttgtattcagacaatataaataattcttacaacttaacaaaacacaaataatgtaatttaaaaatggacaaagtatctacctagatagacatttctcctaagatacacaaaggcctgtaagcacatgaaagatgtttatcatccttagacattaggaaactacaaatcaaaaccagaatgagataccatttcacacccactaggatggtgataattaaaaagacagacaataacaaatgttggcaaggatgtagaaaaattggaaccctcatactttgccagtgggattgtgaaataatgtaaccactttgggaaggagttttgcatttcctcaacatgttaaacatagagttaccacacaatccagcaactctgcaccttggtgtatgctcaagagaattgaaaacctatcyatgcaaaaacccatatacaaatgttcatagcagcattactcctaatacaaaaggtggaaataacccaaatgtctatcaactgatgcattcataaacaaaatgtgataggtatttatacaatagaacactatttggcaataaaaagaaatgaactactcatgcatgctataatatggatgaagcttgtaaatattatgccaactgaaggaatttagtcactaaaagccacacattatgtgattccatttatatgaagtgtccagaataggtgaattcacagacagaaaaattgttggcaggagccaggggagtggggaaggaggaatgacagctaatgagtaggtgatttctttttgggtgatgaaaatgttctggaactaaatagtggttatggttgcacaattctgtgaatatactaaaacccactgaagtttacattttaaaagtctgaattcagtggtgtgtgaattatatctcaaaaatatattataaaaacataagttatcaatataccatatatgctttaaaaacaatagtttccaatattatttttgacttgttcacagttcataatttcaaacatttaattttaaaatatttttgggtctatacagcatgaagaaaattaagaacagggaaacttcactaacagtaaccacatgaaaggaggaccaaattgaagtgctagaattccatgaaatcttatatacacttttatttgcttagcaagctctgctttaaaagataattgaatctaacaatttttcattggtttatagtatacaaactattttcatatataatggtgtctttacttctcgaaataaaatcctgggcccaaccttgacacttcctctccctggcccttttgatcaactcattataatgttttgtttaatgtatctctccaatatctctccagtctgaaatatctgtccatctctccccatcctcactgctaccagcagttcaaggccccagcatgccttccctgattctgcatgggcccccaactgtaccttccttctcataccacctcaattcattgtcatagtaaggatttctttttatgcaaatctgattatgtccctcttttcatcaaatttttcatattgttctgtcactctgaggataaaccccaaatctccagaacggcctgggttcctgggtgcttcccctgtaccttctggcacctgtatgctctccagtttcactggaaaccattctcctccagactctctggaccagccatactggatttcttttcattcagtgaagtgtctcatgcctcaggatctttacatctgctgttccctctgcctggaatgtccgtctgccacttctggctcactctttgtcatcattgaagactcagcttaaatatcatcttctcagggaagcctgcccaccatcttgttccaatttgtgtacctttctatatttcttctcaatgtacctcttttttaaaatcattcattacggtggtaactaattttttttttatgagatgaagttttgctcgtctcccaagctggagtgcagtggcacaatctaagctcactgcaacccctgcctcccgggttcaagcaattctcatgcctcagcctcccaagtagctgggattacaggcatgcgccaccatgcccggctaattttttgtatttttagtagagacagggtttcaccatgttggccaggctggtctcgaacttctgacctcaggtgatccacctgccttggcctcccaaagtgttaggattacaggtgtaagccaccactcccagcctacagtagtaacttttttttttaaatgttaaaggataggaattttctttccctctcctgctcttgctctatagcaagttcctaaacttaactgttactcttcaaatgaatgacactctatgaagaacgtgtctccccactctagtattctttgttttaatttatttaataatttttcctccttgttttcctctctcaaatataatcaccataaaagcatattgatttgtccattgctggattctgagagtctagaacagtatctgatgcacagtaggtactctatgaacacatatcaaatgaataaataaacgaaccctataggacaggcagagcacatagtaatattcaactttatagatggatacaatgaagtttagaggaatgcagtgaagtgtgacttcacttctgcaattagtaaatggctgatccasaactcagacagaggaggtctcacttctaatcctgtgtcttttactaaaatgagattaggactctatttaaataattttaaaactgcaactgttttgcctcacactgtacaagacataagattctgcattggagatggtataataagtgattagatttacctgaaactatttcattgcatgggatcatattagaggtagaggtggaggtgggtttggggctttttttctttctttttttttttttttgtttgtttttgtttttgtttttgagatgggacatgtttatacaataacagtcatataatcaggcttccataagttgagtatattatgattcacagcttatcttatttgtttgtcatctcccttaattatgtatttaattcataaggccaaaatattacatatagaaatagagatggaatgaggagatggagaagaaaagtactctcactaagtatatcttatttggaaagagggattcagtagatgcactagaagaaatgaaatcaggctagcacaagtgattgttcactattgtgtctagcaaaagactgaaggtccgtgttggggctgaaatccaacccatgttctgtttgccacgccctgagccttgraacagagctggatcagaccagaaggaagatttcctctgtgagcaagcacctttccttaatttgcatcaaagtgcccagtgtgtttcagaggtcctggttatgaattttgcatctcagggtttgggcttgttccatcacgtgcttaaaaactacatttgggaaaggaatagggaagatgaatacagatcaagtcctacagtgggaggatgggaccagaccctttaaaactccagagctcatcaaacctagaactcctgataagtcagaagacagcattctcagaggccaaattactaccctcaatcttgttcacagcagttcacattccaattgaaatgggtaggtgacatttctgaggtgggtactacctagaattagttagtttgttttatctcgcattcatatttacatgccatgtccattgagctcactaaatattgttatgttggcttgtgtcagaaattcattgtctagctgggaaatgttgcttattttaaggtgtttacactgccctgacattcactgagcttctgttgcaatgtagataattattgtacacacacaacatctcagcaaagttttgtttgcttgcactcacttctcttgctgaagggccatctggggaaaccacatccctgtttatgcatcattatagttctgtaggctcctgttagacaggttatgcatataagggtgaagtgactatggcaaaacatcttggctctgccactttgtggtgatgaaattgctgatggatcattcgcctcctgagcttcaatttcctcaactaaatctggattctggcatttgtctgacttacctatcatgtagactgtgagggtmaaatgcaagatgtaagaagaaaacttttggaagtgaccaagttttaaaacaagtctaatattagttgtgataggggtaactttcttggaaattatcccttttttccatgtagacaatactgtrtatctttatgttgtgaatcatccccacatgaagtccactgtggagatatttaaatttgaggaacaacaacgttctctggtatacctgaaaactataaaacatgaacttctcaaaaggtatggaatgaaagtattgtgcggttctatttactttgcacctctgctgtgtgctttgtattttttggttcagcaggctttcttaaacttttgttttgaaattgttttgatttttttctaaagctttctaatgattcccatggtgactcttcccagcgcctcactagaaattgccatgttaggtattgaatatgcctatattttcgagcattttgaaagcattttaatcctataaaggtgctcaattaaattcccagctctaattccattctctttaccacggcaactcaatacctactatcggtctctgtttaaacacctacacccttttttggttgtcctagtaggttgtgttctgtgagcctcacccactgggtgttataaccaacctccagatgagccacttctttgtttaattacagctttaaagtagaattttttaaaagyccttgggcacttataaaaattacatttgttaagcattgactatgtgccaggcactatgccagaatacttaatttaacttaattctcacaaagcctttaataataggcatgggtaaactaagacttagagaaggtttgggttagataacttgcccaagttacacaatttgtaagtggcagaaacagggtataaacccagatccatctgaattcaaagctgagctctcaattgcaatgaacatctttcttactgcattcattaaaataacaggcttttcagtggagaggctgcctgtttaaaggctgtagcaaacaataaagaattcatcttttatcaaatgggcttaacattaaaaaactggctccaaaacagtaaattgtttcatgggatagaagaataggaaaagaaaagaaagttcatcttctttcctttgctctctttctcaacatcatgtattaatttctccccacagaatatgggggaaacgagtgcagagcatagaagtaagagaagttgaagttattgaactctgctcctaatgcaccgtatggggttctgaggccatagcggagaacaggacttccacagggttgctgggaaactgtggacaagtcacttaattggtgcctcaatttcttgagcataatggggattctcatttgcctgacttacctaactagtggattgcgaggatcaactgctttagcataggatctcacaggaagagtctcccagaaagtgcagcctgagggcacacctgatatttggccacttcattagggagtacaatcccaggaagcagacttgagaaaccagtgtgaggcaaggaagggagaaggttatgggttgaattttgtgtccccctgccctccccaccccactccccctgccaaaaaatatgttaaaatcccaaccaccacttcctcagaaggcgacactttggaaattgagtcattgcagatgtaattagtaaagataaaatcatgctgaaatagagtacccttaatgcagtagaactggtgtccttgcaagaagacaggcagatatacagggagaatgctatgtgaagatgaatactgacattggagtgatatatctacaagccaaggaatgcctgggactactggaatgccttgctggaagaggcaaggaaggatccttccctagaaccttcagagataacatggccctaccaataacacggttttggattcctagcctccaaaactgcgaggcaatacatttctggtgtttaagccactgagtttgtggttctttgctgtgccagccctaggaaacacatgcagtgagggaggtacagcaaaggcgtcattaagccaaccgctgctaactgactgcttgaaatcatggacttatcctccagtaatcagcgtaagctgcatctcaggacaatctggtcaaggagaaaaagggagaagggtttatccaccagccccatctcctattagtcaaaggtttgcctcaagaggccttcattttcccacattcttggttgttgtgcatgtgcaagtctagttttgtggtatcctatgactcaatgtcaacatgaaatctggaagtgggaggcaagaggcccacagtaggcatgagctgagacactgctaggctgcccctctgggaagtacatcagacctgtgcagaactggttgaartagcagcagctggaacaaggtaggtgaggctatgaggatctaaagaggagcctgagggtacactggcacaggcattgataagcacttacaagggggcataacagagagctacagaaacaaattgtgaggcagtttaacctaatttatgatgtcaggcaatactttttggagtaaagaatgcttaagctgagatacaaaaggtgagtagccgagtgaccttgggaaagtcattatatgtcaaaacttcaaagtatttcctgattcacccaaattttcctccctaaaatttaatctaaaaatgtttaagcattattttttcaagtcactttttttttcttttcaaaaataaaaatgactttatttttcttacggattgtaagaataagacttgctctattttaaaatgtcaatgatattgaagaacgtaagaaagaatatcacccataattccatctactcagagaaaatataaaggtccagatgaactgggttatgctatgataacaggacagcaaaaccctaacatcttggtggctcaaaactgccaaggtttgttatgttttttcatgcatgctatgtatccagtgtaggtgatttagggactcagtttcatattatcctcattaagggccctaggaggaccacagtctctatcatcataaaagttgctcattactgtggaaacatgagggaaacatggtgaagcaagcagtggttcttaaaatcttccatccacaagccactcacctcatttcatttcatttcattggccaaagcaagtcacatggctgtgcctaactgcaaggggatggggaagtgtaattcctgaaggaggataaccatagctatcagtgaactgcactacaactgtcacagataaccatgatcaacatttacaagtcaacagattttggggtttgagatttatttgtgaatttatttcttttcactgatttctgtgaaagagaagagtaagaaaataacaaatggctaaagaaaacccatcagggcaatgcagaatcatgattttctgtggaattccttaatccatactagttcatgtatcctttttcaaattgatgaacgtattagtctatgtagagatgagtgattttgacaaggataaaggatatttaaatacctcatgggtctctttttccacctccctttcactttagtgtgaatgacattgtggttcttggaccagaacagttctatgmcaccagagaccactattttaccaactccctcctgtcattttttgagatgatcttggatcttcgctggacttatgttcttttctacagcccaagggaggttaaagtggtggccaaaggattttgtagtgccaatgggatcacagtctcagcagaccagaagtaagctcttttgtgtatttttctatcctttgcccttgacattttcgtggactcctttccttacgaggaagttacttccttacttaggcttacgtagtgaatatatgtgtggagggatcagttgtggccagggttcacactaaatctgtcatcctaagcaatccatttgtttccttggactttaggttcttcccagttaaaggagggatgtggacttaaggatataaggacctcattccaaatttttacataactcttgaaacacaytttcctaacacactacaaaggaagataaatgagcaatacccctgccccttatgaaagtacaaagtatttgaccacttatgctaagttcagttacacaaaagctcttaggagagagggaaggctaccttagattgggcatagggattgtataagtttcagacctactgacttacaacagcagaccattcaatgagaaaaccctattttaaacagcatgaaattttatgagaaaacacttttaaaaagtgtttaaaaattggaggtttttttataaacagaagtaccttgaatattaacatgtatatttgagataatgagcaaagatgatccctgtagaaaacacctctcagtgtccttcctcttttaaaatattgtgattgagctttatggtcatttgatactttttttcaagcactagtttttagaagtatatacacttytggccttgtaagagatccacttaccttcattcaatttaaggaaaaagttgtgacttcgaagtaataagattgagcctatatatgtcatctagaaacaccagtttcattatagtcataactcatattcaaagcctgtttaaagcacttcaagaatattaaaaatactaccccattatcttcttttactgtggtttagaaaaggattgcagtggtactttcaaggrgtgtgcatttttatacctcttctccaaaataaaagtgagtgttgtctctcattaccacttgcttaagtgtaaatgtcatttacttcaaaggtatgtctatgtagctgatgtagcagctaagaacattcacataatggaaaaacatgataactgggatttaactcaactgaaggtaagagtaccctgtctggcccacacaatctgacttcttaccttagtcccatacttgacccaggaatgtgccccttgaatgaggaaaacatggctatttgagagcaatgccagtgagattatgcatgcgtttctaaaatacagaagcaaagccccctaaaaacaccaactttaggtgccagaagaagctgtaggggttgtggggatgaatagggaagaaagcgaggaatcattgagacaatgtcttcactactccctctttgttgtaaggtgatacagttgggcaccttagtggataacctgactgtcgatcctgccacaggagacattttggcaggatgccatcctaatcctatgaagctactgaactataaccctgaggaccctccaggatcagaagtaagttcctatacctctctgagctcacaggcaaagctgcargaacaaatttgttggggtgacttggaagaatttaagccagtcacatttggtgttatagaactaaagaaattttacgtatgagaaaagtaaagtttttgacaggtagggagataaggttcgttaactcttttaggccaccattaacttttcaataactcttgctgttgggaataatggaaaaacataagctcgattattcatattgacccagattgccatatcgtatttccaatcaggagatagtctctgagcaggtaggtcttgcagttagacaaagagagagttgtatatggtaccatcttctttcacactgtccaacatgaagctaagattaaaggatttaaataactgtcgcctcaaaataaaatgagtttttgcctgtaagttctaacatatacgatggtgttgaaaattgtcttattttcaagatatcatttgtgttattttaaaatatctcttctaaaacaatagcataatccattgaattttctacattaaaaacaacattataagacaactgcattttctatggcattaaggttaacaatttaaaaatctttagtgaatttatatatagctataaattctaggcacacatactcagagatttattcacaaaaatttattgagtacctgtaatgtgtcagacattgtacttatgtttaggatatatcagaaaaaatatacagagatccctgatcttaagaaagggggacaaacaatgaacaataagcataagaaataagtaaattacatagtaactttgaagatggcaaattttatgggaaaaaaggctcagcagagtaaaggggatcaggattactatatgcagcaggatgagcaggtcctactactaaagtcagagatsagagtaggcctcattgagaaagtacaatttgaaaaaaattaaaatgtgtgaatccacatttggtgatttgagaaactgaaattcaaattcaaacccagtaattggcctagtgggtaaattaggacatacagttatttctacttccagtattgctgtctttcagttaaaaatatgattatttctttttttattaatgtattagtcacagcttcttaaaaagaacacaagaaatgtaaaaagaaacaaaagtccaacctaagcctagaaccagaattgttaccctaaactaggaagcaatccttgcctcagatatgtacccctaagagtgatagacaaaactttcctttaaaagcccaaccacaatgtctgtcttaaggaaatgaaatatgatacataggattattggagaattgtttaggatctttttcgtatctctattttcaagttgaattatttttaaaattttagataagactttttgtcacaattactgacaccctttaattttggttgaatctcatgttttgtacatgaaatcaaagcttaagtatttttgtctaacaaacctgagatgaaggatctcccttaagataaaaaaaagaacaaactctgttctaataagagatatcaatatagactcgtaactcataaatttctaattgttttcctttaattccaaaataaaaattttattttattttgtttgagtgaacttcatccagcctatttggaagcctgagtgcttaaatatacactgattagcaaagttaagtgtattaatcctgggatcaataacagtactaggcagtgatgtgtcaaatgaaattccaaagtagtatccattatttatgctttctagcaactttgcagatgtgaaggggctccagctgtgatgactgccatcccatcagttaccatgttgggttggctggataactgggtgtttcttcattattttgtcttgtttctctccccatactgtaatctcaaaggcaagattcttcccacagagggaggaccaccatccacttgagaactaaataagagcatcttaactccttctgtaagggatgcctgcactaaaaaaattrtgtaagtcatccctgaggaatttggctaatgtcagaaagccagttcactttggtgcatagatatctatgacattagtactttcatcagaagaagaacaatttattgaagatatacagattttagcttctgatttctgaaaaatagatttatcctagaatgtttgggaaggacatcatgaaacaggtgtttactcacataatatactaataaacgatcttttctcgacaggtacttcgcatccagaatgttttgtctgagaagcccagggtgagcaccgtgtatgccaacaatggctctgtgcttcagggcacctctgtggcttctgtgtaccatgggaaaattctcataggcaccgtatttcacaaaactctgtactgtgagctctagactctagatagtaaaaaaaaaaaaaaaaagtctacatattttgtaaaagtaaactgataattgtatgataagtggcactgtaagtaaatagcaaacaccaaccagtgagtgtggcttttcttatggatagaagtaaaggagcagacagagattccttgatagccatcaaattgcaagtcaggttaatgacagtccaacaagaagccaaactttacggatctttgttagcagccccaatgttctttctacaataaaacatgtggactatgtccagtgaggtctccgactcacctagaggtccttggtaactgggtccaagtttcctcctacagttttgacgttctgggtctcctacagtccagaccaagagaaaagctaatgttcaagtatttacaacccctgttctctccccgcagttgtgctgggcacagacagttaattaagtgtaccagtctgcagataaagaattagcatcatgtgattgcccaaagcccttagaacttgcattctcccagggtaccgacacataggaaattgggttctgagaaatctgacagttgggcctcagaggctaccttagggcagggagtgcttatctctaataggcccttatttgtattgatgcttgtatctgaaatacagttggccctctgtaactgtgagttctacatctatggattcaaccaaccagagattgaaaatatttggaaaaaaatggatggttgcatccgtactgaacatgtacagactttttttggtcattaatccctaaacaacacagtataacacatatttacataatatttagatgatattaggtattataagtgatctagagagtacctacataggggaatgaacataggttatatgcaaatactatgccattttatatcagggacttgagcatccgtggatgttggtatccatcagagtccaggaatcaatcctccatggttattgagggacaactgttttgctaacctactgggctctgaatcttagatgaagccttaaggcagttatctttgactgcctttatcttacccttctggtttattcaataaacagttattaagcaacctccagtaaatttggccctaaggaatctgaaatgagtagaatggttctggcctaatgtcctatcttgaagaccaaccttaaacttaatttgatgagaatgaatagaagtgtccttttttggtcccaaaccagtacaacctttagcaaacaaaccattaattaaagtcagagcacccaagcacctcccttccctttttgtgacttttattcgggagtggttggttgatgctttttctcttttggggagaccattttatatgcaaaagaacattgctcagttttatgtaggtttgctgaaaagttttgcagggtaaaattctccttttttccagtgtaacccattgtgattttgactataagactttgtagttttcattgcttcaaagaggaataaacattcagcagaatgctatagtcagttattagattttaaatttcaaaagcctagctatcaagagaacacagaataaaaaagacattaaagacataatttaagaaaataagtagagtcagttttgaagaatataatagtctttgttttagtccctagccctcatacttactatattataatgtttaccagactaggggagaataaagagagataggaaaagacaaagataatttagatgctggtaagttcctgagaattgatcctgctctgccttctcctcaggccaagttagaaaggctgggggataaaactttcctcaggaaatttgggtgatctgattgctgagggactaatgtgtcctttccctgggagggcctgggaaagtcacaaagccttagggattctctgtgctcagcctgatgaaaaaacagagaagaaatgctagtgtgatttactggggatggcatcacacctacacttgaacttggcacagaagcaaattcccacgtgcccagaggggtatgggggttagcagagaaagaactgatagacttaaaaaggtcttgctgtcaggaaaaagaaaataagtagtcatctgattcaaatgaagaccgaagtttagacggtgacatcaaagaccagctgtctcccatgatgctttagctctccctgctggattttagagaaaactcccaggattgggagggggctttggaattgccttatatattgatttgtgcttccaaacaatgtgtggggagtcaaaaacaaaattacatgaggctgtggaaaaaataagttctgttacacttcatggttttagctttttcagaattggaacaggataragtggaaagaacttagtcttttgctaatggacatgtgattagtatcttttattccttgttctgtggctaagaccaatggactattaagttggttttctcctggaaatgccagtggaagatccagcataatctcttttacacttcacccctgctcttgctccaagtaggtcagtctcaaccttcagctactgggatcccctcactcagtgtgtcctctctttgggagaggccttggcaaagtggttgaagcttggattcctcctggagtaggcaatttacccattctttccaaaggatagggttgttgattgtcccattatcatcctctctttgccttgtcatctcccttcaataagttttttctccccttcatagggaggcacaggtttaccaacaggcctgcagcctagacagttatctcaaccaattttccctttgcataagcacccccaatctttatgtgattatcttgagcctcttcactcacttggcttgggaaggagaagaatcgctcctcacaataaatgctgcattttgataattcattctcttctcttccctagtctttctgcttaattatcagagacatgaattgggaatacaagggtgagggttagaggtagatgaactcttccaggagccacaagcaagctttggttgtgatatttgacttcaagtattttcagcaattttcagaatgtggggtacttggtgctttgttgtttttatctttgagcccttcgatgctgattctataatcacagaaaaattctcattctrtattcctttggcatcaaacaggttttagtttcaggtagcagaaaccactctatctagtttttggggaaagtgatcaaatgcaggaactaatgcttcacaaaatgctggggtatttcctttgcgtttggaaataagacaaagattctctattttaccatgactgttgtttaacataggattggaagtcctgaccaatgctataagataagaaaaagaaataggctgggcacagtggctgacacttgtaatcccagcactttgggaggctaaagagggcagattgcttaagtctaggagttccacaccagtctgggcaacatggcaaaatcccatctctactaaaaatacaaaaaattaaccagcatggtggcacattcttgtagtcccagctacttgggaggctgaggtgtgaggatcacttgatcccagaaggtcaaggctgcagtgagctgtgatcacaccactgcactccagtctgggcaacagagagagaccctcactcaaaaaacaaaagaaaaataaattagaactgtaagaattgtaagggtagaaatagaactattattgtttgtagattacataatcatctacttgaaaataaaacaatagaaccaagagatataccattaggatactcaacagtgttgcctgatacaagctaaataataacatttaatagcaatgacaattatgaatttgaatcatagagaagatagcactcacaatagcaagaaaatctatacagcatctaagaaataaatatgttaactggccgggcacggtggctcacgcctgtaatcccaacactttgggaggccgaggcgggtggatcacgaggtcaggagatcgagaccatcctggctaacacggtgaaaccccgtctctactaaatatacaaaaaattagctgggcgtagtggcaggcgactgtattcccagctactcgggaggctgargcaggagaatggcgggaacccagggggcagagcttgcagtgagccaagatcgcgccattgcactccagccggggtgacagagcgagactccgtctcaaaaaaaaaaaaaagttaaccaagagtacacaagacctctgtggagaaaatgttcaaactctaataaaaggtctagaaaatattttgaatatgtagatacatattctaggctcctggataaggtgaacttataaggatataaattctctccaaattaatcagtaaattcaaagtctagtagaattcttttaaataaatgacataaacttatttatatcttaaagggacaactttgatttctagcaatacaacaggctaaataattcagaacaaaacagcctaatataaacaacaaaagataatagagaaaatatttttgaaagcatcaaatatcacacaagataatatagaatcagcaaatcataatttaaaggaaagcagaaatccagaaaggtaagcaggattgaattcggtcttgtcctgagggcatcctaactgattgatcttgtgctttgggttttaatgtctcagagggcaaggggaacagaagccaaatcacagttcatcctaaaatgaggagtctaataagggaccaacacctataaaaccaaaaccctctgaccccaaagggctaaatattcctctaaggttgaaataaatataaatctgttcaatatttcgactcccagaaacctaaaaagaaaattgtcttgggactgagaaaagtaaaataaatacatttaatattgctgattaatttaatattgatgaaataaattcaagattgttgttgatatccatctgcttatcatcactcagattttgagccaaattcccactgattgaacggaaaaaaaaaaaaaaaactcaagctgtaaatttagtataaagtcataccatatttgtagtatatttactcacctggcagaaacaaacacatatcctctctggattttatcctagatcttaagaaacctaacaaataattatctaagcaatgagcaacaaatcatagtaaataaataaataaataaataaccaaagaaacagagcaggagaaacaaaagccagcagaaacaagtgatggcagaaacagacttgcagagaccccaaatacagaaatgatcaaatagaggctcaataactatacttacagagtttaaagaaataaaagacaattttaaacccagggtacagtaaattgtataaaaaaattgcaacagatttgaaaaatataaaattgaactttcagaaatgaaaatctagtaatagaaatttaaaacttaatgagtagccaggaaacattttattattgaggtatagcagcttaaaaattgttcacatatacatttataaagggtctcacaatctgagggaaacattttccactttttaatttcaaagcacacaaaaagtgttactccattggaaaggctatgaggatgacttctaatcttcgggactcaaatgcctcgggatagtcactcaaagcctttttttttttttttttttttttttttttttgagacaggatttctctctgtcacccaggctggagtgcaatggcatgatcatggctcactgcagctttgacctcctgggcttaagcaatccccctacctgagcagctgggactgcaggcgtgcaccaccacacccagttaattttttttttttaatagatagggtttccccacattgcccaggctagtctcaaacccctgggttcaagcaatctacttgcctcagcctcccaaagtgctgggattacaggcatcagccactgcacctggccccacacaaagcctctaaatacaccctcttaaggtagatgactagtgaggtcatgtaggttgcaaataaagacaggccaaaacatgctcaggctcagataaagttatgggttatgtgatacatgtggctaattattggaaagggggaaagggacctgaattcattcttaagtttttgaggtcagtttttcggaaacagtgtggggttgtgtcaaggacattagggagcaaaaaaaaaaaagaaaagaaaatgagagacagaaacaaaaacctttaatgggtgaatttaacaggaaatgtagcagatctgaagagataattaatgaaatgaaaaatagttcatgggagattatattcagtataacacggaaaaactgagagaggaaactctaaaaaagacatggaggctaaaagtgagaagatctagcataggacaaattggatccccagaaggaaaggaaaaaaagaaaagagttgggtagagaaaatattttaatcatgctgagacttagaaattcatacctagccatatcttggtgaaactgcagagcatcaaacacaaagactttaaaaggagccaagggtgggaagaactatattgttcaatcaaaatagactttaaaagtaaaagtattaccatggatagaagggaccacccagaagatagagtgattttaagtgtacatgttccttctaatacaaccttaaaatatacacagcaaaaatttgctgaactactacaagaaaaatacaaacagtcgtactgtcatcatgattgattttaacttggcattcattgtttattggtagaactagcaaaatttttttaaaaagattagtgagaatagagagtacctaaaacacacaatttgcaaacttaacctaataggattatatagaaccttgtgccaagtaattgcagatacacattatttcaagctcacaaggagcatctacaaaaattgactatatacctggctgtcaagcgagtcttgataatagtatatattgtctgactacaatgcaatcaagcttagactcaattttttaaaaacctagaaaatttgcatgttgaaaaattatgtaacatttctaaataatctgcgagtcaaaaaagaaaaagaagtaaaatggaaataagaaagtgattttaattgaataataaaaattttccaacagataaaatcttataggaaacagctaaaattaaatttaagtaaaatttatactcttaaatgagtacaatagaaaagaggaaaaactgatattaaagaggtaatatcatccttttgttgatagaagaaaacagcaaagtaagaccaaagaaagttcaagaagggaaatagtaaacatcagagcaaaaactaacatagtagatagctctaggattgttagcagtggtggatccatatgggtctgcagcaacttgattcttgcctcctcaaaggaaataatttacctaaggggtataaggtagagtgagagaccaaggcaagtttttgaacaggaatgagagcaggagtgaaaggaagaaagtatacttggaagagggccaagcgggcaacttaagagatccaagtgcctcatccaacccttcacttggggtttttatacattggcctggttctgaggtttgcatctctccttccttgatttttccttaaggtgggatttccacatgtgcagtggcctgccagcacttgggaggggctgcatatgcaatgtgtttattgaagttttgtgtgtgctcacttgaggcatttttcccttaccagttgagcattcctagaggaaggtcatataccagttaaactccaccattttgcctcttagtatgcatgctcgggcccactcacccaactcctgagaccttatcgggaagctgctgatcttgtttcaggtgttttctatctgttgggagcctgcctgtccctggcatcagctgcaaccaattactattttagtgagacagcttaacaatcacctggccatcacctgatcatctgatggttgcctgagattcatggaagcagcggcggggtgggtgcctcttttgccctgttcatgtctgccaaactacctactctaacattcccgacccaattctttgggaaaatggacaaaggtcagtcttctgtaactgcttcctgctgacagaaggacggtgatgattgttctgtgggtcttggcgtcttgctgtcagggcagggtggctttgtgggttggtgaaagtggtatccagcaaggtccaagggagacaggggcaggatttcgcttctttcatgtctcactgatgggcagtctagtggtcctctgtagaagtgtgactcttgaatattgagacgatggtatctctcactgaggatcatctgaagcttgatggcctgaaggtgtgaggagacaaatcgggttgctagatttagaagacatggcccaaaacggagcaaaagtaggagactaacaagtgggcctaaaaggggaataactcaggagaagcattttcagcttccttcccaatctaaccaaccctgagaggcttgttccagtaaactggaggctcaatttaggagttgtctgatattgtacttttcctgattgattgacccataagcaaaatttttcacctaaggctaaacaagtttctctctgtgctgctgttaacttgtctaactcctgataattttggaggactatagctgccaaagagtcaatttgttcttgcacagttgttaaggttttagccgtagcatcaatgttcttggctatttcccttgagggctggctatgggtcaaggaggcttttgtgattctagcaattctggttcccatactggctataataccaagtcctgtgagaaggagaattaattggatagccctcctcatcctggaaaagatggaatgcctgtagattggtgctggaagagagagattgccagggactatgaagatgtctagggatacatagcctatggtacaagttccagtccggttagtggggaggcactggtgaactggctggccacaaatatagaaggctccttgggttttaagataagtagagatgtaaaaatgaaacaagggggtgaggacagctccaagaaatgccaaggctgccaacacacccaggtagctggtggctatagtcatgcctgctaagacttatgtgcatgggctttggttctgtttagttcccttggttttattttcctaaaaaagagaattttgagtctggtccaatagaacccattcttctgtagaaatgagattggcaatttgcaggcattggttgtatcagcaggccggaaccagaaattttgaatactgcaggagcttgggtgtccctggcaaaactgggtggatttatccagcaaagttcccagaggaaaggtaatatttgaaggtttgggaaatcttgtgtgatggtagaattagttgtgggtgtacgtttggcaagttcgttggttaggatctacagtgagagtaacattgctaactgtactggaaagagccccaacatccattccatttttcttattggccgtaatgcaaataggggctagtcccattaaagtggtattagaaaagatggatccaaaattgggaggttctttgcagatatcagggaaatcttgctttacttttgcaagaaggctatttgcaggcccaaacatctcccattagcctcccattgatagaaaatatgcagttctgcctttatacttgtccaatctcttggtgaggctgaataagctctccctgccgttttagcagaagagctggtacataaccagcaattggtggagtaaggggatcctgtgctttggagcagttactgagctttttccaataatgggaaatcaggatggtagtgtcctgctagtaaaggggtgagattgagaaccaactggagcaggcccatagcaacctaaggtgactgtgaagagagaaactggtcacaaagaaagctgccactggaaggcctagtggtgtacaagttagggttaaaatagtgataataatcagagcaattgcaagtaagatttctaatattaagatcatcttactctgaagagaaaggatgttgaggggcattacttatcttttcacttaaagaggaatcacagattttccagtgcctctcaagtgtgttctggagctgagggcattgcttccagatctggtgttttggagcctttccatggcttcactcaggtgtgatgtatccaactgacaatctctgatactttaatggctctaagggtgaagaggccccttcggactggagttagttgggaattcagagttccatctctccaagctttaataagaactagtgagcctggaggatacagaggctggtatttttccccttctgattttggctttctttgtaaccaaaattcctggagagcctgttggaaacctgctaaagaagagacacagtaggtgattttggcagttttttcatctagcattaagtctgaatataggaatggcttaccatataaggcctcaaaggggattaattgcaagggagtctgaggggcaatatggatccaaagtggggctaagagtaagaggtccacccatggctgtgctgttttctgacagagtttattgagtatgtgttcgagggtttctttagttctttccacttttcctgaaggttgtgatcaccaggcaaagtgaaggtacatttatgcttactaacggccctactaacctgttgagttacttaggaaataaaggatggaccattgtcactttgcaatgacctgggtagctcaaaccaggaaatgcrttcctttaggaggaatttagctacctcctgtgccttctcagtctttgtggagcaggcttctacccattttgtgaaggtatctacacagaccaagaggtacttttacctgaagcctgcagggagatgagtgaagtccatttgccagtcctccccagggtatgtacttctcctctggattggacttattaatggagggggcttccctctctgggaattatttatggtacatagggtataggcttgacaaacctgttgaatggttttgtttagtcccttcccactgaacacttatttacaaatttgtcctagactgtcctttgcaaggtggaagaagttgtaaaaactcttaatgactttccattgggaggttccatttttggacccatcttttctaatatcactttaatgggaatagcccctatttgcattatggctgagaagaaaaatggaatagatataggggctcttcccagtacggtttgcagtgtgactctcactgtagaccctaaccaacaaacttaccaaacatacacccacaaccaattctgccatcaaccaagattccccacacttttctccatctacctgccaatttcttcatctctcctccaatttctccatctacctcccaatggaaagcttttccctgggaggctttccattgggaggtagatggaaaaattcttccaatctgtaccatccactggtttcttctttatacccatgttggctggaccaatctatttcttccttagtgtattggagaaagggcagttcactggggagagagaggaacaagtctcccatgaaggtatcatttgacatggctgcctcttcagcatttttgtcagctaacctgtttccccatgtagtttaatagaagcccctgtggtgtccttcacaatgctctactgccacttcctggggcaaatgagcagcctccagtagctctaagacttgagacccatacttaataggagcatcctgagctgttaggtaccttctttccttccagatagccatgtgggcatgaagcaccaagaaggcatatttggaatctgtatagatggttattctttttctttcccctagttttagggctctggttagtgtgatgaattcggctagttgcactgaggtccctggggacagagctttagtctctacaacttggtgatgggactctgtagcataccctgcatatctagttccatccctgacgaagctackgccatctgaaaaccatattttgtctggattatctatgggctgatcctttaagtcttcccagctggcataaattttgttaagaatctcacagcatgaatatgttgagttatcatctcctggtagtggcagtaagagggctgggttaatggtggaacactgctcaactgttacctgtgggttttccaacaacaagacttggtactttatcaatgtgttgtcagtgagccattatggtccttttaaattcaataaagggtctatttggtgggacattaggagccagattgattgtcccattgtgataytgaagtcctcctcgagaataagggctgctgtacccactaccttgaggcaatgtggccaccattgtgctgctgggtctaggttctttgaaaartaacctacagcatgtttgactggcccaaaggtttcagttagaactcctagtgctataccttgccttttcagtgatgaaaaactgaaatggtttggttagtatgggtagctcaagggctggggcttgtgagagggcagtttttaactacctaaaggcttgctcctgattcttttcccagagattgtgtccctattagtcccttcttttaaagcctgatataaggatttaataattccaccacattccagtatccaaagtctgcagtatcttgtgatccccagaaaagctcaaaattgcttttgggtggttggtgtagtattctaaggattgcctgtatctattctgcagaaagcttgtgttctttgaggctcatgattatccccaggtattggattgcttgtcttagtagctgtgtcttggccttggacactttgtaccttctgtctgcaaggaaatttagatgttggattcctaactctcttgttggggagcagattaacaggtcatccatgtactgtaggagatgccctcccatataaagacttaggtcctgcaaatatctagccaaggcttgcccaaacaaatggggactatctctgaaaccttgtggaagcactgtccaggtgagctgttaacttcttcctttttcattctccaactccaatacaaatataaattgggaggatgggtctagggggatacagaagaaatttttgaagtctaagaccgaaaaccactgagcatctggaaatcttctagaattacataaaggttggggaccattgggtgtattcggactactgcctcatttatgactcacagattctggactaacctgtattctccgttagtctttttaacagttaagataggggtgttatagggtgagttacaggatattaatccatgtgttagaaatttttaaatcaggggctgaagtccctctttggcctccaactgaagaggaaactgccctctgcaaggataactagaaggatccttgagctgaattgctataggcatggccattacagcctttcctggtattcctggggcccagacctctggattaattggaaggtctgtgggcagttcatccttgtgtgtggtttccttgaggaataagattgcatttggaaaagggggtgttggccctggaggaaaggttaactgaactcctagtctaaacaaaatgtctctacccaaaagaggcataggacattctggcatcactaaaaatgaatgagaaaataccatttatccccacaggcagcaccaagaaggagcaaacctctatattatgggcaccccatttacccccattgcctggcaggatttgaggataattgcccagaaaaagaggtaagcactgagcaggcagctcctttgtccaaaagaaaccttacagtcatacctgccgtgtccaaagcagcccttagcttcatcccctcaatagtgatgttcaatccaggagctggccagaccatagggccccttcagctcaaggtcatcaggggttgggattctgtcccaggggccctttggccctcagagaagtctcagatccagtggctgagcttgtggcagaggggcaagccatgcggggctttttcccatctgctccactggggctgtttgccttccagtggcctgacttctcacaccaatgtcagttatctgggagggttgtctgagggcaacctggagggggctaatggacccgtagagcagccaatagttggagctccctcttttcctttcacttctccttttcctgaacactttcctcttcctcctggtcctggttgtaaaagactgaggaagctattttgagggtgtcaggcataggggtgttgggacccagtgctagtttctggagtttcttccaaatcatctggggctgcctgagttaggaartggtcctttaggaccagttgcccttctggtgtctctgggtctaggttagtatatctcattagggcctcttgtagcctccctaggaaagcagaggaggtttcaagaaggccttgatctattaaggccaatttattgtagttcacaggctttgttctgctagctttcattccttctaccagatagaggaatatgtggttccttgtccacatgccccactaggtattgtaatcccaaaagaggtccacctgagaaactgttgtgccccctacccgcccccacccccagagtaggcaccagggtcagtcatatgcattgcatttgcaaattattgggccacttccttaatggagtcacgttctcccttagacagagtttgccctagtatgactgagaggtccctccaggtgagtttaaatgttaagcctaccttgtggaaccctttcatgtatttgtcagggtcttccataaacttacctagttccattttaatttggctcaggtattgcatagtgaatggagtttggaccctagtggctctactggggctgctaacctcttgaagcggcataacttaagggggtggtgtccagaggatggccctggttagggaaggaaatgagccagggctgggagacttggatataatagggtagaaggggagtttgagctaagctctgcccttggtttctctggggcttgagccctggataaacacaataatggtctcccaaaccaaccagagggggctgcctgactgtggctgctatcattgctggatccattttacaagcctgacaaaggtcagggttgtttcttaggactatgaaggcctgtacataggagatttttgcccaatttccctgctgccagcaaaacaaatccagtcaatagatcatattaaaatttatgatctcattttctggccaagattcctggtccctgagcttggattcaacccaggctatattacagaaaaatgttagccttttcttttttagagtttgggggtcaaacttttcccagttcttgaggatgcatctaggggtgtgtcctgtcatatggagaggcaattacccatctgtgaagagagaacagaggagaaaaaaagaaaaaaagaatgcattccctcttattcccctatcatcctttcctaaacattgcatcccccaattcgtccttacagttccaaaataaaccagtctcaccaagtacccctaaccttggtcccatctcatcatgattacccacttgagaacaaaggagatactggagtaaacagggggccccttcttcatccttggggtccagaatgaactggtcttattgggaacccctaaccttgctttccttcatccctattctaatggtaatctgtgcctatagcttgggaccagccttcatctctgtcctatgagtacttttgtctgttgtgcctgaagccttgggctggctcatatctgtctctatgaccttatggtgacctcacttggagcattctagcaacaaaatgattatttcttttctgatattcctattttggggggcataaaatttgaataaactttaatgaaaaaggcaaattaaatgtaaaaacattgaaattattcttcaggctttcaaagaagttgttgggttttttaaaattatactttaagttctggggtacatgtacagaatgttcaggtttgttacataggtatacatgtgccatggtggtttggtgcacccatcaacccatcatctacattaggtatttctcctaatgctatccctcccctagtctccaccccctgacaggccccggtgtgtgatgttccccgccctgtgtccatgtgttctcattgttcagctcccacttatgagtgagaatatgcagtgtttgattttctgttcctgtgttagtttgctgagaatgatgtgctttaagtagacgggaagactggttctcagccaacggctgcaaggggttggactttcctcccttcaaatatggccttgaaggtccttatacctattgagaagaatctggaagtgatcagaagaatggggaaaattttgtatttggggttccttatcctcccggggtaacatggagaacaaatgcttcaacaggcaagataatccctctgctacaggaggaaatgggaagaagcaagaagaattcccacggaaagccttcatgtgcttgcaaaaccagcagcccttggattcaaaagggcagcattttttgccttcttaacataaaggaggaatctccagaggacttggggcttggaagaataagggtttgcaaatggcaaaggaagaattttccttcctccctaaggattgcttactcaaaaaaaaaaaaaaaaaaaargtgggggggcagtggtagtaggtggggtccttaaaaagccacagagtgagatcctatgcagtggataaacagcatcaaaagacaccaaaaaacttggccctggagcatagcataaacgaaatgcatatggtaagtcataaggagctggcaragtcagggttctggtaagtgtctgtcctaraaatgagccaacagacatccacaaggaagcccatttctttgctgctatgcaaacagcaagagcttcaggcatataaataacaaactgggagtgtgtgtttaaggcagagtaggaagtcgtgtggcatgcaaagtgaaagcggggaaaaggcagacttgccccctggtgggtacgcaagaccatttcagaattcacagagagaaaacagaataggtggtgttggttttaggaaaaaagccaattttagtaggaaaaagagaggaaaccccagacattgcacagtcttaggctttagccctacccctctcatgagcctcctatccaggagagctgttattgtctcaggtctacttggtgcagtctccaaggttttattcacccctgtgagccaccatcagggccagctgagagatcagctatggggaccagagctactgtgactgagaggaaccattttgggggttagttaataagcaggagaatgaaaggggagaaggaaaccatgtatgggtatgggggttggatgcctccagcctaagaaggcaaggcatagagatgtcttaccagtagagaatatatccaagtcatggtagcaaagtatttttgcactggcaaatctgtacagctctacaacagctcaattcttgcctcctcaaaggaaagaattcatcttacttgtataaggcagagtgagagactgaggcaagttttttagcaggagtgagagtttatttaagttttagagcaggaatgaaaggaagtaaagtacacttggaagagggtcaagtgggtgacttaagagatccaaatgcctcatgtgacctttgacttggggttttaatacattggtatgattctggggtttgcatttcttctcccctgattcttcccttggggtaggctgtccacatgcacagtggcctgccagcacttgggaggggccgcatgtgcagtgtgtttactgaagttgttcacatgctcacttgaggtgtttttcccttaccaatcgagtggcaggttatataccagttaaactctgccattttacctcttagtgcgcatgcttggacccactcacccaagccaagatcctgagatcttatcaggaagctgctgatcaccagcttcaggtagtttctatctattgggagactggctttctctggtgccagctgcatccaattattattttagtgagacagtttaataaccacctgaccatcacctcatggtcacctgacattcctggtggtgggcagtgggagggggaggctctccttccctgcacatgtctgcctaactacctactctaaccccaataccggaatcccaacatgaaccccaacatcctcacttcctggtattcatgcccttgcatatccccctacaacatcaaatagggctgacctgtttaaccaataggatactctagaaatgatgatgtgtgattgtcaaggtcagatcatacaataacgctaccatttccaccttgctcccagaaagaatgtgttatgataaacatttctgattatttttagctgctaagttccaaagtaatttgctacgataaccagtacaattaatgaaatagaaaatgaacatataatggagtgattcaacaaaccttaaaagttcattctttaaaaagattgataaaaactaatacccctgtgatgagacaatgaagaaaaataatggctcaaatatccaattttagaaatgaaaactaaaacatgtagatgctatagacagagagggaaagaggagtcaatgaatcattttatgccaacaaatttgaaaatttaatgaaatggacaaacttctagaaaaaatatatcatactctattaattagggtaagacgaaattactataacacatagaacagaaatatagtagcttaaaaatcatggatgtttatttctctctcatctaacagttcttgtgagagttattagtaggggagtttctcttgagggggtcattcagagaccccactcatcaaatccttcaggaaagagaaggcacactcagaacggctattgagggaagttctttaaggggactattgatgtaaggatgggaaaactaagggaaattaacaagacacaatacaatactccagtgctagcaatgggatagaagaggtggggtgaggggaaggccaggagctcttaccatctctaggtttgaaggaataaggagtggaagcagatactggcacaagaagagggtagacaaagtggagactctcccagtagatgctgtggccattggtagaaggatgaagccaacctgtgacagctcagcacagagggcatggagggaatagatatcctgacttaacttattccaccctttgaactagaagccagaaggcaagggagctattggtggagttcataatgcctccagggacggagcattgagggggctgcatagagagtgaatcttgagcagtgagtggctctttcatattgctaaccattcctaggtgactgcggttatctgcatggttgaatctaggtcactactgtgtctgtgttctgtcaaagtggaagaagaaagactagagggaatgtaaagaagtacccaatgtcttaaggcccaggaccagcaatggtactcagcacttcaaattcccttctaatggtaaaatctagccacctggccatacccaactaattgcaaaaaagaaatgggtaatgtcaaatgactggagagacatgttcaaggaaaaagaaaataaattttagtgagcaattagcaatctgtgcctgccatttggccaccaaatagccatctgcacccttctctcacacattgactccctcatccctcaccaagggataaaaccccaacccccatccaatttctgcacccacttcaaagtacagtatctccaggtgatgttctgacctccacgttaggtccactagggctgcatgaggaaggctagaaaacaaaattattatccaccaacacatctagattacaatctagagtgtgatcagagtaactataataagcagtcttaggaaaagaaaggaagaagggaatacacttaatagtcactgaaaagttgtttcttttcttttcacattgcatagcaatgagattattattccaccagagaggaagtgagatggtcccctgtcctgaccatggtgtacttccccatgttctttatgatttcaaattttgccctttggaaattcttcctagtctgttatgctttaaggccacctctgaagtgggtcttgaaaagaccatgtaattttagtatccatttcctacaggtataggtctgagagtctgaggacattttcaggccatgcttctggttgcttttgaaatatcaataccttagaaacttgataggcttctgggtctgtttggttccatgtgccagcaatgtcacccagatttcatttcagagcatggtgttaaagccaactttacttcctggttaccatgacccatttccctctctcatttaaatgctgtctcttttgaggccatcagaatatatgggcaagaagaagcaacacctttaatataatctcccatgactagttttcctaatttggaggcattgggaagggctgtgagccataacaatcttacctcctggtgttaaggacatagcaccatatttctagacattctctgtagctttttcctttatacctgctagttctctctctctctctctctctctctctctctctctctctctctctctcttttttttttttgagacagagtctcactctgtcaccctaggtggagtgcagtggcgtgatctcagctcactgcagcctccgcctcttgggttcaagcaattcttctgcctcagcctcctgagtagctgggattacaagcacacaccatcacacctggataatttttgtatttttagtagagacaaggtttcaccatgttggccaggctggtctcaaactcctggcatcagatgaccagcccacattggcctcccaaagtactgggattacaggcatgagccaccatgcctattctactagttctcatttgaaaacacaatttttcttttactgacctctgctaaaagcatcaaggaatggccaacacacatcaacattctggttgctctctgggtaaatgatcaatctttcaagttactgccagagagagttttacaaaatattttgtgatgacagtacaagagtccccatttttgcagcctgtgtgtgaaatctgtttcctcagttctgctctaacgacgtatttatctaggttcaagtttctatatttttaaggtcatgctaagctgttgtaatgaagactccaaatatagtggcttacaggacgtagacattgctggaaggtagtgcatcacagtgggtaaaagcacagatttgggagtccaattttctggatttgaatcccagttcagtcacttactaactgtgcaaatctggccttctctgagcctcagtttaaaaaaaaaattaggtaataatagttactactaccttcagctggtaataaatctttaaaattgaggtaataatattacctagcattggtaagaatattaaaagagttaatacatataacatttagagttaatgtatgttatatgacaatgccatagaagtatctgctaatttttttagaacatttatattctctttcacataagagatctcagataattattccaaatcagtgtgaaaattctgatacttcaggggactaagagctttccattgagttgcttacactctatggggcattgtcattagcttcctgatcaaaattcgctcaccttcacatcagattccagccatggaaagaagaaagagaggatgagaaaacaygtcaaatatctttgggcccaatttggaaatggcacaaactacctccactgacattctattgataagagaatagttatacaattatagctaattggaaggaagctggaaaatttagtttagctggtggtatggtttagctgtgtccccacccaaatctcatcttgaattgtaatccctataattcccaagtgtcaaggaaaggatcagtgggaggtgattggctcatgggggcaggttcccccatgctgttcttgtgatagtgtgtgagttctcatgagatcttatggttttataaggcagttttccctgctcttgttcacactctctcctgctgccttgtgaagaaggtgcctgcttccccctctgccataattgtaagtttcctgaggcttccccagccatgcagaactgtgagtcaattaaacctcttccctttataaattacccagtcttgggtctttctttcttttctttcttttctttcttttctttcctttctttcccttctttcctttctttcgctttcttttccttccttccttcctttcattcattcattcattcattcattttgagacagagacagagtctcactctgtcccccagactagagtgcactggtgtgatctcagctcactgcaacctccgcctcccgggttcaagcaattctcctgcctcagcctcccgagtagctgggattacaggcgcacaccaccacactgggctaatttttgtatatttagtagagacagggttttaccacttttggccaggctagtcttgaactcctgacttcagatgatccacccaccttggcttcccaaagtgttgggattacaaacgtaagccacggcacccagcctcaggtatgtctttatagcagtgtgagaatggactaatacagctgggtagcctcttgccaagaacggaaggattttggtaggcagttagtacattctactacagttccttaaactgactcgaaaagagcttggaatgtattataattctataatgattgaggaaattaagttagtgaattagtataaaatatctttatattaaaagaaactaaaaagtcaaaacaatgaaaggtctataaacattgaaatggataaataaattatagtagattcatacaatgaaatatggacagcaatttatcccacaactagagatacatgctaacaacatgtatgcattttacaaataatgttgagctaaagaaaacaaaagcaattcatgtagtatgattttgttgtgggggaattccaaaataaaaatcaaacaatgttgtttgaagatgcatacctaggaggttaaactagagagaacagaaaggtgatgattatcataagagttaggacatttgttgcttcagggaaagctgtcaagggaaggtacaggggaggcttctgggttgttagtaatattatattttaacctggatggtgatttacattggtgtttgttttataactgtcctatagaaggatatatgtattttatacactctcaggtatatatgatgtatgtcacaattttctaatggatatgagagagcaaagtcagcttcaaaaaataaagggcaagggtaggcctaataataaattagtttagtatttgtgcaagaaaaaacaaatagaccaattgaacagaagagagatctcagaaaacaacatatttatgtatgcagaattaatataagataaagttagcagcaccagtcaatagggaaaggatgttttgtttaggagatggcattgggagaatggtctcactctaaggaaacaaaactatatcttatccaacatctctagataactacctaagaaaggtggactctggatgggttaaagatcttaaggtgaaggataactcttagttaatagaaggcaataaaggagagtatctttatgacctaaaggtagggaagaacttctgaaacaaaatttaaaaagcattaaccctaagactaaaaaacctgattgaatttgaatcatcaaaattaaggatttccactccttgaaaaacaccatggcaaagataaactgacaaggtattagtaagtagactatattaggaactcttaaaaataacgaagtggggataataaccccaaggaataacagacaaatggtgtgaagaagcaatttacagaagagggggaaaaatgacacacatgaaagatgctcagaatcctagtaatcagagacgtgccaattgaagcagcacttttaaattactttatacctattagactagcaaagaattaaaaggcttgatattgccaagtgttgatgaggaggcggggatgtaggggaccttatgcatcattggtggcagagtagatagttgtacccgtgacagttaagatccagagctcaaggaaccacaagaactgtaggctccagagccactcctgcagccacaggcctccctgcaaaacagatgcttgcaatattgcctctttcctcagttatttctaaatttaattttgctcaagtcctggctaacttagatacaaaattacatcctatactctggcttcaaggcagttgaaggaatatagcctttagtttctatctctgcagggcaggtatgcacactagaagagtgaggtccaaccccccagttggggttcaggaactggtattttataaaaactccatacattattctaatgtatgagccgatatttaacaacacttcaccaaaaggatgctggaaaagagcttgaaggtcctgatttagtgtcctcactacacatcacagaagtaagacctaggtgcacactaagtattattgatgtgttcatgtttcattgtcacaatacagcagaaatttgtctacagcaagaaaacaaatcatttactttttgccaaagttcatttttattgtgcaatgagattttctagaagagtgattcactagaaatgtaaatgaccatattagcacagccaagggcaagtcatccaactgagggaaaccaagaggaatgttcttaagcagaagcagagaatgtaatgaaaatttttaacatattcagtttcatattctgtctaacagatgtatcagaaaaagctcagtcctttagggatgactttgggaaatggtgaatgaataggtatcacatacttgtgttcatcaagctccaggctttgcataccagaggagttctgtggtttctgacagctaactggtgaatcacataaaccatagaatgtaattgattctatcaagaagtaaaatcaaatgaagtatagatggagcattctgtggactgctatcaattttctctaaagaaaaaaagaattggcttctgccatgaatctgaagattgtctgtgggtaaaatgcaaatggaaagtaaattgttcatgaatgaattctagaaaagcccactggtattcatagagagagaaagtaaatatctatatagaaattttgggaataataaagtcagatgtgccctactattaataggtttaaacattttgatcatttccctatctttatcttgctttactcactactttccaggacttttcctaccaggcactgtcaataaatcatgtgcttctgaattcctctgtctcccattctagggaaccagacagacatcaaatatgtatctaagttgcccaagacaggagccagatactcactttatcagcctttgtggtacactggacaactgttttccatatattccatttctcttcttgctgtgccactcttagtgggctgagtatacatctctgtgttattaaactcaggaatggccatgtgacttagtttggccaatgaaatactggtagaagtaacacagatcactttcagatagaaattttaagagccactgtagttcactgtgtctcttttctctttgcccccagactggtaatgttgtagatatagcttgctctgccagactggaccctggattagtgataatcagaagcagagccagagctaacttgcaatggacaagtagcatgagcaataaatgttaaacataaacagtaaaccattgctgttaccagcctctgttgcagcatgctgcagtagttcattctttttcatttgctgtgtgtggtatttcattgtatgaatatttcacaatttatccattccactattgatagacacttatatttatccaagtttttgtacattatgaataaactgcaatgaattttcttgtaaaatgtattttaatgcatgtatgtaaacatttcttttgactatatagaattggaattactgattaataaatcacatatatgtgcagcttttgcaagtactgtcaagcagttttccaaagtggttgtagcagcatactccttcacgaataatgttggagagttctasttgcttcatttctttgccagcacttaataatattagttttccttctttaacttttaactatttggattgttatgtaagaatatctcattgtggttttatttgcatttcttagataactaatggagttgaacactttgtcttatggttgttggccagttggaatccttgtttgtgcagtgaatatttaacattttgttcatttaagaaattaggttgacattatttttcttattgatttgtaggtatgaatcctttgtgcatacatgtattgaaaatatattctattttttagagtctttttcttaatcacttctgttgatgaacagaaagtctgcaattttaatgaaatctaacatcaatatttttgtttatgaatgttgctttgaatatcctcttttaaaaatctttatgtaccccaaaattatgaaatatgcttccttgtgatcttataaaatatttatagttatttttcacatttagatttttcatccacccagaatatacttttggttgtcctgtgagtaggaatcaagattcattttggccatatgtatatccaatatatacagcatcattttattgaaaagaaaatcttttccccactcattgcagtggcactttatcataaataaggtaaccatttatgtgttggtctacatctggacctttttttttttttttttgagatggagtttcactcttgttgcacaggctggagtgcagtggcacgatctcggctcagtgcaacctctgccttctggtttcaggcgattctctggcctcagcctcctgagtagctgagattacaggcgcccaccaccacgcccagctaatttttgtatttttagtagagatggggtttcaccatgttggccaggctggtctctaactcctgacctcgtgatccacccgccttagcttcccaaagtgctgggattacaggcgtaagccaccgcgcctggcctatatctggactttttgttctgttccgttggattatttgtcagtcattcaacaaaatcacagcgttttaattataatagatttataataaaccttgatttttggtattaaaatcccccaaatttgttcttcctcaaaattttttatggatattcttaactcttygtattttcacttaaatttagagtcagattgccaatttgtacaaaacctttctaggatttgtgttggaattttattgagctccttatagatcaatgcggggagaatgtacatcattaaattgccacctttccaagatctgaagttggtatatgtgtctctttaaatgtttagtttctgttagtgaagttgtagattttcgtgtagagattttgaacatcttctgttacatcctaagagtttagcagttctgatgctcttgtagatagtatcttcttaaaatttcattttctaattgtttgttactacacaagaacaaatgattctgtatactgactctatagctagctaccttagtaaatttatgtttttattttaaagtttatctgtagagtctttcgtatcatctacataccaagcacattgtctgtaaataatgagtgttctagatcttcttttccagccttgacatctcctctttctttttcttacctttagtttaatattgggcataagggataatcacaaatgtctttgttcctttctcaatcaccagggaaagctttcaaattctcatcgagtgtgaaaattgctgtaactttttctctttggcaaaatattcttcacctgattaagaaatttgcattctctttctagtttactaaaaatgtttttaattgtaaatgagtgttggatttttaaaatactttttctgcatctattgagatcatcatttttcccctttattctgttaattatatgttgatttaaaacttcaagccaaactcccatatggtgtataaaccttacttgattatgatattattatgtttttataattgtggacttacttgactaatattttaagatattaatgtccatgttcataataaagattggcctgtaattttaatttcccttttttgtaattaattgtcaggttttagtatcaaggttatattcacctggtgaaagacttgagagttatttcttctttttttattctccaaaagttagtgtaaaatttagcattttttcttccttaagtgtttggaataattcacttatgaagctacctgggactaaagatttctttaaggggrattttaaagtatagattacatttatttaaagaatatagaaatattacaattaaatgtttctgcttgtgtatgctttgataaatttagcaattcattcttttcatttaaatttgcagatttagtggaataaagtagttcataatatccttttgttacatatttaggatctgcggtaatatcctctttatttctcacatttagaatttgttttctttcycattttctttctgtcagtcttaccacagttttatatctttcattagtcttttcaataatcaacttttgaatgttttgtcctaagtttttattgtagtaaatttcacatagtataaaattcatcatttaaccattcaatgacatacaattcaatggcattaagtatgttcacaatattgttcaaccatcaccatgatcttgcgccagaatatttttcaccatctcagaaggaaacctatgtgcattaagtagttattccccatcctcctctcccctgcagttcctgacaactactaatctgctttctgtctttatggatttgccttttctggctatttcatgtaaatggaatcctataatatgctgccttttgtgtttggcttctttcacttagcataatgatttcaaggtgcatctatgttgtggcatgtattaggactttattctttttttataactgaatgacacttcatacaatggatagtctctcttcaagtttgttttttatttcattgattgctgattttatcttcatttccatccttctcctttctttggatttttaagctttttgagatgtgtgcttagacaattgaagtgaagtgacatagttctgttagctttcccttttcgtactttcagtttctgtttttaggtgcacgtcagttttggtttgcccatatctagacatacaaacttagggctcctacacttcctaattggatgactttgtatgaatggggataatcgtattgatcctatctccttgtccagggtcttgtgagagaatgtaaggtaaaagcattttgtaaactaacttccagacttggatagtaccttgtactttgcactgccattgctttatatctgcatagtgctttcacaggtttttaaaaatttaatacagcaaacccacaggaattatctccattttacagatgttatttctgctactatagaattttcaggaagtgaccatgaatttagtatttaaagcccagggtttttgggtttttttttcttccagctttactatagctgcctcatgcagaatggtattattggcattcttagaacattggaatttcacactttcagaaacttgagaacattgcaacaactgccaacagggctcagcatcctctgcagatgaacaacaccaagtggtatagttacccaatcaatccttttgcacttctacaaaattaagcttggcaaacttggctctggctttctaccaattcattgacagtttttactgactactccgtgaattaggctttttgtgggaaaataaaagaatgggttgatgtgattgttaccaaatatatttaggaagaagtatttgaacatgtgcaaataaatacttagcacatgaggatcaagggaggaaaggaaagggattctaatagtcaaggtgagatctgagtttttaaagaagtttgctttttaaatgtttggttatacatttctggtgataaaaaaattctaagtttaaaacaccttcataacttctcataacatttaaaatcttcacatagcatggactcatactcttgtctgcacattttaacatgtgtgaaataggaaattattgtataattaatagtttcttagaattgtgttgtagattaattatagtttttcttttttagtagtacataaaataaaagaataatagatagttatgtatttaacactgatggcattacagtaaataaaatatggaacattaaagtattccagaggattctgtaataacttttaaacattcattcattcattcatgtattcaacaatatttattgagcacctagattttgttaggtgctgtaccaggcgttagagctataacaacaagcaaggcatttttatacaggcttctggtctagtgagaaaaacagtaccgtgataaagtattaacaatacagagtggcaggaataataaagaagcagcatggtgcaatgagacatatgagaatggtatccaagatttagacatcaggaaaaactagtagaaataaattgcaaacaggtgcctgaaggagcaggtaggatttgatcatgttaagaatggggactagtattcataccctcgtgtaattccttcaccttgagagaacagaatgaatacaacatggaaaaaatgatatgtcactttgaaaattaggttacaaagagatggtgacttccatctggcttgttaaaatgagatcacagtcctggccaatgcctgggctacgaccttgggaaagaccctgaggcagaggcaccaggtaagttgtagtcatactcctggcccacagaaagtgagaggtgataagtgtttgttgttataagctgacacatttcaggcttgtttgttacatgatggtagataactaatacatctgtagggaagtggggtggacgtaggtatgagagggattgcaaataggcatgaagaaatttggaggcaaaggatatatttattaccttgatgcctgtgatgttttcatgggtgaatatatatgycaaaacttattgatttatatataatgacatatattgaattataaacacatataattatatttatatattataaatgtgtgcagtttattgtatataaattatatctcaataaagacgtttgtattttaaaatggggaataaaaagcttatggaaagacagtgtttcaggcaaaagagcaaatgaaaacaaaagcccagagcaagagctccagaaaaagcagaccatttcaaagtgtgcattgacatgggaaacctttgctcttggatttgaaagagataagtaggttaagggaaggaaggaggacaagattggttgtgaaaagaggtaaaagagaacaaagagaacaaatagtcagtgacttcaaacaaataccatggatttttgtgcaagaaagaccacttgggttctttaaggcccataggacaactgggtcagaaaaggagagagtggcatctctagtctactcccaaaccatctttcaatccctgctcctcctgcctcctttatccccaaccccttgccattcatttgtactttccttccctttacaaatatttgagcatttactatgtgccagaaactgttctaggagttagagagaaggtagttagcaagttaaggtctgtgacctctaaaagtttacatgctagtaggggaaggcaggtggcattaagtaggaagatgatttcctatggagtgctgtgaagacagtggtgatagagtccttaacaccaggtatggcacagcctcaatcagtcagttcagtcccagctgaacaaaacactatttgggagaagaatcctagagaccctactgtgccaggaaataataccttggttgctagatcatggtaaagtgagggaggattccagggaagagagaatggtcagtattgtggaggacctcttggagggtctgaggaagtggttatttaacaaccactgtagaaatatgtcattattctaataaccagtaattctgtactggtgctaaccatttgatatcagcactgaggtcttagtaactggtgcagagagagggttcaggagaagagggtgtggaggaagtctactctagatggtaatattgggaaaggcctctcagaagaagtgacatttaagctatgacctgaatgaagagaaagagaaatgcaaggggtagttgggaagttaagtcagggggatgggaagaggattctagccaaagaatagcaaagacaatgatggtgaagtgcaataaacttggtgtgtgtaccgaatggtacaaaagctaatgttgctgcaacgttatgctgagtgaattataagaaattaggtcagatgataagcacagcccagatcttgtggggcctttcaggccacaataagaaaataaaatgagaagccacaagagggaggattttaagcatggaaatgatataatctgatttacatttttaaaggattacgtgggccttggtaagaagaatggatttgtggggagggtgattagggagagaacaatggagaatctgttctagcctggagatgatagcagcctgaaccagagtaatggcagtggaaatggggaaaattgggttgattcaagattatttgaaagttgtagtggtttcaaagagctatctatacattctttgatatgtgggctaggcatttttgcactgctataaacacctgaggctgggtaatttatataaaaaaagttttaattggttcatggttctgtaggctgtacaggaagcatggtgtcaacatctgctcaggttctggtgaggacctcaggaagcttaaaatcatgggggaaggtgatgggcatcactagcatgtcacatggcaagagagggagtgggggtggggggaggtgctatagtcttttaaacaaccaaatctcacgtgaactcagagcaagagaactcactcattaccatgaggatggcaccaagacaattcagagggatctgccaccatgacccaacacctcctaccctgtcccacctccaccattggggatcacatttcagcatgagatttggaggggacaaacatccaaaccatatcaatatgcctcaaggcatatgaaggggagcctcaaaaggtgaagtttaattcttctcaccttgaatgtaaactggagttagcagtttgcatctaacaaacagaatatgacagaagttaggggatgtcatttcagaagttaggttaataaaagattgtggcatccattttggaggcatgctatctcactctttcagattgctcattctagtgaaagtcagctaccttgttctgttgtagttctgtagagaggcccacgtatcaagggactgaagtatcaagggactgaagtctctaaagagctgtgtgagtaatcttggaggctgatctcacctccttcacccactccagttgagccttcagataagatggcaattcacactgacagctcagctgctaactcatgagagaccttgagccagaggtatctagctgtrccatgcctgaattcctgacccacagaaatgatgagataataaatgtttgttgtttttaatggtgagactttagtataatttgttatgcagcatacgataactaatacaaaatagagcctataggactgactgatctgtttggtgcaagagggtgtgaggaaaagagatggatgaaagaagatatgtagattttggacttgagcaactggatggtagtgatgccatttattgaagtgtgagtttgggcaggggggattaagagttttcctttggacacattttgaaaagactrttaaacaccccagtgggcatgtcaaccaggtagcctgctgggccctgcccaaattccttatgcactgtttatgagcataagaaaatgattgtttggtttagcagctaaccttgtgaaatatctccaatcttccattctcaccttaacccattctaatatggtttgtgttcttttgactcgtgtagaatttgttcttattaaaccacctattgtatccatgttatctaattcagtagttacttctctgccataagcatactcaactcatagccacattggacacagatcatcattccccctcttttcsaatactcttctcttttggattcattggttctacttcttaggtagattcttctgctccacctggtgttaaccagggtggcttagccagtggtattcagttggtggccaggctgtggtggctgggcttgtctaatagcccacttcattcatttctgcttccttggtgccgatggttaagaggttggcttcagctgaccactttccctctccatatgttcatggcctttcatgtgaatgctccagtggagtggtcaggttttttacatagtagctcaaggcttaagagcaagtgttcagaaggagcagagagagagggcagtagttacaatgtgaggccaaagaagcttccccccagaaarctaaaggtgataagtaaagcatgttggtattggctggcaatattccacaagagatgaaaggacagatattgcagaagagagaaggtataactgggaccaaaagccttgagaaggaaagagacatggagcaaatcattcacagtaacagcagacagcagagaagagasacatggttgtacagaggcacctcctttgggtctttactcaaatgccccattatcagtgagaacttctctgactgctrttcttcagcagagggtattccttatcccctttcttgctttatgtgttttctccataacatatgtgcatatccataacacacacatgcatcacctagagcattatatatgccacagtgacatgttttgctgatttctcaattgactccccccattggaatgaacgtaagcttgaggaagacgttttgtcctgttctgtagcatctagaacagcgcctggcacatagtaggtactcaataaatgccagctgcatgaggaaatgaatgagctgtgtgggggatgtacttgagtgaactctaaagtcagagtggtgttgagagaaaaatgcttgaaatccagatgttggaaggtgacacagagtagtagcctggtgagaacagttagatcttaggggttcctactacagccctcccttccgcacctttttggctgtcaccatgatcaagctactgaatctctctgagacgcaaggaccgggatggcacaaagtgagtgctcaccaaagcttgactgtcctttcccatggcaatttacttcagcttgtttgatttcccctccccgactggactaggcacctattctctgtcttctctctttacagttggaaggagcaaaatgggacttttggctgaaagtgctgagctcctgcggtgggggctgaccgcaagccrcgccttctgtgcacctggtcggcccagctagctgcsgacccggcggggaggggyggggcgggccaatcggcgctgccccagcagggctgcggctgcaggcaggcagagcctcctagcccgtcggtgtctgcgcccatcgatccctttgtctatccccgaccatggcgaagctgattgcgctcaccctcttggggatgggactggcactcttcaggaaccaccagtcttcttaccagtaagttgggttgtggtgagggctgcagccttcgtcctcctcactccctgccagctccacgagcccccagaaagttgggtccaggctgttaacagaacatttacaagcaggtgctagatgcacactctgcgggggtttcataaatgtttgtccagccgtcatgtgtcacttgaaaacaaactcttgctcatggcctgagacatgggataaggaggcaattgccaggggtgtgagtgcccaggttgtcagcatacacgaattaatttttcatgaagatttgtgtgccctggctacagattcacttctcaacctggaaagaaacaaactaacctggctgggggttctcctgatattttgtgtattagagaaaggagcccctgtcgcttctgcgccttgactgcctggccatggcaaaccttccaggcttgaagattctcaaattgaggctactgagggccacagcaaaactgcgtgtggacccgagcaggtggagctaacgtgtgctgtgatggttcgcttcagtgggggcaggcggggaagagggaaccctggagccagcatctgatgtcctggggtttagctctgccccatgagtatgcgatttgggcaaatcactttacatctctaaccttagctgcttcagtaaactggaaatagtaatacacactgcctgcgacagagtagctattcaataaatgttagttccctgcttccctttaaagtatttaataaagggttaagtgctatacaaggggggtggggatattttaagaatgtatcaaaagtttcataacttttaacaggagttcaaagtctacagatcatcctagtctctaaggcttagtcaacaatgccttatttactttaaagtaaaacctaataaaaattaaatataaaaaaattatatgagcttatggactaattagaagcttacattcagaatgggtttttactatttattgtggatgtttttctaatttttttaagttacagagtgcagaaaaaaagtaagaagcagttggtattcttggcttttaaatcatgtaaaaattacagtttgtgagtttttattaatcacagtgctggtggctgccaaaggagattataggtatagataaaaatatatagataaaggatgggttgctgagcctcctggagtgacccagacagaggaaggaagggaaattttacccactgttggaaacccctaaaacctagctactcaactgggtctggggaccagatgcctgagcatcacctaggggctccctgtacaggcagaatctcaagccctaccccacactattgaatcagaaccagcgtcatggaacaaactccctgggggattagagatcatgaatctgccccagggagagaaggcaagagatgatatcatgaggyctgcatcaggagcaagccaaatccccaggatagatgcatccttttttcttcagacttggagtgtatgtgtgtgcggctcacaggaagctatatatgcctgggctggagggaacttaaggaagcacacaagggatgcctcaagagatttctgagtttcccaggtgggagcagtacagagaaaagaactgagagagttcccctagaccacgagtctcccacccacgagtctcccacctttgtagtcggctgtatgtgccgcacaagtccagggaatgccttggatgatggtagaaacagctcccctcccctaccccaacttgggctatggaatgttgcagcatctgtatggcaacttccttgtccctacattgctaattgcaatacgtgagtccactgagtttcccttctcagaaggaaaccacaaagctaacgttgggcctctcgatgcatttctgccattccatgcttactgtaggcaacacacagttgtgggaagagagtagttgtggattcctgatgacctgggttagatatcatttctgcaactttcaagttattttaccactttattccagaaaagttccagccagtttctccacccgaaaattaggggataataatacatattacagcatatatatatatatayacacacacacacacacacatacatatatttatatttatataaaacatataaataaaactaagwatatatatatatataaaaatcaggcatatagcagatgtcctgtaaacgttagcttttatagctgtcatatgtgatctcaaaaatatagagtgatacttgaatatgtattataatcatacttcattgaaagtctgagataaggacaaataatcctccaaccctccagtctcccctatgaatgcaaccaacaccatcttctcagtctgatgtacttgcctagtatctccacaaaacacttcagtggacatctgcagagtaccttctctttgcaaacgttgtgtttctgctggaggttataggaatgaataggttgcagtattcactcaccaattttaaagtctactgggagcaaaagaacaaaaactgacagctgtgaaactgacaactatgacaactatggtaagaaagttgacagatgtatatgtgaaggttcctgagggtaaastaaggagttattaatcccaatgcagaagactggagaagctacaaagcatcatgagtaggggtctttccagtgggtaaygggctaaagagcattctaggtgaagggaaaagtgtgagcaaataaaaagaggtatgaaagaaatacagggaagagtccttagtatcatgacacttgatttcaaatcccaactctaccctcttaaataagcaaccacatgcaatttactcagcctctcagtgcctccatttccttacctacaaaacagggtaaatattcatctttttctcaaagrtggctaaaaagattaaatgaggaagtatgtgtgagagcccttattggagcttggcacatagtaggccatgaaaagcaatttgaatgaatgaggcgtgtgtagtagcagaaaatagactgattagagtgaatttggccccaagaagagtttgagaatcgatacggatttcttaatgcctaggcaaagatctctgcttttttctgcgagcagccagcatgtattttcaccgaatacttctgccttggtttggatgttcgtcctctccaaacctcgtatttgatctctaatgttggaggtggggcccaatgggaggtgtttgggtcatgaagatggatccctcatgaatagattaatgacctccttgggagtgagtgaattctcactctattcatttcgagagagctggttgattgaaaagagcctggtacctctcccctctcttacattctctctcatcccatgatctctgtgagtactggcttctcttcatcttctgcaatgagtggaagcagccagagcccctcaccagatgcagatacccaatcctgaactttctaaccatccagaatcataagccaaataaaccttttttctttatcagttgcttagcctcagatgttcctttagagtgacacaaagcagactcagacaagttcacagcaaaggctgtatggtttctgcgcaragttcagagtctagtgaatcagagatatatctcagacattgacccttatctcttaggcccagaacatttggacttaagcctttgacaagatatttcctaataaattgaaaatgaggtagaamaaatatgagttggatgataataacacaggtgggtcaattttcaggtgcatcttccagcttttaagcagtgttctctgtagattttgcctggtcagagagctaaatgtgagctttgtgttcatacttgaattccaatccctgctcagccactttataactctgtggccttagaaagccacttaatcttggtcaactataacttagggaaaataacacctcacggaggtgtttgaggattaaacgcgggcatatayggtacctgaactatagtagtaatgattatcctgttgagatatgacatgtttgggccacaaattggaacccaaatcaacaagtgctgacttaatgcccccttgcccaccctgggctccctttaactgtgattattctaygttttccaggctagagatcatcttctatgagagagaagcctgaattagaataggagctgaccagttctgcctttctccatcttttgtgaacccatatgtttagtgacccttgtgagtcaggcagcrtgagtattcttcccattggttttgagtctaagaaaagtgaatttgactatccttggtgtttttcacaagtcttggcccattcagtgattttatgtccttgaatctctccttccatgccagtctttgtgttgtcctcggttatgaccatcacccttaacatcttgtacctgccctttggttccttgagggcatgctacaaatattcacyacactttccctagaccagagttttttcaaatggtgggtaacaaagtcaatttagtaaataattaccaacatttaaaaataaataaaacagaattgaacagaaaagttatgaatgtatgacacagattaggatgagtattgttttgtgaagcttgattcagatgtgtatgtgtatgtgtgtgcatgtgctgggtgttcgcaccatataaaatacttttcctactgtgagtctctgtctgaaaagtttgtaagccactgctttatcacttccccttttatttccttattgtcaatatttgcaattataatgtcagattttcattttgaaaatacctttccctttcttaggttatgggacagattccaactttcctttgaagcctgctttctaagttcacatctatcaatcaggaaaccacagtctcctcacagtccaagccttcatcatctattcattcatctctgtatttctagtacctagactggtgrctctttactctggttatacgttgggacaaactgtggcacttttacaaagcagattaytaagaggcactccttgcctcttacgtcagattttyttagacagcgaaaatgatagccagtggcctgatggtaggaatgtactcatttttttctgaatgaataaatgaaagatcaatcacccccaaattcctatcattttgtaccacgtcggtaagaattttatctagcgtgtctgttccgcctgtagcccatccgcctcctgtgagttcaagtcatcaggaggacaagtaaatttcttagcctatctgaagccaaataagatttctagggatatttggataattgtcactacttgctatgacaatactgtatcactagttctctaaaaaaaaaaaaaaaaaaaagtttattgtttaaatctcttggttgtgctaacgtcgtctgtttctttcaaatgcagcatcagtagcttcgctctgctcaggcagccggctggcacttccytctcacatctgttcatttttcctttgtcctttactcagacattttctatggtgtttatgcactcatatctaataagtcgctcctgtgtatgtgtgtgagtgcacctgtgtgtgtgaaatgcctttttacatgcaggccttgtgtatgattttctgaagttamaaatcctttcaacgtacctgtatttttcaagcactacatcacaaagcagatgcccagtccaggctgcggagtcagattgggcagatgagtaggaggctgcccatctgtcagcaactctaaaacatcaatggaataaactggaaccatgttgccrtttacccggactttccacytaggagtccttacacactgatgaaattgctcctgttcctgccaaagtacacagagccctagagaggatattatgtatctcttatgtgtacctatccacctctgctaaataaaaactaaatattgtacccagagttccccacttgtcttgccctggccttgcctggaaaaattgcaggaaaaactctggagttgaaactcaggcaaagtacagtgaaggagaacttttgtggactgcctacctttgcaacttattataatttctgaatagttttgtgtgtgttttatttctttctcccccacagaacacgacttaatgctctccgagaggtacaacccgtagaacttcctaactgtaatttagttaaaggaatcggtatgtatgtgagaggaagaagggtctcatttgaacttccggtatttttttgctctttgtgtgattaatgtgcctgttcaattctgtccaaaaataaaattttgaatcaggagagtcagtggtagttaatgataaataccatgttgtttgacttttgacttcaccaacatactgccaaggtgttgggagttttggttgtttgtttttgtttgatcaatagagcaaaaaaaaaaaaaagaaaaaaagaaaaaagaaaaatagaataatgtttgattccatggcaatctaacctgaggagatggcagaagaggggagggagagccagataaagcattgaataaaggtaacttttttttagaaaggctctgacaggactttgcaattaccacaaggcttctccttatgcatctctcttttgatattggacaggaaaattttttccagaagctctcagcagatttccccttagatcttatttgtcagagctggaggacaggctggtgccctagttgcaaaggatgctgggaaagtaattatcaagcctccaatgtgggaggcaggccctgtcagcaaagataaaacggtaggagaatagcagctgggaggcaaccaacaaggagagtccccgggctcaactctccagctggttccaaccaaccagctttgttatttgaagacaattggtttgagatcatgcttttgtgtgctttgggtgtttctttttctttyttttttttttttttttttttgttcttttagaattattcatctcagttgattaaggctcaggaggctagatcagatgacttagtaccactaaatttcactagatatcttatggtgcgattgttttctagaaaaatatgatattgatatcaaatatcactgggtttttgaaaagcaaactttccactaagtgtagaaatacctatcaaatagttcatttttctctagataaattgaaatgttaaaaatttacatgtacttaaagtataactaacttgaagacagtaatatttaaccgatgtttataattagtagtaaaaattcatattcttgatcamctaaaatgtatccccattttaactcaactatttggaatttgcttatatcttcaatatggctttccaagggtttaattgatttggaagtattaagtatcaacatatatttgtaatttaccttgtatctttagaaaacaagttcttttcaaataatcatggcttttgtacgttttgtgaatttccatgaactttaagaggattcagtctttgaggaaaaagctctagtccatcaatttaaaacaaatatactaagtgtaaattttaattaaacttgttaatgaattaatatatttttaatttccatataatcgcattmatcaatttgaataaatgaaagaatgaattattctgaacctattaaagaagagtgatgtatagccccagtttcaagtgaggtgtgataaagaaatggatccacatcctgcaataatatgaaacaacctgtactttctgttctcttttctggcagaaactggctctgaagacwtggagatactgcctaatggactggctttcattagctctgtgagtgttttctttcacttttctgtgttctagaacgttttctaggactggcagtttaagtctttcacttaggctttctgtatacccatgcccactttcaaataaaatgaacagtcatggtttaaaagacaaattgtgtatgcatttacacttgtgctataattatgatcatgcgtgttctatgcatatttgtgttcttcggtctacattgaaccatattacgttagcttctattgcagcaatttttttgtgagttcagtgtattcaagaattgttttcctctcaattgtctattccctaagcacttaaaattgccatattcaaatatttgctaaattaaatatacatttaatgtatactacttcacaggtcatttcaactttcacrtttttaaacaaatttcagaataagccctttaatttaaaattgttgataggtcccaattcccaattcccaagctttgaagacagaatccaccatatttgctgaaactgtcctgcatatagatcgctatggtagctgatatagtgcaaaacaaaagaagtccaccatctggcctagggatcataacataacagagttgataggaaacgacagacaatcatccagccatttaaaaacctttgctaccccttgtaatttacttagtccagttttctcttacaaagatgatagactagtcatcctgcaaagcaatgtcttgcaaactttcttgagcaacataaggtgtatttcaagcaaaatcttatatgggaacacaatatataaaacaacagctttattgttttgattgaaggctaagaaaggagtagttcctctggcccaccaaaactctgtctttgagatgcttccaaggacctaccagggaacagtttaaaagccataagcaatattctctctgtattccttgcttatatcattgaagactattattaattgcctttttggtctgctcttccatttttgatctttctcatgggctggaagctgtagtgtcgtgcacatatgactttgctgcaggggatgaaagggtttgtgtggggtggcctagtggagcatgtggcttccagaagacttctcctggggacccattacagaagctaactaagaggcttcctatgtggccatctggctagccctgtggtttggagcagtcaacatgaacccatgggccatgcagcgcctctattagcatttgaagtactggtattgtgcttgatttttctcctccatggtttataagggattaaagtatcctggaataaagagcttcaaccccaacagtcctggaaaaatacttctgatggacctgaatgaagaagatccaacagtgttggaattggggatcactggaagtaaatttgatrtatcttcatttaaccctcatgggattagcacattcacagatgaaggtaacaatatttactatttattaaaaccaaaaccaaacttaaaacaaaaacagaaaaacatgccaataaatgaattattttttctcattcaaacaaagcatagtcatgaataatgttcttactctgggttttaaacttaccctctatgttaattgaactttatagtaaaaccacttaaatacttgagaatgctaaaatatttaagatttgtaaagcatctaattttgtaaaatactaacattcacattatccctataattaccataataataatatccagccctgatcattatagcttttccattttaaacgattttcaagactcgggcatttacaggaacagatttttctaacccaaggcatctgtaagctataggtccagtgacagaaagtcaccatggtcagctttctgccggtcccattatcttcaatgcctcctgtccgctggttcctctgttctgtgttcaaaatgctcctctgcatgttggtccctttcaacataacttggtgtcatcctttatgtctttactccctttctccctttccatttgctgtcacttccttgtctctgtattaattttcagccccagttgcacaatggtagcacctgaagagtttaaaaagactcgatgcccagcccccagcttgacagattccaattccgttagtctgagggaggcctggatcacagtagttgttaaaagtttttcagttgataaaaatgtcaggctagggttaagaaccacgtttatacccattacctccatttcatcatcagacgatccctcattcagttcctcttctggactttccccactgtgggtggctaaaattgctaccttgagaatcatcagtgatgttcctactaacaaatctcctctcttcccttcctccctctccttccttccctcttcccttccttccttccttcacctccttttgttttttgttttgttttgtttttgagatggagtcttgctctctcccaggctggagtgcagtggcgcaatcttggctcactgaaaacttcacctcccgggttcaagcaattctcctgcctcagcctcctgagtagcggggaccacaggtgcatgccgccatgcctggctgatttttcgtattttagtagagacgggggtttcaccatgttgcccaggctggtctcgaactcctgagctcaggcaatcctcccatctcggcctcccaaagtgctgggattacagttgtgagccaccgcgcccagcctacttcacctgcttttatgctgtttaccattttctcattcacaaaacttgctcttccctgatactgcagtgcacctagctgttccagttctcatcctactacaggttttctccccaattcattgttttgtcactcattgctacttccctgagcactaccccagaggtttgatcttttacttcctctatattttctctattttagaactttcaaaccagtgtcacactgcctgctttctaggaggacatccccaaataggggtattattattcttcttcttttcattagcccttcacttttaatgccgcaggtgcttactggacacttctatttggattcctttcctatagacactttaaactcaaaatgttgaaagtgattttccatccttttatctttccttctcttccccatgtgagacacacacacacacacacacacacacacacacacacacacatatacatatatatccctttcaatggactttccactcatccacccattcatcaccattatgttttattttaaaaatatttttaagtacaaagaaatatagtgtttgatgtgtggatactttttaaaataaaaatgaggtaatattacacaaccccttctataaattkcttctgcattaaacactacatcatggactcctttatatatagcacatttgcagttgctttgccaaggcagttcgggattcagttgtgtgggagcactgtaatatagctcatctgctaacaaatatttaggttgttcccacctttatgctcattgcaaacaatgccaaaataaactttctcgcacatgtattttctgagactatatccttaggatacatttctagaagtagaatccactgcacaaaatgtgaattcaggttttaatcctcacttgaatttgatttccaacaccctccttcctcagctgtattcagggcctttggattcttcctgtcaaatgcctctcatgacctttcctgccttttattgccagtggcatcctcttggtccagtcctttctctccacattgctggattactgctgtagcctcagctcatgttactccttggttcaaataccccagtgagcaaagcttggatcttcatcttaagccctaacaagactgattctggctccctgtggtttcagccctctcactctcccactctctcttgccttcactctgctcccagcacaacctcacaattaagtgaatatgtccaggaagttctgccccggggcctttgcacactcccagcacaacctcactattaagtgaatatgtcccggaagttctgccccggggcctttgcacactcccagcacaacctcactattaagtgaatatgtccaggaagttctgccccagggcctttgcacactttctcccctcaacctggaatgctctttccctagatatccacattattcgttctcttatttcacttargtttttgctctaacatcccctcatcagagagaacatgcctgactcccatgaagataatacttcgttactctctattcttttatcctgttgtatttttcctttgtagcatttaacgccaactaaaataaattaaacacttgtttgctgaatggggtaatgaaaatcattttagcagctttctctgttcaaatcttctcaattcaacctgccaaattttgcatcttaacatggtgaaaccccatctctactaaaaacacaaaaattagccaggcatggtggtgggcacctgtaatcccagctacttgggaggctgaggcaggagaatcgcttgaacctgggaggcggaggttgcagtgagccgagatggcgccattgcactccagcctgggcaacaggagtgaaactccgtctcaaaaacaaaacaaaacaaaacaaaaacgccaatttgatcatgtcagaggtttcaaaagacctactctttcttaaggcaaagaccataatctaacttttacttgccagctctgatcacacattcttgaccgcttagactggtcacctttgtgttcttaaagtcccacttatccaaggaagctgcttctgtttgtttgctactatttctcagatgttcttctatggaatgtatcatctcacactgtgtaaattacacctgatcacaccttctcatattgggagttcccatggtttttatccctttcatcgcaactgtgcatttcgtggagaccatttgaactggaaaacttaaaggattctttggagttttagtgtcagtgatactcattcttgagaatttttttttctcctgtggagttttgagttttcagagactgtcactggttcttccttgagccacttttgtttggaacaggagcaatcacmaatgcttctctctacaaagagatgaaaatattccatctgcctgacatcctaactactagctggaggtgggttgaaattggtttttggagagagggctgacagtgagagcttagttaatgtttcatttttgtttttaatctcctctcagataatgccatgtacctcctggtggtgaaccatccagatgccaagtccacagtggagttgtttaaatttcaagaagaagaaaaatcgcttttgcatctaaaaaccatcagacataaacttctgcctaagtactgagatatatcacatttctattttcctttagctgtagcggatagttaatccacttttagtttttccttttggccagagtaggtatggctgttcaactctcatttctaatgatcacaaactcctccacatgctcttctgaagaaccttctgaggactcaagmccctcagagayggcccattcttttcctctcttgtttctcgagctgattggatgctggctcctggcctcaggatctccattcaagttattaccaggaaaaaaatcctcttcttcagaaccagacttagtatttcaaacccaaaccggcttcatagataaatttgacatcatgagcttatttatttatattaaaaagtagactcttagatgtttccatgaattagaaacacagacccaagaggagaccctgaatcaagtgcatctaagacctccttatactgcctccgctgctgtttgattgcacaaaatttatgcaatagcagatctgtggtaacactcarttccccctaggcaccttgttcatgtaacatatggtgaaataaaacactcaagaatctccaatctcagtcaacttcctcacatgccctgtgaagatttggcttgtaaggccagtgatggatttaggagaacaatccgacwctatcttctgaaacatttacctccaactgattacgattttctagaatcccaacctatttttatataatttatgtacagcatttgactacctccatatctgtaaatctagatttgtactctttgcaggtacctagctaagggcctggtatgtagtgtgcactctgtgttaccaggaccccttcctcttctttcttatctggtggtttgaggatgaggaaaatgagattggagagaaattgagttactggatgaaggccaatcaactcactagtggccaagtaggaaccccagctcaggtcatcttctgccccatcaagatgartaaaagttcagagaacagcttttggtggaagagtttattcgtgcatttatttaacaaatatattttggagagagaataaggtcactgagtggagaatgtgaggaacaccaagatttaaagtagagaacagtatgtagaatggagaagctgggcaaatgataacactaataaatgagctttctctgtaagtcaggtgctacactaactaattcaaacagattattttattgatgttttacaaataccttctgaattaggtgttattattatatccattttggatttttaaaaagttgaggcctggactaattgttaagtttccccagatgacatcatcagtaaatggtgcagctgtgattctaatcctggtaacatgagttcagagctggtgctttaaacctctacaaaatagtgaaaaaaattatgtgttttaacatttaatcttggaaatctcagattggtctacgttaccggattggagtatttttttcttgagccagttgcaaaaatattggtcttaggcagcattggagactgaaaataaccacggtgccgtaattaactagagttctgctctctcaatccaaggattagctgtgtgtattttcttctttgtattttatggttttttataacattaatattccaataactaaatctattataatttaaacttgttattattcatatatcacaactgttattattggtcatttactgtatgccaggcatggtgtgaaggcctttgcattcattatttcattgtattcttactctagcctttcaaggtatacagagaaaacagaggttcagaatagtggctcaaaatttagtgacaatgctgtggccccacattataaggatagcaagcagtgtcaggatgcaaatgaagtccatcagatttcaaagctattactctattaccctttaaaaatttgttatttatttacttattttactacacctgggggtagtaaattttcagcaataaaaagctattgctctaaaccattccactctgcccctttctgtgaaaaacagacaaatgatagtccagcatactaatttaagaaatttacttttaaaaaagagagagtaaaatcagattgtagatttatgtctggagcccatccagactaatcctaaattccgagacctttttttttttttcatgttgtaatagtggctagcattgattgagggtttattgaatgtcatgctccctgcaaagcacacaacaggcattgtctcattgtaattcccactgcaactccacaaattaagatcctgacccttagttttctactaatgagctgtatgattttgagaatatcatttaacctctctttacagatgagaaaactgaggctctgcatgcctgtctaacttgcctgagagctcagagctgcgtcagagctgatgcgctggccatgacgcctctgcaatagagcagagataattttctcccagatcatgccctggggaacttccatcacctcaatcagcaaagaatgactcacttatgtgttccctattgtayccattaaagcagaaaaatagactcatatatcttacattttcagtaacagagaatcctaatcagaaaggaaaaaaaaaaagycatagcattctatttctgagcattcttgttcatggacatttcattcagtttagaatcacgaaatcttaaggctggaagatcaaccagtctatcatcctgctttcacagataagaaaactgaggtcctgacatgtgaaaagattgatttttcttagatcacacagctaatagtagcagagcttaaactaaaatgcaagtatccaggctgctggttcagcattttttcaatttcttatgggagttagttctatgtgagcccagatatgtgagcacatttttgccctgacaatgatttctggcttaatttaatttctactgaatttagtgtatttacacacagacacacacagatacmcacacacacacacacacacacacacacacacacgacgtaacactattttaagatacatataataggatttttatgttacagtgctataatcacctcctcagatttcttagaccaatgattgtctttaaggattgtatcggcaggactaatttcatattaattgtgttccattatagctagcacgaaggctccatcccayatcttgattttaggaatagacagtgaggaatgccagttaataatcctgtaatgttcaataccttcaccttatatattatgtgtgtatgttttaattgcagtttgaatgatattgttgctgtgggacctgagcacttttatggcacaaatgatcactattttcttgacccctacttacratcctgggagatgtatttgggtttagcgtggtcgtatgttgtctactatagtccaagtgaagttcgagtggtggcagaaggatttgattttgctaatggaatcaacatttcacccgatggcaagtatgtgaactctctgaaatgtagtggatttactcagattctcaggagatatcttggaatatattctttttttaagtaatatgatacattttaacatgttaccctagtgagataaaattaggaaaaatgtaaaatgtcttaatttttcagggggtgaaatttatcaaatcaaaaatttcattgtgaaggcatactggttttatttcctttttggaaagaaagtacattttaagagggggaactgtgatgaagatttgatatgtctgaatagctttgttttgagtaaagatgtgagtgtataatgagttgaatagtatgcaggtatagatacgtcagtagtgcaggtttatgacaagatgaggaatttgtaccaaaatgtaaatcaaggcaatacttccttcatcaagaaagtattactgtgaaaaacaagtcagtttaactaagcagtgtgcttagtgatgtatttgatttataatgttatctcatggtgagctataacaaacaatttgcaaaccaacattggtctggagactgcattttgggtagcattggtatatacatgaaatatctatatccatccacatatatgccctttctcatcttgtgtcatcatcaaggattttagagtccgtaacatatgcttagagaaagcaacaggggccaggtgtggtggttcatgcctgtaatcctagcacttcgggaggccaaggtgggtggatcacctgaggtcatagaccagcctggccatcatggcgaaaccccatctctactaaaaatacaaaaattagccaggcgtggtggcgcactcctgtaatcccagctaccagggaggccaggcaggagaattgcttgaacctgggaggtggaggttgcagtgagctgagattgcaccactgcactccagcgtgggtgacagagcaagactctgtttttttttaaaaaaaaaaaaaagaaagaaagaaagaaaagaaaaagcaagcaagcaagcaagtgagagcaacagggacagggacagcttttaattattcatatcatagaccagttttcaaaaaatagaagataattgagcagtaatttcttttttttgttggggggatgcacagtgcttagactaaccccagatctttgtggggtatgactaaagccacagggtcaggaccacactcagggcagaagaggaggaagacttctctygatccaagccaagcagcttttcttctctcatattttctctggattaaaacaaggggctgttgtccaagggctttcctgcaactttcccgagagagaactcactagcccctgaaatgcagaacctgggccttgacactaaattgtcaaaccaaaagagaaacgctgtaatgcattttactcccagatactaaaagttagtgttagggctaagttcctcccatacygataaggacaactatgtcccctccttcagaaacaacttttcagagattaaacccctctgtcactgtaaactcactgagttctttcagaatttggtgtgtttgaggtgggttccattttccattccttaagcaaagttcttccctatgaataggtattacaacttcatcttaatctctcaagttgtgttacttctagtactttgatgtagctctttcttctttgaaggtatgtctatatagctgagttgctggctcataagattcatgtgtatgaaaagcatgctaattggactttaactccattgaaggtaagacgtattaacactgtaagtctgcagagtgataattagattctaattgatttgtgaaattaaatgtgaagaaaaaaggactgcttaattggggtgggtgagaaccaatttttcactcctttattaagagtcattagcttggttatgtgtttgttgttcatttttactcaactgcagagtggcaaacagcaaaccccacctcttacccgtgaaccttgcattctttctgctctagcaaattttaagcttggcattgtgttcccagatcctccttccatccctcccttcctgcctttcttctgatctccctctcctccaccttccttccctctcctcccttttctttctcttttttcctctatgttgatggaacagccaagaaatagcctcaaattgtactttatgcagggctgctctccacaatgtttatgaagtccacgtgctcacgatggctgctaggtgacctggctgcccctcacctctctgcctttacctccaaccattgtgtccctgccccacgtctcctgccactgtctcagaacggggcaccattccctctgctaggaggagaaaccttcctccagatctccatgaccccctccttcatctcctttcatttttactaaaacgtcacctcgatcttcaaaacctggaactgctccctcccgctacgtattttccctcgcctttcctgctttatttttccattcagcacgtattgctaacatactatatattttattcataccctttattacctgattccccaactagggtgtaagctccacaaggacaggctgtttttctatttgcttctggtacaattcacattgactagttggcacttaacaaatacttgttaaattactgcggtggggctgggcatgcttcagggattcacctgctgcccccaccaattctggtcatctgaaggttggagtcaaaatgggtgaaaacacaaaggagaggaaaaagagaccaagagcaaactagagccctaagaaagcagccctctacctccgaaaaacagcaagacgttgctttcctgccataaacgcccactgcaggaagcactgtcagcgccaattgtatgactgttcctgtcagcacatctgagagactgtcatgaggggcctcaytcagagaaaattaccttaaagcaacatcaaatgtaacatcgtgtttgacattaaaaatcactggcagggctagtttggtattagctcaagtaaaatggaatttcacacgctcatactggctaagggaataaaaaacaagctgcggttttaacaacaggtatttctgtaaaacaaaagttaaagaattttatgagaatagaacccaatgtaacagacattcaccacagaatgtcaaggctctgctctcaccagggygagactgagggcaaggccagtttcagcaacagaccaggcctgtctcccatcatgaaaaccccaaaaaggttctccatcaattgtcacattattctttcttttgaaagaccgtattaattaatatcagttaattaatgcccgagagtgccaagtaatttgataaactagctgaggctattcttaaatttgtgatgaggtgtggatgggtttatgtccaattggatattgttcagccttaaaaaggaatgaagttcttggccgggtgcggtggctcacacctgtaatcccagcactgtgggaggctgaggtgggtggatcacgaggtcaagagttcaagaccagcctggccaatatggtgaaaccccgtctctactaaaggtacaaaaaattagccagacatggtggcacatgcctataatcccagctacctgggagactgaggcaggagaatcacttgaacctgggaggcggaggttgcagtgagctgagatcacaccattgtactccagtctgggcaacaagagcaaaacgccatctaaaaaaaaaaaaaaaaaaaaaaaggaatgaagttctgatacctgctacaacatggataagccttgaaaaacatgatgctaaatgacataagccagcaacaaaaggataaatattgtacgatttactaataggaagtacctagaacaggcaaattcatggagacagaaaatagaatagaatggtgattgctaggaacttgggggagagaagaatagggagctattgtttaatgggtacaggatttctatttggggctgattaaaagttctggagagggatggtgatgatggttgcacaacattgtgaatatacttaatgccactgagttttacacttaaaaatggttaaaatgtcaaatttttatatattttaccacgatagaaataattctctcctctctccaaaaaaagattccaggacttagtcaatgaattagtcacacttcaatgaacctcaatgcgcaaaaacctggagtatttgttaacagagaatactctgtttttcccaaagagaataatttattatgttttcttgaccaaggaatgcgaatttttcgagttgcctttgtgggagtgtgagatgtgatacgcaggggtcttgcatgagttagcatggagaggaattatttatttgcaaggcaaagagttcattgctggactcagaacaggctccctgctagactgtcagcacttccatggcatgagctgtgtctgctgggtacctggtgctctccaggtgttgcgttccttgcagagctcrtgtaggagctcagtaattgtgtcttgaatgaatgggaccccaggtttctgtgtccttctcccactcccactctcatctcaggtttcatctgccgtggaattcaccaattggctgtactgcttccaaagataagagcaaagccctgaaacaaacattttcctcattcaaagacattatggtatcagagtggtgtgctgacactgggatggacaggggtttagggatggagaaagcaagcatggagccgcctgtcttgcctgtctctggggtaagaaagactgatggctctgcatggtggcgagactgaggctctgccatgatgcttgagccctctaatccctccttgggcatgtgaggaacagctctcattttgagtaggaggcacagggaaacgttggttttctgcagctgtctgcttatgccctggctttttcaatgagtcatgaccagttatttacaggttctctgggcactgaggtatgctggcctctgaggtacatggtagatattatttctccaactgagaattagaggtaaacaaatagatgggatttctccccagtagaaggcagccaagatgatgaatggtggaattaagaatcattggtattatttatgatccttgtacaaagcctcgacagcaatctgtgcagtcatcaaatgcttgcaacttatatttagagaataaacagcagaagaacggggagttgaacaacatcaggaaactaaagaacaaacttttcctcaactacaaggcaaaaatgagaccctgggtgatcatttcttctctggctgcacagcctatgattagccattaaagagtccacatttcattgatattcttctgagaaagaatctacatttcctggttgttttctgaatgcttataaaaatatcattaccacatgccattttagaaggagatgttttatgatgcaccgaaaacttcttttttttttcagttttaggttcatgcacagatgttggtacaaatgattttgtctaacttttaacagtctttcttggctttctgtatcttcaccctacccaattctgccctggaaactgacaaaatactagcatagatgaaaggtcagagaaattttgtgagtcttattgaaatggggcagaattgtatccttggaagcagcagcgtggtgaccaaggacaagaggcaacttttctctgatayattttgctccatcacaattgtgttttactttatgtcttgttcttttcttgtttttaatcttttaagtcccttgactttaataccctcgtggataacatatctgtggatcctgagacaggagacctttgggttggatgccatcccaatggcatgaaaatcttcttctatgactcagagaatcctcctgcatcagaggtaagttttaaaaatgaaccagataagtgactttattcccagctactgttttttcagttgacaacataattctcaattcttggtttttttttttttttttttttttttttgkgacagagtatcgctctgtcgcccaggctggagtgcagtggcgcaatcttggctcactgcaagctccgcctcccgggttcacaccattctcctgcctcagcctcccaagtagttgggaccacaggcgcatgccaccatgcctggctaattttttgtattttttttttttttttagtagagacagggtttcatcctgttggccaggatggtcttgatctgctgaccttgtgatccacccgcctcggcctcccaaagtgccgggattacaggcgtgagccaccgtgcccggccaattctcaattctatgtgcaaataaaaggggggacatggatagatgatccaaatgatcagaaatgaaggcttttggaggtgctttagtcagagtctaggcaagaaacacatggcacacttaaattggataatttgaggggagtttaatcaacggactatacacaaaatgtgtggacacagtgtagggtaatcaacagagttataatgcagtaccccagggctagcaagggagggaggaaatgaataccagaagccagaacaggtagacggtggtgggtggagagggttgcctgacaggaacttggcctctggttaagggatcctcaaagaacataatgatgccatactgctatggtttaatcattcattacctgccttcctattcaactcccccttcctgtgtggcggtatacgcacaggtccatgcaatggaccagtcctggagcacactggccagcctctctagatcttcctgcaggtggcaagataaatagctggaattattctggcttagaagatctcatcttccaccttagttacagtactcaaaggtcccattttttgtccacggtctttattcagtgaactattttgggtacaagtaagaatttgcaacctacttcaatataggtatttgcacatttactgagttttcagtatctactaaggatacttattacttacatcatatatatgatatcatcttgacatatttgtctactgctgggtattgttaaagctcagttttaagagtccatttcacctgcccaacaggaaaaaaaaaagtgttaaagcccgtatctcttgggttaaaaaaaaaagaaacaaatgtgtatttccatttacattatggctctcttaccttttatctctaggtttgcaggacaattgtgatcatgtttaatggcaaccctttgtgccttttgctagtttttagctattagggttgctgaatggtatgtttaatagaattgaagaaatgtatgctgtggagtgttcagtgctcagaactgagcagaatgttagattctaatttgttcttgcttgttagctcatttagtaaccttgggtcatttgctatagcatggacttggtttgttgttctggagaaaatacttcatttctaatgattgatctgcaaaggagtagcaaaaagtagtaacaattccttatccaatgcactgcccctagatgagtgatttagttttattaacaagaagcttagctaagccaaggtgtaccatcaactatttccctgtaactactacatgttaatgctatggcaacttcctaagacatctgtctttggtgccagctgtttttaagaggtcattttgaacgttcccacagacccttttatatccacgcagtggccttcaccgtctgccacatttgtgatgtagatatcctttcttcaagtcattatatattatcataaaggcttaataatagaaagctagagctgaaggggaatttagagataatctagtcccacccatttcattctacagatgagaaacaaatgtgagtggaagatccaagacatgacccaggtctcccacctcagtgtagtgcttttcatactaagttgaatcacacgctattgctattttttacagtcagaatgatcagatattggctatttcatatggttggcttaacatgatactacactgttattattgatacaatcacatttctcctcaattaagtgaaggaaactgaacttacaaaatcttatacatttagagacaggaggttaagttcagaacacatgagtatggtacacagatatggttttttgagggccacattttttttcttgtctgcattttaaaaaccaggaattaagtgtaaacatccagttagttccctggcttacctgaaaatacatgaaaacggaccttaattactgcatggcaacagtttggctattgctgagtgtattagtcaaggttccctagagggacagaactaataggatatatatatatgtaaagggggtttattaagtattaacttacctgatcacaagatcccacagtaggcggtctgcaagcctgaggagcaaggagagccagtctgagtctcaaaactgaagaatttggagtctgatgtttgagggcaggaagcatcagcaygggagaaagatgtaggctgggagggtaggccagtctctcctcttcatgtttttctgcctgctttatattcgctggcagctgattagattgtgcccacccagattaagggtgggtctgccttttgcagcccactgactcaaatgttaatctcctttggcaacacgctcacagacacccaggatcaatactttgcatccttcaatccaatcaagttgactctcagtattaacyatcatactgagtaacagcttcctccctccacatttactgaaatccccactgctccctaatgtcccacatccaggatgcgctgctcatttgcatttcctgcctcatccctgtaggtctagatactctccacctctgctaaagatcacttgagatcagtacccacctgttcccaaatgaagaaacaggtgtgttaagtgtaattttggaacaaaataggatttatctcattgtataagattatatggcttcttatggaggatgaccctattatgcataaggttgttttaagtgacttaacaaaaatattaacccaatgttatttcttccacaggtgcttcgaatccagaacattctaacagaagaacctaaagtgacacaggtttatgcagaaaatggcacagtgttgcaaggcagtacagttgcctctgtgtacaaagggaaactgctgattggcacagtgtttcacaaagctctttactgtgagctctaacagaccgatttgcacccatgccatagaaactgaggccattatttcaaccgcttgccatattccgaggacccagtgttcttagctgaacaatgaatgctgaccctaaatgtggacatcatgaagcatcaaagcactgtttaactgggagtgatatgatgtgtagggcttttttttgagaatacactatcaaatcagtcttggaatacttgaaaacctcatttaccataaaaatccttctcactaaaatggataaatcagttatgtcaattgtcagatattaaataacagtgtgtgaccccaaaagtacttaccctaaaacatgtgttgcctgaaagcacatgtgtgtatcgctgccttgccatgtcttgttcagaagacacaggggagcagggttagctcacgtgtctttagaactccagtactcacccagggactccagttcacaggccagaaaacatatgcattatgaagttcccctctactccatgcacatagtaagtctgactatggcagtcagacttacttactcccattttcccttcgatatatgactttttctcagtaaatattaacctgaactattccaactccccttgtactcttgctttttcaattctcctgttgcaatgacacataggaaaatcttaaaattcttgggagtgttgtcacacctgaaaattatgagtctctatgatcttggcacaaattgtacatttgagtgtctttgacttggttaaaggaagtttgttcacttcgatgactggatacagaatgaatcccataattgacatgggcgaagctaaaagtgtccccaaagactacactgttgttgaggtggtggtagtgctggtgggtttttgtttaatatttaaacttcttgttgtggaggctgaaaagaaaaaaaataatagaaaggtaaacaaacaaataaatagaaaagatcaacaacccctttggctatctactgagacatgactaggaagaaaacatgactttatcattttgttatagaarctgatatataaaggttacacattttcatttatttgtttttctgatttgaaggtataaccttcatgatgaattacttcttcagggtgttaaggcagtgactttagaaacaaatttttttcttgtttttgttttgtttttgagaccgaatctcactctgttgcccaggctggagtgcagtggtgcgatcttggctcactgcaacttctacctccgaggttcaagagattcttgtgcctcagcctcccggatagctgggactacaggcacacaccaccatgcccggctaatttttgtatttttagtagagacggggtttcaccatgttggccagcctggtctcgaacacctgacctcaggtgatccacccgccttggccttccaaagtgctgggattacaggtgcgagccaccacacccagccagaaacgaagtttttctaaggcacttgttatgatgatagtctggcatttccgggaaaatgttttgccaataaattgagaaccaccaacagttgtttaagaatcactgacttgaagtaataaacaggaacattttgtttgggtcaaaaaaccactttattcacagcaagattggagttactcatgattccagtgacataatatcccgtgccctacatgggctcaatttttctgagatgctgctcacagcccaggatgctgggttctctgaaagactgtcttgaaattatcaatgagtgtgatgcttagggaacacccccaacatatttcattatttagaaagaaagaatttcctgagtagttaggctccctaacatcttcaataaaatgaccacattctgttctttcttgttcttgatgatagataagcaaattccactgaagaaacaaaagcctatccaatttgacacagcacatactcaagatcactcaaaaagggacatggcttggttagaaatttcataacatacattgtgaaaaagaggaaaacagcttaattcatgtattctgtgattcccagatctaaattttcgcactgacataggcttagtcacatataaattatagtttgcgtgtgtaagaatgaatgaaattaatagccctcacttatttttaaggctttagaaagaatattgtttaaaataaccccatactctacgatggtcctgattcttccttagcttgcccctcgctatgtgagactghctacttaatggatttgtcacagaggttttcctggctgagagatatcagagactttgatggtgaagcagcgacaggggaacaaaatgacgggcgaggaagcttcgagtgcaggctttgctcttttaactttatgcccagttccataattgtgctttcaaatgtaatttctagctgccaatttacactttaccacagttaagacttagtttcatttccatgaaaaatgtgcactttgctcctgattgacagatatatgctttgacaattgatacaggtttacccagtcaaggcttgttttagttgaaggtgaaaatggaagagggaaaaaaaattgcttcaacagacctcagtatttctttttattgcattcgttgtctaacaacaataatactcattggcaagaaatttatttacactaacaaattaaatttaatcacaggtattkttagattggtcagaaaacaaaagaccactgtgatattttgcttgaatgcctctgaaaaccaaagagtaaggaatgtcatttgaaactttttgaacaatctagagaagtacatattaaccaagcacaagagaacaattcagacgtggcactattgtctcttccatgcaaatgatcagacatcaaaatgtacaaattaaaagcttaggtaacatgctatccatacttatcagacttaaaattattttcaaacaattcgtgttctttactgatatacaaagaaagctgaaaagaaatcaacttcttacagtggaatagaatttattctcttttattttcagctgcccagttttgtcagtaaggtgtagcaggtgtacaagtggttgcaacaccattaaaaaatataaaagcagtagttatattaaataatgttgaagaaaacatatacatatatatttaaggaatttcactaagcactaactaaatttcatgttgttgggaggtgttatctggctggagtgcctcttaattctttttaaggtaatttaattatttcttgccaattgttctttcttgaatgaatgattacatccttaacagaaaacctgggtgtataaataatacagctgaaagaaacagaagtgtacaccttccaacaacatacactcccaaccacttgtgttgtttttggcaacaaccaaaatgccattgcttgcacaaaaagtaaataaatgatcatatgatggcaacattcatcataagagagccagtaggcagtgactgtaagcatcacagccaccaattatgtcattttagaattgtgagcaaattcacaagaacacacagtgcaatttttagctgcatacatttcttctgagctccaactcagcaatatgcaatcttgacatcaaagcattagccaaatatttgaggaaattttcttactaaaataccaagtatctgataaatcaattttaccaaaatatataaacatatagaaggataagtgcatttagtagaaatacttacaataaaaaaatctcttaaaatctatgagccattcaatgtatacacaacgmaagaagtggcaataaggctatgattacagctccaggtcctgactgacctcgccaagttccatacacaatatattttttaatgccatgtgattgcagtgtgtgtgcgtgtgtaaggtgggagtgatattcacacatatgtagttctgaacatctacacaaacggcatgcacattgttgagaagttatctgttctcttattgcatacatcttactcactgttgaatccctagcagttttggggttgggttagggtcaagcataggaaatcatcatatttctttccttctccactcttgaggatctggaatcaggtcacagactgtgctgggtccacacgcttacatatgtgaaccttcaagtaactaccattccctcaataggcccacatagacaccacggacaagcaaataaggaccctctgtctaccataaatagaacttgatgctttcactttccaggagaagctgattctgtcggctttctctttgcccctccaacttcttagttgggcctattctatgctgctacttcaagttactcaaatgtgttttgtctggtgttatttttttctccagtgttttggaccaagactagatttcctgagactttaaatacgcaagacaaatgcaaacaaaatctgccaacatacccaggctgcttttcaggagtgaatcactgaagtgcatttggatttcctataacactactttcttttgggaatgtacagccctcccccagctccccatcccccatcataatgtaaaccattctaagagaaaatatggatgttttggctgggggtggtggcacatgcctgtagtcccagctacttgggaagctgaagcaggaggaccacttgagcccaggagtttgaggctgcagtaagacatgatggcaccactgcagtccagtctgggtgacagatgacagaaaaaaaaaaaaaaaaaaaaaagaaaagaaaatatggacattttatttctggactttatccttaaatgcttagctttagaatagtgcacaggtacatccttaataaaaagtaaatttgaaaagacaggaaaggactgtgcttttctcttccattttaccttttcattctgagaccactaaggtctttgcattaagtaggtgacgtgaaccctagtggccactgcccaccaaaatgcccctcatctccagctctgtcaggagtacctttagttactcaaatggaaatatctcagtgtaatgatggggctacaacatatccaaagtatagatggttctctcagggctgctggggcagcttcctttagaatcctctagaacactattgttaaacactggatctcctcttgaagtttagtctgcataacctttaacacttaaacatgaatcagagtatctatataaatgcaaattttcatttcccttttataaaatgcaattttcaagcacatgctaattctggtgcacaatgaacccagacaaatttgtcttcagcacaaactctaacggccgaggtgctagatcaaaccacctgtgaccatttttgtagcttgggactgggatattttaagatttcaggctagtgatgattacagggtcacagatagtggcaaaggtaaatctggttcctcattttccctcttgccactttgtttccaacaacaatggagcaaaaggtgacagtcccattttgtgccagttgaaagctgagtttggctttagtacctatcatactgcaatcatgaactgctgtgggttaaaaaaagcttgtgatgttgagggtgtgaaatcaattgtcaatcccagctaaaggatgatagccacagaacagctttattgtcatgaaactaaagggggacttcatcaggagtgttagaatggatgaaatgaggtttcttccctaacttaacattctgcagaaaattcctgattcaggtaaaaaaagaatgagattagtattacataaactgtgagttacttgaagggagatggtcttaaacaaagtaatctgttataaaactaacatcctttaatgggaaaccctgacccagatacagctcatacaatgctttctgtctgcagcttggcctcctcaccacacattccctcccaacaaagcataacctataccccaaaacacttttggctattgttagaatcatactgagctctcctttagggaatcagttcatagcaaccagatattccctttttgttcattttctgataataaaaactgcagtttttaaggttgatgaaataacaattctgtgttaaattgtaaggacactgaaaaccactagcattaaagtaggaattgtgcaagacattggagccttgattaggtatcatgcactacagtcaataaaagaaataatargaaaacaaaatgtkcacaagatctgaggtctttcactttgctttcatacccttaatcagtttacatcttatgctttgtggggcaatcaaaccaaatgacttttacaatttcatccgttttaagtggtaatgttaaaataactcacttcggcctaaaattactataatttaacttaaaaaatcaaaatacttataatactaaatgattttaggaataagaatttgatttataacattgtcagttggacatttatctaaacattcaatatacaaagttataaagaaaaatacttctaagatatttaagaaaatgcaatataatagatcataaattaggtgcaaaaacaagacacttacagacatttccagtatatacatccattttcaaatattaccaaagtgtaaacataacttaagataatcatccttctatttctactcttgaatacagtgaaacttccagtgtgatccaggtcacttttttcccaaagataagcaaaaatggcaaaaatttacaatagcaagcactaatattaccagatttttactaatttagtgttttagtatttgaaaagttttgccaaattgtatcactcattaatagtggcttcttatttctcatgatgttaaaaaataacaaagcaccagacatctcaagacattaatagagtatccaatatggcagtttcattatcatacccctaatgaagacagacagaaaaacataatggtgactttgataactgtaaaacacaatgttacttcatgtcaacgtttctgaggattgaatgaagggtctgtacctaatgacaaaagagctgacgcataaccgacaatactctggcaatgaaaagaaaacaggccttgggggtaaaacagaattaaaaatgtccagtttagataatttctgaattcagattttcagataaaaaaaaatcacactgttattaaaatacaagatggggctacaagggagttcccttaatctgttacactcaaaagccttgccgaggctctaaatatggaatacttctagtggaagatacgagatgctgggaacagagcagagattcccataaagtaaaagaagtaaaatactgtccaagaattcatgtggcctcaagtcttattctgaaacttgtcctttggaaagtggataacctcatttttagagtcaacgcagca

SEQ ID NO: 5648 - DNA, 36805 bp, Homo sapiens
  misc_feature (1)...(36805): n = A,T,C or G, or insertion/deletion polymorphism (see Tables 1-2)
agctgaacaaaggcaactcatggctttattccttttaggaaacaaggcatcagtttatcaccagggcaacaggccatgcaaaagttcagacttggccgggcgcggtggatcacgaggtcaggagatcgagaccatcctggctaacacaatgaaaccctgtttctactaaaaaaatacaaaaaattagctgggcatggtggtgggcgcctgtagtcccagctactcgggaggctgaggcaggagaatggtgtgaacccgggaggcggagcttgcagtgagccgagatcatgccactgccctccagcctgggtgacagagcaagattccgtctcaaaaaaaaaaaaaaagttccgactttttagagatgaaagcccctttcacctgtttcacaggaaataaccgtttaagtccgggcatcttacaagactgctgtgttagaaactggatagagatcagggtgagatgaaggggctcttagcttaggtgcagaaccgaaggaggcaccgaaaagctcagtaatcgagatagaaaacatgttttcatatttgagatactggggaggccagggatgctactcaatatcccacagtacacagaacagccacctagtctcgctctgttgcccaggctggagtgcaatggcatgatctcagctcactgcaacctgtgtctcccatgttcaagcgattctcatgcctcagcctcccgagtagctgggattacaggcgcccaccaccacacctggctaattaaagacagggtatcaccatgttggccaggcttatcttgaactcctgacctcaggtgatccacccgtcttggcctcccaaagtgctgggattataggtgtgagccagtgcacccagccctttttgcttttttagagacgaggtcttactgtgttgccaaggctggagtgcagtgccatcacagctcactacaacctcgacctgtgattctcctgcctcagcctcctgagtatctgggactacaggtgcatgccaccacacttggctaattatttgtagaggtggcaacataacatttgctatgttgcccaggctggtctcaaactcctgggctcaagtgacccttccgccatggcctcccaaattgttgggattacaggcatgagccaccgtacctggccttagttttctttccgatgccacaccaaatggctagagggtgtgtttgggatgacctgagtctggtaggcaacttccagtggaccccacagtgcgaccacctccctttgagtgtgggggagatgtagcgactggcttctagcagtaggatagggcagaagtgacagtaggttagtcttgtggttaggttacaaaactgacctctgtgatggtagcgtccctcgtcagccctcttgtcttgccctctcgctggctggcggtgatggagccggctgccatggtgagcggccctgtggagaagccagggaggaatggagacaatctggagaaacagaatcacaccaacaaccacgtgcgtgagcttgctgtgtgctcttgcttgggagcaagttacaggttcagcccaagaggagcggaccactccagggtgtaaataccaggagggggaattggaagactaccctaagcatgccgaccggagactgtgtgtgtgtagtaggtatttcttactgggagatcacggaaaagcaagtttgagaaacactcccatcagatgggtgggccgaggataacctcaaagcctttggttctccgaataggtgcgtaggactcacccaggcactctttccttttttaaattgtggtaaaaactacataacagtggccaggcgtgatggtgcacgcctgtaatcccagctattagggaggctgaggcagaagaactgcttgaaccaagggggcaccgctcctggctgtaacatgttttcaatatcccccctcttcggtggcacaggggctggccccatatacatgtgcgatggcaactgacagggtccctgatacaccggagtgctccagaaacaccccattgcgtgggacggaggatgttaggtggccctcctagcgtttgagtttgataaatgagcaaaggaagtggtttttactagaaagccagctttcctttttttttttttttttttccagccagcaaaccccaaacaggaacctatggttggtgatggatgtgcgttcagaaagcagggagggagggggagtcagaggtgagggggtcatcagccatagctgtccgctgcatcaccccctcgctatctccaggaagcgttctgggcttttcctgttgtgcagtgtggaagtgctctatcttcattcatatcaaggaaagtcaaaggacaaactaaagccggcagcgtctttctggcttcctagtcaggctgttcggtagcggagtgtcaccctgatttccagccccgcagcacacacagtgagagcctgcctggcgtgattcagaggcaacgtatttcccaaggtggctgtgaaggaaccagggggataaacacagcccgtgaaccgcacgccagaggacaggtccggctgcctgccgcggagtcgtcacggcgtgtcgcgtctgagcgcttctccaaagcacccaagtggcacccggggtgacatttacatcatcttgagtacagttctctcaaggaaaaagcaagcccagcatcttctgccatggcaaccctggcttggagcctccataagagagaaggccctaagaataccattttcttgctctaagttgctcttacgggaaagaagtgataatattcttcctaaacgccatcattcgtgcatccttcccacctacatgtgtcaccggatcattctccgcctgggcggggccgtcctgtgcactgcagaatgctgagcagtgtccttggcttcgaccgaccacatgccaggagcaccccaatttctgccatcgggtgattgacttcactgttgcatttgattttttatgtatcttttaaaaggacccaatagggccaggcacagtggctcacacttgtaatcccagcactttgggaggctgaggtcggtggattgcttgagcccaggaggagttcaagaccagcctgggcaacatagtgaaaccccaactctacaaaaaacaaatgttttatttttatttattttagatggagtttcactcttgttgcccaggctggagtgcagtggcgcaatctcggctcattgcaacttctgcctcccgggttcaagcgattctcctgcctcagcctcctgagtatctgggattacaggcatgcgccaccacacccagctaattttgtatttttagtagagatggcgtttctccatgttggtcaggctggtctcaaactcccgacctcaggtgatctgcctgcctcggcctcccagagtgttgggattacaggcgtgagccaccacgcctagccgggtttatagttttataacccttatgacaaatctcatagtattctgcagggataagcatgaaaccacttgttcaataagtgcaaacaaaaacgccaacaattcttaagacatttctaatcttattttaccaataattttaaagccagcttatgtattaaagatttataactacttttattaacacgtttaaaattctatgcagcttaaagcatttataatggataaaactgccaatactgagtgcctgacataatatttgaaaggtggcaggcattcaaccatggtcactgaatgagagatgtagggaagatgatggcagggaggtttttagatatcaacaccctgatagttctcattttaaccacctgtaagtgcacatacaagtcaacggcactggccgggcgcggtggctcatgcctgtattcccagcactttgggaggccaaatcacaaggtcaggagatcgagaccatcctggctaacacggtgaaaccccgtctctactaaaaatacaaaaaatcaactaggcatggtggcacgcacctgtagtcccagctactcaggaggctgaggcaggagaatcgcttgaacccgggaggcggaggttgcggtgagccaagatcgcgccactgcactccagcctcggcgacagagtgagactccgtctcaaaaaaccaaaaaacaaaaaacagtcaatggcattaaatataaatacatttacagtgttgtgtaaccatcaccactatggatcccccagactttgtcatcatcttcaacctaagcgctccctattaaatagtaactccccacttttcccaggccttggcaaccaccattctaatccctgtctctatgaatttgactcctctcgatacctcagataagcggcacaatgcagtatttatctgtcaagtccggaatatttcctttagcataatgtcttcaaggtccatcacgttgtagcatgtatctgaatttattcttttataatattttttattttttggagacagaatctcgctctgtcacccaggctggagtgcagtggcgtgatctcggctcaccgcaacttccgcgtcccgggttcaagccattctcctgtctcagcctccggagtagctgggactacaggtgcctgccgccatgcccggctattttttttttgtattttttgggggttttactgtgttgcccaggctggtcttgaactgctgagctcaggcaatctgcctgcctcagcctcctaaagtactaggattacaggcatgggccaccacgcccggccttatttttatttttgagacagtctcactctgccgcccaggctggagtgcagtggtgcgatctcggcttaccgcaatctctgcctcccaggttcaagcgattctcatgcctccgtctcccaagtagctgggattacaggcacctgccaccatgcccggctaatttaacgcccagctaatttttgtatttttagtagagatggggtttcaccatgttaaccaggctggtctcggactcctgacctcaggtgatccgcccgcctcggcctcccaaagtgctgggattacaggcgtgagccactgtgcctggctgatttttattcttttagttaaggctggttgatattaccttgtgtgtatataccacatgttgtttatccattgttgttgatggacatgtgggtggtttcaccttttggctattgtgaataaagctgctatgaacactgtgtacaaatatgttagagaccctgttttcagttcttttaggtgtgtaccccgaagtggaattgctggattttatggcaatcccacgtttaacttctggaggagctgctggaactgttttccacagcaggggcgccatgttacgtccctgccagcaatgcacgcgcagtccaatttctctgcatactcaccaatatctgctattttccattaaaaaaaattatagccggtcgggtgcagtggctcatgcctgtaatcccagcactttgggagaccgaggcaggtggatcaactgaggtcaggagttcaagaccagcctggccaacacagtgaaaccccatctctactaaaaatacaaaaattagcctggtgtggtacatacctataatcccagccacttgggaggctgaggcaggagaatcgcttgaacctgggaggtggaggttgtagtgggccgagatggcgccactgcactccaacctgggcaaaaagaacgagactttgtctcaaaagaaaaaaaaaaaatacagccattccagaaggtgtgaagtcatatctcactgtggttttgatgcgtattttcctagtgacatcagggagtttatgggagcacgggaacacagaccaggccccagcaggcggacaaacggtgcaacgccaggctggccagaggagataagcgcggctccttggagcttgtgtgcaagtcactgtactgaggagccggctacggctcgatgagtctcaattaggaaaggccggggctggtggaggaagggaggagagcattcttcatcctcatcacatcctgagcctgtgccccaggctcccaccacttccctccctggccacagagctcaggacagggctgaggaaccatgtctccatccccgaccgccctcttctgtcttggtgagtcctgagggtcagatctgggaaatgctgaaggacaggcatggactgccagacaaaggatttttaagaawtttgcattggtgatgaatttcaggacaaaaaggaacctgtaagagccccttcatttgttgggtggggaaacggggggccagcgagctggcattttgcatgagttattccagtgtattcatggctgggtcaggaaatgaacagagtatcctagcattggtcacaactttgttctactacactgcagttgccccttttttaaaaaatgtgggccaggcacagtggctcacgcctgtaatctcaaccttgggaggccgaggtgggtggatcacctgaggtcaggagttcaagaccagcctggtcaacatggtgaaaccccatctctacaaaaattagccgggcgtgatggcgggtgcttstaatcccagctacgtgggaggctgaggtgggagaattgcttgaaactgggaggcagaagttgcagtgagctgaggtcaggcattgcactccagcctgggcaacagagagagcctccatctcaaaaaaaaaaaaaaaaaaaaaaaaaaaggctgagtgccatggcttacacactttgggaggccgaggcgggtgggccatctgaggtcgggagtttgagaccagcctgaccaacatggagaaaccccatctctactaaaaatacaaaattagccgggtgtggtggcacatgcctgtaatcccagctactctggaggctaaggcaggagaatcgcttgaacctgggaggtggaggttgcggtgagccaagatcacaccattgcactctggcctgggcaacaagagcgaaactccgtctcaaaaaaaaaaaaaaaattgtggaattgatatctggactaggtatggatttaatttgtcagtatcccctacagtagtggagtaaatagtctcctgatggatgggtggcaggtcgaatgcatttctgctgcctgatcttcacttgtgctgggcatgtcgaatgmattatttcctgatttcttcagaatttgaccactaaagggacagcatctccaaaaggctaagcaggaagaagatggttgcattactggagatgagagggttaactgtgaatataaacaacctctcattcattatccatccatggatgtattctttttttctttttgtttgttttttgagatggagtctcgctcagtcggtcgctcaggctggaatgcaatggcatgatctcagctcactgcaaactctgcctcccgggtccaagkgattctcctgcctcagcctcccgagtagttgggattacaggcatctgccaccaggtctggctaattattgtatttttagtaggggcggggtttcaccatgttggccaggctggtctcaagctccttacttcaggttccacccgcctcggcctcccaaagtgctgggattacaggcgtgagccaccgcacccagcctgttttaacttttatttatttaattttatttgagatagggcctcacttctgtcacccaggctggagggcagtggcatgatcatggctcactgcagcctcaacctcccaggctcaaccagtgcctccccatcagcctcctgagtatctggaactacagttgtacaccatcatgcctggcttgtttttgtaatttttttagttacgggggtccgctatgttgcccaggctggtcttgaactcctgggctcaagcgatccacccacctcggcctcccaaagtgttggggttacaggtgtggcctgtacaggttactgcatctggcttgttgcttcagtagcttttgggatacaagtggttcttggttacatggatgaattatattctggtgaattctgagattttagtgcacctgtcacctgactagtgtaccttgtacctaatgtgtagtttttcatccctgccccacttctgcccttcccttctgagtctctgaagtccattacatcactctgcatgcctttgcatacccacagcttagctctcacttataagtgagaatatacagatttttgttttccactcctgtattactttacttagaataatgccttccagctccatccaagttgctgcaaaagactttttttttttttttttaaagacggaatytcgctctctcaccaaggctggagtgcagtggtgtgatctcggcttactgcaaactccacctcccgggtttaagtgattctcctgcctcagcctcccgagtagctgggactacaggcacccgccaccatgcccggctaatttttgtatttttagtagagatggggtttcaccatgttgggcaggatggtcttgatctcttgacctcgtgatccacccacctcggcctcccagagtgctggcattacagatgtgagccactgtgcctggccaaaagacattatttcactccttttaatggctgagtagtattccacgctcatttatttttatttatttttattttttgacatggagtctcactctgttgcccagactggagcgcagtggcatgacgttggctcactgcaacctccacctcccaggttcaagcgattctcctgcctcagcctcccaagtagctgggattacaggctcctgccactacgccccgctaatttttgtatttttagtagagacagggtttcaccatgttggtcaggctgctctcgaactcctgacttcaggtgatccgcccaccttggcctcccaaaatgggattacaggtgtgagccagcgcgcccggccggtgagaacatttaaaatctactatcggtgatatgcaagtgtacaatatgttgttattaactacagtcaccatgatgtgcagtagatctccaagacatactcctcttgtccaactgaaactgtcctcctctgaccaacatctccccaaaccttaccccaccgccccggtaaccaccactgtgctctctactcctgtaagttcccaagtccacactctttaccactaattggtgctgctagggtttgaatctactcctgccagctgtaggactgtggataagatactgtctcactagcctgatgtataagaggggactgataatggtgggtaacccgtacgattatggcgacttggagtccatgcacagaaggcgctcagcacggcgcctggaagactcccagccatggtacagcgtcgcatggaaacctacaaagaggctgaggtgggctgtgatgcggcaggaggagggggacagagaagcggccggagcttgsgttggggtgcagagggagcctggggtggacaaagggtggtggctatgggggcgctggtgacaagttgtcactctctgagctcagagtcaagacatgakctgggttcacccacttcttgctatgtgagctacacaaggttgcttggcctctgcccagtttccttatgtttacagtgggaatgacaactatcccgcctttgtgtgtgtgtgtgtgtgtgtgtgtgtgtgtgtaagaatgagggttaccagataaaacactggatgcctggttaaattggaatttcagataattagtactttttttttcctcctcctcttcgttttctgagacagggtcttgctctgttgtcagtctggagtgcaatggggcaatatcatttttttttttcctcgagatggagtcttgctctgttgcccaggctggagtgtagtggcgtgatcttggctcactgcaacctccgcctcccgggttcaagtgattctcctgactcagcctccccagtagctaggattacaggcacgtgccaccatgcccagctaatttctggtatttttagtagagatggtgtttcaccatgttgaccaggctggtcttgaactcctgaccttgtgatccgcccaccctggcctcccaaagtgctgggattataggcatgagccaccgtgcccggccagtggtgcaatcttacctcacagcagacttgacctcctgggctcaagcaattccaggaggggatcgcttatgcacatgtatttgtatacatatgtatatatatacacacacacacatgcatacatatatacgtatacatacatatacacatatgtgtatgtacacacgtatatgtacatacacatgtatgtatagatgtaggtttacatatatgtactatatgtgtatatacatatagtaatcagatcagggtaagtagcacacccatcttctcaaacatgcatcctttctgtgttgggaactttccccatcctccttcaggctatttgaaacgattattatatatattacatcctatcatgtaatcatggaatactgattcaaccaaatgttgtaaataccgggaaacccatggccagcacatgctgagacgtcctgacttacacgctgaggctccatcctgctccatccttggagcccaatgcatcccattagtgtggggttttatcgcatatattacatagacaataaaatacaataatatacaatatgcaatagtatttacaatacttgtctacacaattgcatactattgtaatgtacttggatattatttaatattgggagactgaagggaggaaacgaaggaacagcaatgtctcaggtcccattcctcacatccactgaggaagtcaatgggcaatgtctaacacgaacgagcccaccgtgtctaacacaacacaaacgagtccacygtgtctaacacaacacgaacgagccgtgtctaacacaacacgaacaagcccaccgcgtctaacacgaacgagcccaccgcgtctaacacgaacgagcccaccgtgtctaacacaacacaaacgagtccaccgtgtctaacacaacacgaacgagtccaccgtgtctaacacaacacgaacgagtccaccgtgtctaacacaacacgaaggagyccaccgcgtctaacacgaacgaacccaccgtgtctaacacgaacgaacccaccgtgtctaacacgaacgagtccaccgtgtctaacacgaacgagtccaccgtgtctaacacaacacgaacgagtccaccgcgtctaacacgaacgagtccaccgtgtctaacacaacacgaacgagtccaccgcgtctaacacgaacgagcccaccgcgtctaacacgaacgagcccaccgcgtctaacacgaacgagcccaccgcgtctaacacgaacgagcccaccgcgtctaacaccaacgagcccaccgcgtctaacacgaacgaaccctccgcgtctaacacgaacgagcccaccgcgtctaacacgaacgagcccaccgcgtctaacacgaacgagccctccgtgtctaacacgaacgagccctccgtgtctaacacgaacgaacccaccgtgtctaacacgaacgaacccaccgtgtctaacacgaacgagtccaccgtgtctaacacgaacgagccctccgtgtctaacacgaacgaacccaccgcgtctaacacgaacgagtccaccgtgtctaacacgaacgagcccactgtgtctaacacgaacgagccctccgtgtctaacacgaacgaacccaccgcgtctaacacgaacgagtccaccgtgtctaacacgaacgagcccaccgtgtctaacacgaacaagtccacagatagcagtacgccaccatgccttgccctcctctcccaccacccccagccatggatctgctttcttctccatctcctatagatttacctattctggatatttcatgtaaatgacctcataaactatgtggctttttctgaccggtttctctcacttaaattacattcctgtgtgtcttttgaagaaatwattaggacagagtaaagcatatgcatgcaaaygtcttatcaccgcgcccagcaggcaggaatgtccataaaagcgagtcctggcatctggtccctttcttctttcctcagggctgtgtctggggcgtgtgccagcgcagagtggtgagtccttccccagaccccttccctcctgcgggatcyrccagcgcgggrgcagcggggtccaggcggggtctgcggggaggctgacccagccctgctcctcttccaggaccgctccccaagccctccctccaggctctgcccagctccctggtgcccctggagaagccagtgaccctccggtgccagggacctccgggcgtggacctgtaccgcctggagaagctgagttccagcaggtaccaggatcaggcagtcctcttcatcccggccatgaagagaagtctggctggacgctaccgctgctcctaccagaacggaagcctctggtccctgcccagcgaccagctggagctcgttgccacgggtaaaggaagggggatcrragcctgggactgcgtggtcctccgttcaggacacaaatacgggggacattgagggcagggattagggtgaggcaaacgaggcamtggcctagcgggtggtggtgccacgacatttatggatcaatgtgaataatattttgttttttggacacagggtcttgctgcgtcacccagggtggagagcagtggcgcgatcttggctcactgcagcctccacctccagggctcaagcgattctcccgcctcagccctccaagtagctaggattacaggtgtgcaccaccacgcccagctcattttttatgtttttatagagatggggtctcttgacagttttcacaaaaggcattaaaatacaaaagagagagagatagggtctcgctatgttgctcaggctggtctcgaactcctgtgggctcaagctatccttccaccttggcttcccaaagtgttgggatttcaggcgtgagccactgcatctggctgtgaataacattttcatgcaatttttwaaaaaatcaaaataaattgcaaaaacatccacaatgaaaaaaaccagaatttcaaataaaggcagaatcagccagtgcctgtgtcaagtcataccagagtctgtgccaaaaygaaaaacaggcamccctttatctgtgttttaatgcacttaaaaaaattagcgatggggtcttgctacactgcccaggcyggagtgcagtggctgttcataggagcagtcatagctcactgcagcctggagctccttgccttgagcaatcctcctgcctcagcctcatgagtagcagggactacrgtcaygggccaccgtgcttggctcgggattctttttaaaactttgttttggartaatttttagactgacagaaaagttccaaagataatattaatggaaatatttcacccaggatcccctcatgttaacatcttacatttgttacaaccaaaaaataaacgtagcactggtcccagtggtttacacctgtaatcccagcactttgggaggctgaggcgggaggattgcttgagctcaggagttcaagaccagcctgggcaacatagtgagacctcatctttaaacaaaattaaaaattagtggggcatggtggcatacacctatagtcccagctactcaggaggctgaggcaggaggatcgcttgagccagggaggccraggctgcagggagctgtgatcacgccactgcactccagcctgggtgacagagtgagaccctgtatcaaaaaacaaacaaaaaactaaccatagacacaactatrttatatcaagtaaactccaggctatttgaatttcaccagtctttccactaatatcctatttctgttcccagaccccgtccagggccccacagtgcatttagtatttatgtctccttagactcttgattggtgcaaatattctaatttcttttcttatttwtttwttttttttaagagaagaggttgggccgggcgcggcggctcacgcctgtaatcccagtactttgggaggctgaggtgggtggatcacttaaggtcaggagtttgagaccagcctggccaacatggtgaaaccccgtctctactaaaaaaaataataataattagctgggcgcggtggcgcactcctgtaatcccagctactccggaggctgaggcaggagaatcgcttaaacctgggaggcggtgagccgagattgcaccactgcagtccagcctgggcgacagagcaagactccrtcttgggaaaaaamaaaaaagagaagaggtcttactatgttgcccaggctttagtacactcgctgtattcacaggcatgatcatagctcactttagcctcaaatccctgggctcaagtggtcctccctagtagctgggactataggtgcacccagttagtgcacttttaaatggttattttctagaagtaggttttggaaatagcactgatgcgcttgcatccacaaaagcctagaatgtaaaattctaataaatctttcaggggaataaagtattcaaacagaataatgtgagttttaacgacctactcttcaaattttcaataattttttcaaataygttaattgtttgggaataattaaattttacatcccaggagagtgcctcactcacgccaccctaattcctggccagctgcactgtggtctattccgcgttataaatcctgcctccctcccctcttccctgcctcactcccctccacagcatcactggcctcctctctgctactagaatggaccagcctggctgcctcattacttctttcagggtcagactcaaatactctcttctcgctaagtatatcccccaccaccctagtcaaagtggccctcctcactatctggtatgtgaagtatacctttttttatcttggtggtggttgtctatttttaattcctggtcgggcacggtggctcacgcctgtaatgccagcactttgggaggccgaggtggacggatcacctgaggtcaggagttcgagatcagcctggctaacatggtgaaaccctgtctctactaaacatacaaaattaactgggcatggtggtgcatgcctgtagtcccagctactcgggaggctgaggcaggagaatcgcttgaacccaggaggtggaggttgcagtgagctgggatcatgccactgcactccagcctgggcaacagagtgagattctgtttcccaaaaaaaaaaaaaaaaaaaaaaaaaaaaaaaatatatatatatatatatatatatatatatatatatatatatatatatatatatatatatgccattgcactccagcctgggtgacagagcgagactccgtctcaaaacaaaacaaaacaaaacaaaacaaatgaaacaacaaaaaaagaatacagacagacacataatagttgcttaagtgaaaattaagagaaaatattgctgagtgaatgttacagttatcaggcagcttatatatttccttccttccttcctccctccctcccttccttcctctttctttctttttcttcttgttgagtgaatgccataattattaggcagcttatatttttatcttccttacttcctttcttttgctttctctctctgtctttttttgagacaaggtctcactctgtcacccaggctagtgtacagtgatcatagctcactgcagcctcgccttcctgggctcaagcgatcctcccaccttggcctcccaaagtgctgggatgaccggtgtgagccgccgcacccagcctcaacctttgtttttctgactcctgtgtgcaggcatgcatcaccacaccggtctatgacaacaacctcacatcagagtagtgtaggttcgtgtttaggagcggagaccctggaatcaaactctgtgagtgcagatttcaactctgccacttatgatcttggacaagttttttatttatttttaaattaaaatatgtccagctttgttgaggtataattgaaaaacaaaaatggaatatatccaaggtgtacaagttgatgttttgatatacgaatccactgtgagacagttactactagcaagctaattaacatacatcacctgacacagttaacttttttgtgtgtgagaayacttataatctaccctcttagcaaatttcagctrtacactgcagtattgttacctagagttggacaaattatttaatgccatgtgccttagtttcatttataaaatagggacattaagagtgaggactccataggtctctgaggattcactgaactgatayacatcataagtttggaaggcacccggaagctagcactgtcagccacatttacaacgtaacaattgtatgtggcaatacaagcttacagcacagtataagcttaagctatttacttactccagcgcttgctaggcaacaggcactctgcaaattactgtrtactgtctcattcagtcatccccattttaacagaacaaggcagtgaggctcagatacagagggagatttgtctccagggccaccaggcccctgaaggcagaactaggatttgcacccaagcactaggacgtgagcacagcctccttcctcaaccactgggtgactcgacctctctgtgagcttgggtgggggagtgcgctctctgggagggatacagccaaaaagctccccagctcttaggcaggtgtggggacctccccagtctcagctgagatgctggctcctgccttcaacatcagactttctttttctcccaggagtttttgccaaaccctcgctctcagcccagcccggcccggcggtgtcgtcaggaggggacgtaaccctacagtgtcagactcggtatggctttgaccaatttgctctgtacaaggaaggggaccctgcgccctacaagaatcccgagagatggtacmgggctagtttncccatcatcacrgtgaccgccgcccacagcggaacctaccgatgctacagcttctccagcagggacccatacctgtggtcrgcccccagcgaccccctggagcttgtggtcacaggtaggggtagtgcagaccaaacctttcttcctcagcctttataggtcctgatggccattccaagggaggggccataagtgggaaggaagtgggagggcaggaagccctgggctgcaggggcggggccgtaggtgggaaggaagtgggagggcaggaagccctgggctgcaggggcggggccgtaggtgggaaggaagtgggagggcaggaagccctgggctgcaggggcggggccgtaggtgggaaggaagtgggagggcaggaagccctgggctgcaggggcggggccgtaggtgggaaggaagtgggagggcaggaagccctgggctgcaggggcggggccgtaggtgggaaggaagtgggagggcaggaagccctgggctgcaggggcggggccgtaggtgggaaggaagtgggagggcaggaagccctgggctgcaggggcggggccgtaggtgggaargaagtgggagggcaggaagccctgggctgyaggggcgsmgccrtaggtgggaaggaagtgggagggcaggaagccctgggctgcaggggcggggccgtaggtgggaaggaagtgggagggcaggaagccctgggctgcaggggcggggccagaggtgggaaggaagtgggagggcaggaagccctgggctacaggcagctgggagaatggaggtttcttttttttttttttgacgaagtctcactctgtcacccaggctggagtgcagtggcgcgatctcagctcactgcaacttccgccttccgggttcaagcgattctgctgcctcagcctctcgagtagctggaattacaggtgcctgccacgatgcctggccaatttttgtatttttagtagagacggggtttcactatgttggtcaggctggtcttgaactgacctcatgatctgcccgcctcggcctcccaaagtgctgggattacaggcgtgagccaccgcgtcggacttgactaccattcttaaagggggtttctttcaaaaragagcagcatacctcataatgtggttatatacatgcaatggaatattatgcagccttaaaaaagaaggaaattctgacacatactacaacatggatataccttgaggacattatgctaagtcagtcagtcacaaaaggacaactactgtatgattctastcaaaggaggtatctaatgtcaacactgtagaaacacaaagtacaatggtggttgttaagggccagaaagaggagagagaaggaattagtgtttaatgggcacagaatttcagttttgcaagaaaaataagttctagaggtcaacatattgtaccacaatgtgaacatacccaacgccactgatcagtacatttaacaatgtcatattaaatcaaacaaaatacatcatttagtttttggtagaaaaatctgttttgcccccagggtcacagtgaggggtaggacacaggaatccagaagaaatagaactgaggttgaaaaaggyggacgggagctgcatgcatttccttgttaatagcccagaatgtgccaggtgtgctttacaaatgctgctgcttttttttttttttttttkkrgrgagtctcactttgtcacccaggctggagtgcagtggagtgatctcagttcactgcaacctccacctcctgggtttaagcgattctcctgcctcagcctcctgagtagatgggattacaggcacctgccatcatgcccagctaatttttgtatttttcgtagagacagggtttcaccatgttggccaggctggtcttgaactcttgacctcaggtgatctgcctgcctcggcctctcaaagtgctgggattacaggtgtgagccaccacgccyggctaagcctktttttttcagatggagtcttactgcgtcacccaggctggagtgcagtggtgcgatctcagatcactgcaacctctgcctcctaggttcaagtgattctcctgcctcagcctcccgagcagctgggattacaggtgcacaccaccacgcctggctaatttttgtatttttagtggagacggggtttcaccatactggycaggctgggcttgaactcctgacctcaagtgatctgccctcctcagcctcccaaagtgctgggattacaggcatgaggcactgcacccagctcaaatgcttattaacatccacaacagtccagtgatgtaagctactttaggctcatttttccggtgaggaaactcagtcacggagatgtttcgttatttgttcaggacccacagcgacagagcacagatttatctcattttctgatttcccaggaacctctgtgacccccagccggttaccaacagaaccaccttccycggtagcaggtaggttctgcagggtccattctggtgcacagcgtatgaggtacacggaccccttctctctctcctctctgcctagacttctcgatttaattcagttggttctttcacagatttgctttgttttaaaaatcctttatttctgcctgtaaacagggtgggtgtcctaagtagttagatgttaagatgctgcccccaatcctactctaggtggatggtttatcacatataacatgcagaagaataatcggagtggcttgctatactgtggagtccagctggttgaatatgggtgacaaaaacaaacaaactaaccaaccaaccaaccaaccaaccaaccaacaaacctgtagagtccgggactctgtttctgagtcactgawtgcattgatcagcggttctcaaacttccatgagcataagaatcacctggaggcttaaagaatagatttctgagcccccagggcttctgcttcagtaggtctggggtgaatccagtcattttcattcctagtaagttcccaggtgatgctgatgctatggctccagaatgctgctttgagaaccactgcggtaagttttgtgtgaggcgtgttatcccctccactttcacaaacrtctcagctgaatacggtgtaccagactacggcctgcactttaagaatatcatacgctaggctggaggctgggcgtgtctaacattccctgygtctcagagtgaagcaccaaggcaggagaaacatgctggaaagagccgaggttgataaggatgagatttgcggggttgagggcagagtgagggctattatgcctagtgggcagggacatggaagatggtcacatactgtgtgcgtgcatrtgygtgtgtgcgtgcatgtgcgtgtgtgcgtgcatatgtgtgtgtgcgtgcatatgtgtgtgcatgcgtgcatatgtgtgtgtgtgcatgcgtgcatatgtgtgcgtgtgcttctgactgaatttttgaactttctcttttgaaatggttctagagtcacaggaagtctacaatgatagaacagaagaatcccatgtgctctttttccagtttcctctaatggttacatcttacgtaattagagtacaacataaaaaccaggaatttgacattggcataaagtaggtgtctagttctatgccaatttgtcacagttgtagattcgcgtcaccatcaccgcagtcactgtacagaactcttccgtctcacaagggcctcccttgggctacccttttatattcacacctacacccttctccttcccttgccatccctaactcctggtatccattaatttgttctccatctctataatcttccatttctagaatctgatgtaaatgggatcatccagtatgcaaccgtttgagatatccttttgtcactcagtgcaatgcccctgaggcccatccaagctgctgtatgtatcaatgatgtgttccttttgattgctgagcartatttcatgctatattaggccgattttgtgctgctataaatayctgagactggatcattgataagaaaagaggtttaattggttcatggttctgaaggccgtataggaagcagaaggctggcttctgcttttggggaggcctcaggaagcttacagtcatggcagaaggcaaagagggggtagctgtctcatgtggtgggagcaggagcaagagagagagagagttgggactgggggacatgccacactttgcaatagccagatcttgtgagaattcacttactattgcaaggaaagcaccaagcaatgagggatccacccctatgatccaaacacctcccaccaggcccccacctccaacattggggatcataatccagtatgagatttggtgggaacacatattcaaactgtatcacatggcatgcaaataccacacgctgtgttgaaatcaaaatcaaaacaaggtgtattaaatagggaatcctttccccattgcttgtttttgtcaggtttgttgaagatcagatggttgtagatgtgtggtcttatttctgagatctctattctgttccattggtctatgtgtctgtttttgtaccagtaccatgctgttttggttactatcaccttgtaatatagtctgaagtctgagcctgaggcctccagctttgttctttttgcttagtattgtcttggctatatgggcccttttttggttccatatgaattttatagttttttctaattgtgtgaggaatgtcaatgatagttcaatgggaatagcaatgaatctataaattactttgggcagtatggccattttcacgatattgattcatcctatccatgagcatggaatgtttttccatttgtttgtgtccgctctgattttcttgagcagtgaattgtagttctccttgaagatgtccttcactttccttgttagctgtattcctaggtattttattctctttgtagcaattgtgaatgggagttccttcatgatttggctctctgcctgtctattgttggtgtataggaatgcttgtgatttttgcacattgattttgtatcctgagactttgctgaagttgcttatcagcttaagaaacttttgggctgagatgatggggttttctagatataggatcatgtcatctgcaaacagagatagtttgatttcctctcttcctatttgagtatcctttatttctttctcttgcctgattatcctggccagaacttccaatactatgttgaatasgagtggtgaaagagggcatccttgtcttgtgctggttttcaagggaaatgcccatttagtatgaaattggctgtgggttaataaatggtgctgggagaattggctagccatatgcagaaaatagaaactggacccgttccttacaccttgtacaaaaattaactcaagatggatgaaagacttggatgcaaaacccgaaaactataaaaaccctagaagaaaatctaggtaataccattcaggacacaggcatgggcaaagatttcatgacaaaaacgtcaaaagcaattgtaacaaaagcaaaaactgacaaatgggatctaactaaactaaagagcttctgctcagcaaaagaaagtatcatcrsagtgaacagacaacctacagaatgggagaaaatgtttgcaatctatcaattcacaaaagtctaatatccagaatctacaaggaagttaaacaaatttacaagaaaaaaaaaaccattaaaaagtgggtaaaggacatgaacagtcacttctcaaaagaagacgtttatgcagccagtaaacatacaaaaaaaagctcaacatcaccaatcattagagaaatgcaaatcaaaaccacatttagacaccatctcacaccagtcaaaatggcgattattaaaaagtcaagaaacgccgggcgcggtggctcacgccggtaatcccagcactttgggaggccgaggcaggcggatcacaaggtcaggagatcgagaccatcctggctaacacggtgaaaccccgtctctattaaaaatacaaaaaattagccgggcgtggtggcgggcgcctgtagtcccagctattcgggaggctgaggcaggagaatggcgtgaacccgggaggcggaggttgcagtgagccaagattgtgccactgcactccagcctgggcgacagagcgagactccatctcaaaaaaaaaaaaaaaaaaaccaacaaaagtcaagaaacaacaagtgctggcgaggctgtggagaaataggaatgcttttacactgttgggaatgtaaattagttcattgtggaagacagtgtggtgattcctcaaagacccagaaccagaaatcctttttcctttttttttttttgagatgtagtattgctcaatagcccatgctggagtgcagtggtgcgatctcggctcactgcaacctccacctcccaggttcaagcaattatcctgtctcagcctcctaagtaactgggactacaggcgcctgccaccatgcctggcttttttttttttttttcttttagtagagatggggttttaccttgttggtcatgctggtctcaaacttctgacctcaggtgatccacctgcctcggcctcccaaagtgctgggattacaggcgtgagccaccgcaccagggccaccttttttttttttttttttttttaaacagagtctcactctgtcacccaggctggattgcaggggcatgatctcggctcactgcagcctctgcctccagggttcaagtgattctcctgcctcagcctcccgagtagctgggactgcaggtgcatgccacaacgcctggctaatttttggatttttgctagagacgggagtttcaccatgttggccagggtggtcttgagctcctgacctcaggtgatctgcccacctcggcctcccaaagtgctgggattacatgtgtgagccactgcgcctggccagaaataccatttgacccagcaatcccattactggttatatacccaaaggaatataaatcattgtattataaagatacatgcacacatatgttcattgcagcactattcacaatagcaaagacaaggaatcaacccaaatgcccatcaatgatagaaaggataaagcaaatacagtacatatacaccatggaatactatgcagccataaaaaggaatgagatcatgtcctttgcagggacatggatggagctggaaaacattatcctcagcaaactaacacaggaactgaaaaccaaacactgcatgttctcacttgtaagtggcagctgaacaatgagatcacatggacacagggaggggaacaccacacactggggcctgtagggggaattgggggagggagaggatcaggataaatagctgatgcgtgtggggcttaatacctaggtgatgggttgatgggtgcagcaaaccaccatggcacacgtttacctatgtaacaaacctgcacgtcctgcacatggattctggaactgaaattttaattgaaaaaaaaaaaggtttattaatgcatctcacacgaagagaaataacaaagaccaaataatacccacactctcattatgccaccgagagctgagcataaactagttttttccaagctggttccaccataaaaagactcccaggatagtacccactgcaacaagagcttcgtatttatcagctgaggcagttcaggaatattttggtggcctcaggaggcccctggttaagaaaatggcctggccgggcgcggtggctcacgcctgtattcccagcactttgggaggctgaggcgggtggatcacaaggtcaggagatcgagaccatcctggctaacacggtgaaaccccatctctactgaaaatacaaaaaaattagccaggcgtggtggcgggtgcctgtagtcccagctactcgggaggctgaggcaggataatggtgtgaacccgggaggcagagcttgcagtgagccgagattgcaccactgcactccagcctggacgacagagtaagactctgtctcaaaaaaaaaaaaaaaaagaaaaaaagaaaatggcctaagttggaaggtggagatcccgtgttctgaggctaacacgagctcattcttcctctaggctcacgaagacatggatccacatcttattattcaaactgagatataattcacataccataaaattcaccatgccaactaggatgactatgatttttaaaacaaaacaaacggacaagaagtattggtgaggatttggaagaaccttcttatattgctggtgggaatataaaatggtgcagctgctttgaaaaacagtctgtggccaggcgcagcctgtaatcccagcactttgagaggccaaggagggtggatcacgaggtcaggagatcgagaccatcctggccaacatggtgaaacccygcctctactaaagtacaaaaaaaaaagttggccaggcgtgatggcaggtgcctgtaatcccagctactcgggaggctgagggaggagaatcgcttgaacccaggaggtggaggttgcagtgagctgagatcgcgccactgcactccagcctgggcaacagaatgagactctgtctcaaaaaaaaaaaaaaaagaaaaaaaagaaagaagtctggtagttcttcaaaaagtaaaacacagagttactgtatgacccagtgattccaccacccctgggtgtgtacccaagagaacagaaaacttatgttcacacaaaaacctgtacgtcaatgttcacagcagcaatattcataacagcaaaacgtggaaaaaaaaccaagtgtctatcaattgctgaacggatctgcttcttactaagccggtcatggaagataagtcttacacctttcgaatttgtctgtcttcagtgtctgtgcagtgtgtcagagaaaggggtttcagggagcctagatatctcaaaaggggaatggagatatctagaggatatagggaaccacggggaagacctaacattgttttgctttcttagaattctcagaagccaccgctgaactgaccgtctcattcacaaacraagtcttcacaactggtgagtaaccaggcatttcatgctcagcagaaaggagtgtgaggacggagctctctcttccattatctaagcctgtaggctttyaaycacttcaccgaactgtccgtctcttaccaagaaagtccttggtgtgaggctagagcatgggtgcagagtggagctctggggttcagaaggaggagcrttttgggtgatggggccatttcaaagatggcggagccaaggctgtggcgggacgaccgccatccctacgcactgctcccaggatgaagtcctaggctttggactcggctgtgatccaggtatttaatctcgctcctcactgtgtccaggtagagcccatgctcggacgcacacagactgtaggcacctggacayagcacatcttctaaccgctccaggcctctgcagatacgctttcctcagtctctttccccttgcctgtcctggaaaatctccatttccttccagactaaacaccttcacagattccctgataataggttagatacttccactgggcccacatgactctggctttcatgaggcacctgatcccacgtagttctatttttattttttatttttttgaggtggagtcttgctctgtcgcccaggctggagtgcagtggtgcgatctcggctcactgtaacctctgctgcccgggttcaagcgattctcctgcctcagcctcccgagtagctgggattataggtgcatgccaccacacctggctaatttttgtattttagtagagacggggtttcagcatcttgggaaggctggtcttgaactcctgacctcatgatccacctgtctcggcctcccaaagtgctgggattggaggcatgagccaccgcgcccggcatatcccagggagttctgtgatggaagccttccctatcttcagttcggaacctcccaatcaccctcagsatgcagttccaattcctcagcttgctattctgtgagcttagatatccagcccctgttgatccctccaattttgtctgcataccttccacgcattcccatgctgttctcagccacacacagtcacttgaagctctcctggaggcttcctaacctctcctgactctgcacccaacccactcactctgccttttcttccatttccccatggcatcaattcctcaagaaagccttgaccgtccaggctggatcgatggtttcctctgctctcgctcagtgtcttgtgggctgcctattacagcaatttttacagtatattaaaattatcgctttgtctgtaatcccagcactttgggaggccaaggtgagtggatcacctgaggtcaggagaccagcctggccaacatgctgaaaccccgtctctactgaaaatacaaaaattagccgggcgtggtggtgggcacctgtaattccagctacttgggaggctgaggcaggagaatcgcttgaactcacgagttggaggttgcagtgacctgagatcacaccacagcactccagcctgggcaacagagtgagactccgtattaaaaaaaaaaaaaaatcgctttactttttggtctcctgcaatagtctgggaaccgcagatggacaatgtcttatggtttttttgttttttgttgttgtttttgagacggmgtctcactctsctcactctgtgatctgtgatttcggctcactctgcgatctcagctcactgcaatctccggctcctgagtagctgggactacaggtgtgtgccaccatgcccagctattttttgtatttttagtaaagacggggtttcaccatgttggccaggatggtctcgatctcttgacctcasgtgatccgcccaccttggcctcccaaagtgctgggattacaggcattcagccagtgtcatgcctggcctgacaatgtcttattaatatttgggttcccatggcccagcacatggctgagtacctggcgagtctcaggagatacttgaggaataagagagctggaggccgggtgcagtggctcacgcctgtaatcccagcactttgggaggcctaggcgggcggatcacaaggtcaggagttcaaaaccaacctggccaatatggtgaaatcccatctctactaaaaatacaaaacttagctgggcgtggtggcggacgcctgtagtcccagctactcgggaggctgaggcaggagaatcgcttgagcccaggaggcggaggttgaagtgagccgacatcgggccactgcactccagcctgggagacagagccagactctgtctcaaaaaaaaaaaaaaaaagctggcacgtatgaggtgctcatatgtcaagcacggtgctttatatttctaccattattattatcttgactttcacatcaacctataagggatcttgttaattttattggacacatggggaactggctcacagatgctgagtcacttgccagataactgacatctaataggtgatagagttggggttcaaatctggaggacagcctgactctacagttcttgcttttttttttttggacagggtctcgctctgtttcccaggctagagtgcagtggtacaatcctggctcactgcagcctcaacctcccagggctcaggtgatcttcctgcctcagcctccactgagtagctgggattactggcacgtgccaccacgcctggctaatttttgtatttttttgtagagatagggtttttctatgttgctcaggttggtcttgaactcctggactcaagccagcctcctrcctcagcctcccaaagtgctgggattataggcatgaggcaccrtgcccggcccatgcttttcttaaatgctgtggaattgtgcctcmccatgtgtgtgtgtgttcggagtaggcacagtgacagggggcgggaatatggtttcatttcacacttagcctttgtttggttcccagagacttctaggagtatcaccrccagtccaaaggagtcagactctccagctggtgagtaagtcatcctctccagacccccttccttctcacccgtctcttcaccaaagccaactcctttgtctacgcaggggctgcagctctcagatcttgggttccagtgtgtagagtaaaggcagaatatcagcgtatggggttcagaattgggcattaagatcaggtgggaaggttgagattttaaaaagggtcagagaaagagagattccatctctyccccascccttataactgtcctctcttttgcaatgcatcagataacgaggcagcatctgtgtctggggaggagttgtctcagagccctgtgagagcacaggagggagaggtgctacttagagaattggggtcatctggccctgacccctactcgggaagggagggaccctccaggaaagtgagcggcatcccctagctagtagagaataataggatctctgagaagcccagatgtggcttggagggggtcctggaggtgggctctttcacctgctcctgcctctcctcattcctccaggtcctgcccgccagtactacaccaagggcaacctggtccggatatgcctcggrgctgtgatcctaataatcctggcggggtttctggcagaggactggcacagccggaggaagcgcctgcggcacaggggcagggctgtgcagaggccgcttccgcccctsccgcccctcccgcwgacccggaaatcahacgggggtcaggatggaggccgacaggatgttcacagccgcgggttatgttcatgaccgctgaaccccaggcacggtcgtatccaagggagggatcatggcatgggaggcgactcaaagactggcgtgtgtggagcgtggaagcaggagggcagaggctacagctgtggaaacgaggccatgctgcctcctcctggtgttccatcagggagccgttcggccagtgtctgtctgtctgtctgcctctctgtctgagggcaccctccatttgggatggaaggaatctgtggagaccccatcctcctccctgcacactgtggatgacatggtaccctggctggaccacatactggcctctttcttcaacctctctaatatgggctccagacggatctctaaggttcccagctctcagggttgactctgttccatcctctgtgcaaaatcctccygtgcttccctttggccctctgtgctcttgtctggttttccccagaaactctcaccctcactccatctcccactgcggtctaacaaatctcctttcgtctctcagaacgggtcttgcaggcagtttgggtatgtcattcattttccttagtgtaaaactagcacgttgcccgcttcccttcacattagaaaacaagatcagcctgtgcaacatggtgaaacctcatctctaccaacaaaacaaaaaaacacaaaaattagccaggtgtggtggtgcatccctatactcccagcaactcrgggggctgaggtgggagaatggcttgagcctgggaggcagaggttgcagtgagctgagatcacaccactgcactctagctcgggtgaygaagcctgacyttgtctcaaaaaatacagggatgaatatgtcaattaccctgatttgatcatagcacgttgtatacatgtactgcaatattgctgtccaccccataaatatgtacaattmtgtatacatttttaaaatcataaaaataagataatgcaccgtctccacccctctcatatttactttctgaaggaaatgttaggtcttctcaaggtaaagttctatatttattatagcgtttaggcatttcttgaccatctaatgagtgtaaaactgtaccactgggccaagtgcagtggatcatgtctgtaatcctagcactgtgggaggccaaggcaggaggatcgcttgagcccaggagttcaagaccagcctgggcaacatagtgagaccccatctctacttaaaataaagaagataaaaattgttttaaaaaaggaaaagaatggctggccacagtggctcatgcctgtaatcccggcactgtgggaggttgagggaggtgagtcacttgggaaaagacagaaggatggcaccaagaagttccaggacgacggctgtgaatcagggctagtgagcacacagcttgggtgaagggggaatgggaaagttgcttagagaagcctccaaatgtaagaatgggtcaattcctcgtcttaacatagtggaaaatcatactgagatgctatcagaagacagaggaaaaataattttagaggtcaagtaaactaagtagattttaaaaagaccagtatagcctaggcacagtggctcacacctgtaatcccagcactttgggaggctgaggcgggatcgcttgagcctaagagttcgagaccagcctgggcaacatggtgaaaccttgtctcatatacaaaaaatataaaaaattagctgggtgtggtaccacatgcctactctcaggtactcaggaggctgaggttggggatcacctgagcccggggaggttgaggctgcagtgagccatgattgcaccactgctgtcaaacctgggtgacagagtgagaccctgcctcaaaagaaaataaaaataaaaaacaaatgtaaactttaggggaacaataacaacaacaaaaataaaagaagcaagttatattacccgaaaattctcggctgcgaatatctgtgggtataaacatgtgatactggccgggcgtggtggctcatgcctgtaatcccagcacttcgggaggctgaggtgggcagatcacgaggtcaggagatcgagaccagctcagccaacatggtgaaaccctgtctctactaaaaatacaaaaattagccagtcgtggtggcacacgcctgtagtcccagctactcaggagactgaggctgcagtgagctgagattgcgccactgcactccagcctgggtgacagagtgagactctgtctcaaaaaaaaaaaatgtgatactgaatgttgatatgcagacatagagataaacattggaagagaaaaaacagtaagaacaacgctgtagaataactaaggccccgcctattatgataggaatccagtaagtctaagctcattcacatggttacatgtttttagaaacctaatattaacaagttcctaaagaaaacagctaaaagtgggtgtctcttaggcggagcaatggaggagatggttagtcagccactgcattttgtacacacccttttagtgctattggaattttttaggtaggtgctgtcaggcctctgagcccaagctaagccatcatatcccctgtgacctgcacgtacacatccatatggctggttcctgccttaactgatgacattccaccacaaaagaagtgaaaatggcctgttactgccttaactgatgacattgtcttgtgaaattccttctcctggctcatcctggctcaaaagctcccctacagagcaccttgtgacccccactctgcccgccagagaacaaccccgctttgactgtaattttcctttacctacccaaatcctataaaacggccccaccccatcccccttcgctgactctcttgtcggactcagcccacctgcacccaggtgattaaaagctttattgctcacacaaagcctgtttggtggtctcttcacatggacgcacatgaaatttggtgccgtgacttggatcgggggacctcccttgggagatcaatcccctgtcttgctctttgctctgtgaaaaagatccacctacgacctcaggtcctcagacccaccagcccaaggaacatctcaccaagtttaaattgggtaagcgacctcttcttactctcttctccaacctctctcactgtccctcaaccactttctcctttccactcttcaatctctcccttctcttaatttcaattcctttcattttctagtagagacaaaggagacacgttttatctgtggacccaaaactccggcgccggtcacggactagggaaggcagccttcccttggcgtttaatcattgcagggacgcctctctgattatatacccacgtttcagaggtgtcagatcacgcagggacgcctgccttggtccttcacccttagtggcaagtcccacttttctggggaaggggcaagttccccaacccctcctctccatgtctctaccccttctccacctttctggggggcaagaaacccccaaccccttctccttcactcttagcggcaagtcccgcttttctagaggggcaagtaccccaacctcgtatctctgcaccctgatcccttatttccatgccccaacctcttatctctgcaccctgatcccttatttccatgccccaacctcttatctctgtgccccaaccccttatatccatgccccaacccctttcccgcttttctggaaggtaagaactcccgaaccccttccctccgtgtctctactctctcttttctctaggcttgcctccttcactatgggcaaccttccaccctccattcctcctcctctctcccttggcctgtgttctcaaaaacttaaaacctcttcaactcacacctgacctaaaacctaaatgccttattttcttctgcaatgccgcttgaccccaatacaaactggacagcagttccaaatagccagaaaacagcactttcaatttttccatcctgcaagatctaaataattcttgtcgtaaaatgggcaaacggtctgaggtgcctgacgtccaggcattcttttacacatcagtcccttcctagtctctgtgcccagtgcaactcgtcccaaatcttccttctttccctcctgcctgtcccctcagtctcaaccccaagcgtcgctgagtctttctaatcttccttttctacagacccgtctgacctctccctcctccccaggctgagctaggtcccaattcttcctcagcctccgctcctccaccgtattatctttttatcacctcccctccccacacctggtccagcttacagtttcgttcagtgactagccctcttccacctgcccagcaatttactcttagaaaggtggctggagctaaaggcatagtcaaggttaatgctcctttttctttatcccaaatcagatagtgtttaggctctttttcatcaaatataaaaatccagcccaattcatggctcgttcgccagcaaccctgagaagctttacagccctagacccttaaaagtcaaaaggccgtcttattcttaatacacattttattacccaatctgctcccgacattaaataaaactccaaaaattaaattccagccctcaaaccccacaacaggatttaattaacctcaccttcaaggtgtacaataatagaaaaaagttgcaattccttgcctccactgtgagacaaaccccagccacatctccagcacacaagaacttccaaacacctgaaccacggcggccaggcgttcctccagaacctcctcccccaggagcttgctacaagtgccagaaatctgaccaccgggccaaggaatgcctgcagcccaggattcctcctaagctgtgtcccatctgtgtaggaccccactggaaatcggactgttgaactcacctggcagccactcccagagcccctggaactctggcccaaggctctctgactccttctcagcttagcggctgaagactgatgctgcccgatcgcctcggaagctctgtagaccatcacggatgccgagcttcgggtaacactcacggtggaaggtaagtccgttgccttagtcaatacggaggctacccactccacattaccttcttttcaagggcctgtttctcttgcctccataactgttgtgggtattgacggccaggcttctaaacccctgaaaactcccccactctggtgccaacttggacaacactcttttatgcactcttttttagttatcctcacctgcccagttcccttattaggccgagatattttaaccaaattatctgcttccctgactattcctggactacagccgcatctcattgccacccttctcctcaacccaaagcctccttcgcgtcttcctctcctattcccccaccttaacccacaagtatgggacatctctactccttccctggcaaccgatcacatgcccattaccatcccattaaaacctaatcacccttaccctgctcaacgccagtatcccatcccacagcacgctttaaaaggattaaagcctgttatcactcgcctgctatagcatgggcttctaaaacctataaactctccttacaattcccccattttacctgtccaaaaaccggacaagtcttacagattagttcaggatctgcgccttatcaaccaaattgttttgcctatgcaccctgtggtgcccaacccctacactcttttgtcctcaataccttcctccacaactcactattcccatgcttgatcttaaagatgcttttttcactattcccctgcacccctcgtcccagcctctcttcgctttcacttggactgaccctgacacccattaggctcagcaaattacctgggctgtactgctgcaaggtttcacagacagcccccattactgcagtcaagcccaaagttcatcctcatctgttacctatcttggcataattctcataaaaacacacgtgctctccctgctgatcgtgtctgactgatctctcaagccccagcaccttctacaaaacaacaactcctttccttcctaggcatggttagcgcggtcagaactcttacacaagagccaggaccacaccctgtagcctttctgtccaaacaacttgaccttactgttttagcctagccctcatatctgcgtgctgtggctgccgctgctttaatacttttagaggccctcaaaatcacaaactatgctcaactcactctctacagctctcataatttccaaaatctattttcttactcacacctgatgcatatactttctgctccctggctccttcagctgtactcactctttgttaagtcccacaattaccattgttcctggcccggacttcaatctggcctcccacattattccagataccacacctgacccccatgactgcatctctctgatccacctgacgttcaccccatttccccacatttccttcttccctgtttctcaccctgatcacacttagtttattgatggcggttccaccaggcctaatcgccacacaccagcaaaggcaggctatgctatggtacaagccactagccagcctcttagaacctctcatttcctttccattgtggaaatctatcctcaaagaaatcacttctcagtgttgcatcagctattctactactcctcatggattattcaggccccctcccttccctacacatcaagctcaaggatttgcccccgcccaggactggcaaattagctttactcaacatgccccgagtaagataactaaaatacctcttagtctaggtagacactttcactgggtaagtacagtcctttcctacagggtctgagaaggccaccgcagtcatttcttcccttctgtcagacataattcttcagtttagccttgtcattcccttctgtcagacaaaattcctcagttcagccttcccacctctatacagtctgctaacagaccagcctttattagtcaaatcagccaagcattttttcaggctcttagtattcagtgacagactaatggtctattaaaaacacacctcaccaagctcagccaccaacttaaaaaggactggacaatacttttaccattttcgcttccagaattcaggcctgtccttggaatgctacaagatacagcccatttaagctcctgtgtagacactcctttttattaggccccagtctcattccagacaccagaccaacttagattgtgccccaaaaaacttgtcatccctactatcttctgtctagtcatactcctattcaccgttctc

SEQ ID NO: 5649 - DNA, 75729 bp, Homo sapiens
  misc_feature (1)...(75729): n = A,T,C or G, or insertion/deletion polymorphism (see Tables 1-2)
aggccagagaggttgagcaacttgtccatttcagcacttggttaaggagggatttgaacccggggctgaccttctgtctccagggccagtggcagcccgtcttctatggacacctcctgcccacgatcactgcctctgctcatgcccttacctccccacccatcccgttccaccttcctttggaaatttccctcaatgacccccctattctgacaaaagctaagatttagctcgataatgcctggcccagctccaaggacatcacaaaaatgaacaggctttccaggcataaacacctttctgaaatcacttttccagaactccctccatgctgtagaggttactagcaaagctttccacatcatttctccccagagccccgtgaggggagtgtgtctgggtgggaggctgtcttcgtctcacagatgagaaaatgaggaagagaagggttaagaaacttgcatgggtacagtggctcacatctctaatcccagcactttgggaggccgaggcaggcagatcacctgaggacaggagttcgagaccagcccagccaacatggtgaaaccccatctgtactaaaaacacaaaaattatccaggtgtggtggcgggtgcctgtaatcccagctactcaggaggctgaggcaggaaaatcacttgaacccgggaggcagaggttgcggcgagccgataattgcaccactgcactccagcctaggcaagagagcgaggctccatctcaaaaaacagaaaacaggccgggcgcagtggctcacacctgtaatcccagcactttgggaggccgaggcgggtggatcacgaggtcaggagatcgagaccatcctggctaacacggtgaaaccccgtctctactaaaaatacaaaaaattagccgggcgtggtggtgggcacctgtagtcccagctactcgggaggctgaggcaggagaatggcgtgaacctggaaggcggagcttgcagtgagccgagattgcgccattgcactccagcctgggcgacagagcgagactctgtctcaaaaaagaagaaaaaaaaaaagctgacatcttgcaaggccttaagggacgtgattctgatctcatctcttccttctgtgtgtcagcacactggcctccttgctgctcttggaacatccagacccggtcctgcctcagggcctttgcacttgctgtttcctctgcctggaatgctcttctaccagataccctcatgcctcactttcttgcctcctttggtctttgcctgaatgtcaccttctcagaggactggctgaccaccctgtttcaaatggcggcatcccttactcgacttcttttgttttttttgagacagagtttcactcttgttgcccaggctggagtgcagtggcgcaatcttggctcaccgcaacctccgcccccccaggttcaagtgattctcctgcctcagcctcctgagtagctgggactacaggcgcgcgccaccacgcccggctaattttgtacttttagtagagacagcatttcaccatgttggccaggatggtctcgatctcttgacctcgtgatctgcccgcctcggcctcccaaagtgctgggattatgggtgtgagccaccgcccccggcaacccaacttctttgtagtctctttcctctctccctacttcatttttgtgtggagaacttttcaccttcttacccactgtgttcctggttcattttgtctgtgtctcctccgttagaatgcaagcttcacaggctgggcacggtggcacatgcctgtaatcccagcactttgggaggctgaggcggattgatcacttgaggttgggagttcgagaccaacctggccaacatggtgaaagcacgtctctactgaaaatatgaaaattagccgggggtggtggtgtacacctgtaatcccagcttcttgggaggctgagacaagaaaattgcttgaaccccggaggtggaggttgcagtcagccgagatcacaccatgtcaccaacatgataaaaccccatttctactaaaaaaaaaaaaattagccagagttggtggtgcacacctgtaatcccagcttcttgggagaccaaggcaagagagtcacttgaacctgggaggtggaggttgcagtgaaccgagatgatcgtgccactgcactccagcctgggtgacagagcgagactccatcttaaaaaaaaaaaaagcggccgggtgtggtggctcacgcctgtaatcccagcactttgggaggccgaggcgtgtggatcacgaggtcaggagattgagaccatcctggctaacatggtgaaaccccgtctctactaaaaatacaaaacaattaaccaggcttggtggtgggtgcctgtagtcccacctactccggaggctgaggcaggagaatggcgtgaacccgggaggtggagattgcagtgagccaagattgctccactgcactccagcctgggtgacagagcaagactccatctcaaaaaaaaaaaaaaaaaaaatgcaagcttcacaagggcaaagatttttgtgtgatcagtcctccacttaatctgcagcacacagaattgggtctagcacatagaaagtgttggagagatacttgttgagtaaacgagcttttggcatttggtgcattcatgtgcattactgctttgttgcttcattcaagatatgttgcctccacggtctatgctgagtgagcctggaaatcagagaaggcacatttttgccttcgattgatggggatgaaggaacagagagaaagagatatagtgtggtctgatggcagagagcctcgggcaggtgtgggtctgaatcctggctttgccacttgataattttggagatacttattgtgtgcttatatcttctcagtacatcataaatgtgtgtgtgtgtgtgtgtgtgtgtgtatgcataatcctcaccacatcctatggaatgggtcctattatccccattttttttcttaattgagacaaggtctagttctgtggcccaggctagaatgcagtgtcataatcacagctcactgcagtctcgacctactggggtgatcctcccatctcagactatatataaatatatatacacatatatatagtagagtctccttatgttgcccaggctggtctccaactcctgggctcatgtgatactcctgccttatcctcccgaagtgctgggatgacaggcatgagccacccaccacacccagcttattgggaggataaagtcaggttatagagagttgtcaatacagtacctggcaaagaggaaacgcaaggctggtgttagcaatggcgaggacgatggcctttcttcccatgcgtgctgcaagggaggacacgaggggctctgccaaggccaggagaggctgctgagggtcaggacaggctgcctggaggaggaggacaggctgcctggaggaggagggcaggcyaggaatcaccttgaaggatgagtttgacagccagtgtcaatcctagaagataggggtgttctgggccctgcaactgcctgagtgaaggatgggggctgcaggggtggccagcggggctagactgtgagctcctggctacccagcaggtggtcctggtgcgtgtagcagcgggtgggggaggtaggggtggaaggagggcccttacgcttctctttctttggcttctgcaattctgtgttctcatcacattcatgccacaagtattttctgtgcttgacbgtacctgagttggggtttgagggaaggagcagaccccttgccccattgacaggagaaaacagaggctcagagagggaagtcagtagcctaaggttacagtggccctgggctgtgacacagatgcagatctgactgggcctgggctcatttcttcatgaacaaggggagaaaactatctcatagaagcatttggtatgggtccgaggcctttgggtctgagggaggaggggctggggtcyggactcttgggtctgagggaggaggggctgggggcctggactcctgggtctgagggaggaggggctatctcattgctttgggggtggcgcargcggccctccaggccatggtctggagcagcaggtgagaccgaaacccgagcctccacccaagtcccaagtcccagggcccagggcctctttcctccttctctggccgcaaaggaggcccctccctctctgtaacccacagcaaatgcctcccaaataccagtcaaagtgtccacccctgcacagtctgactcagccagtccagggcggaggcagtaaagccctgtcttggcaagtcaccagggaaatccatcaccgaagcacctctctcccccctcggcctggctattctgtcattggcacctgttcttgggtgagtgacagggctctgtggtcagggtttgcctctgtcccagtctgggatagctgtcttggggggctggcctttcttccctctcacctgggatgtcccaggaacggaacagaattctcccctggggcttgaagagctcaccccccatctcctccgttatccccacccccacaccacccaacacacatcctctagtctgtaggatttgctgacaaattcctatgacagccggatgtggtgcctcacacctgttacccagcattttgggaggccatcacttgagatcaggagttcgagaccagcttagccaacatggtgaaaccccatctctacaaaagtagctgggtgtggtggcgtgcgcttgtagtcccagctactagggagactgaggcaggagaatcacttgaacccgggaggcagaggttgcagcgagycattgcgccatgcactccaggctgggtgactgactgagattctgactcaaaaaaaaaaaaaatcctatgacaaggagaaaggtcagattccctggcaatgggagctgaggcatgttcttgagaaggagggaggttataaattagatggggctgggtctcagagagatatagctacttacatattaaataatgaggctgagtgtggcgtctcacacctatagtcccagtactttgggaagcagaggcaggaggatcccttgagcctaggagtttgaaaccagcctgggcaacatagggagattccatccctaccaaaaaaaaaattaaaaattagccaggcatagtggcctgcatctgtggtcctagctgcttgggaggctgaggtgggaggattgcttgaacctgggaggtcaaggtacagtgagccacgattgcaccactgcactccagcctgggtgacagagcaagaccttgtctcaaaaaaagtaattaatttatttattcaatacgtagctcctgagacaaaatgtgtgccgtactctagaccctgctggtgtgcacaattcatgggggatatgtgcgctaatggaagtgtggcacagggcaagggtgtccccagagaaagccctaatccagctttatgggtggttgtatgaggcacagaagcctttcctggttaagggataaatggatggggtttcaaaggatgaataggagtttgccaaggacaatgaagcaaagattgacattctaagcattgggagtgtcctatgcaaaatcccaaagtgatgtagtagcaaatacttaagcacctacagtgtgccaagcatgtttcatgtgctggagatacagaggaggaggagacagatgaaaccccagcccttgtgatattgtcatcctagtaggtgtggtggggagataaacaagtagacacctgcatgaataagactttcagattgtggtaaaccctgtggaggaaacgaaacaggtgaaggaacggcgtgactaggagcaggcaggtgcggctgcttcaggtagggtggtcagggaaggaggcggcatctgagctttgacctcaatttcgagaatgagccaggaatgcagagaggatttcaggcagaggaaaccttagggaggctggcgggttaaatctgcaggggtgtggctggccggaggaagtgaggtgtgagacagtcacgttgatggtgacagcagcagtgaccgtagcagcctagaggtggccgaatgcttactctaatgggctggcccatccctgagtgtctagagttcccagcccgcttaaggaaggaaggaaaacacaggcagctctaagtgtacgacgagggaggtctcatcggcggtgaggaagcccaggcgggtccccttcccagctgaaaggggttcgggtaggtttttcctgggcgttcctctgagaacagccagccctggtgagagtgcggggagaggcgcttatgacacagggagggtgggtctgggaaccagcctggcaggaggaggagggagactsccggtggccgggagctgtttgttctctgggagggatcgtggcggggtggtttgtgcagccctttcctgaaaccggaggagcctggctccttcccaggtctctgggggatgggtcggggcggggggtggtgacggggataggaccccagacagacttgagtttggatcctgggttggagccggtgacttcactctcagctccctgaacatcagggcctgcctttcttccctcccttcccctcccctcccctcccctcccctcccctccccctgccctcccctcccgtccccctgccctcccctcccctcccctcacctccacctctcctcccctcacctccccctccccttccccctcccctcccttccctcccttcccttctccttccttccttcctttccttcccttcccttcccctcccctcccctcccctcccctccccttccttccttccttccttccttccttccttccttccttccttccttcccttcctttcccttccctccctccctttattcttttctttttttcttttcttttctttctttcttgacagagtcttgctctgtcgcccaggctggagtgcagtggcgcgatctcggctcactgcaagctccgcctcccgggttcacgccattctcctgcctcagcctcccgagtagctgggactacaggcacccgccaccgtgcctggctaatttttttgtatttttaatagagacggggtttcactgtgttagccaggatggtctcgatctcctgacctcgtgatctgcatgcctcggcctcccaaagtgctgggattacaggcctgagccacagtgcccggcctcctctttctttttttgagacagaatctcactctgtcacccaggctggagtgcagaggtgtggtctcggctcactgcaacttccgcctcccaggctcaagcgattctcctgcctcagccttccgagtagctgggactacaggcgcgtgccaccatgcccagctaattttttggtacttgtagtagagacagggtttcaccatgttggccaggctggtttcaaacccctaatctccagtgatctgcctgccttggcctctcaaagtgctgggattaaaggcgtgagctaccgtgccaggccgtggagtagctaaacttatcttacactgctgaggtctctcaagatgtgtgtagggagagagagttggggggagagagagagmcaaaggaaaagaggaagagagagacagggagaaagagaggaagaaagagaaagagagaaacaggaagagtgagaggagaaagagaggaagggggagagaaagagagatgggggagaaagagagagagagaaggagacacaggagggggagagaaagagggagagagcaatgagagagatatgagacagagaagagagagagaggagacacrgaggagggggacagaaagagggagacagagagatgagagagagaaaagacacagatgagggggagagaaagagggagagagagatgagagagagattgatagcacccagctaatcaatcagtggctttagtgccatgagctggaagggaggaatggatactggggaacagttggttgactttccctggtgggacagcccctctttctagaactacctttcctatgtcccctgtgcttctctccagtccatactctacatctcagccagaaaagaagaaattctaaaacatgtatctgcccgtgacatgaccctccttggctcaacactcttcagcggtacccagcgccctctgagtcaacgccaagcttcctaccatggcattggagccgcgctctgggtccttttactgatggctcccgcctcagcccttccacccctcccataccctgcatgccagcccaggcagccctccctcctcccacaatatctctcatatgcattcctgtcccatgccttctgcttaagctgttcccacagcccggagtctcctccctggctgagggaaatcttgccggctcacatggccgtgatccccatcatttcctgcagaaagcttgcccagctytccgacacggggaccttctgcccctcctgagccctgagtcccctccatcttaactgggaggtcacctgtttgcgtggtgtctgctcagcttgcagrcaaggccaccaacaccctcctttcctgtctttccttcctaccatcctctcctgtccaccctctgcctctccctcccttcttctcttctttccttctagttactgagccatgcatgtgttgcatgcagcaaggatgaataaaataaaataaacctacagcaatcattccrgttactatggccatataacaaattattctaaaactcagtggcttcagacaaggatcrtatctattttactcaaaaacctaccatctgcacaggccttggtggaggcagcttatctgtgtgccctttggtgatggctggggctgtcaagaagctggggcagtgcttgggctgcaaagactcaaatggctggagtctgggaccactggagctccttgcccccctttgcttatctctacacagcmacagggtcgctaaacttaccttacactgctgaggcctcttaagatgtgtrtagggaragagagttggggggagagggagagagagaacagagagagagagacacacacaagaagagagagaggaagaaagraggagagagaggaagaggaagggagaggaagagagagagaaagagaaagagggagagagagaggagagaaagagacaagaagagaggaagaaaaaagaggaagagagggatagaggaagacagaaggagggagagggagagagaggaagagagaggaaagagaaaggaagggaaagagagatgtgagagggagagagagagagaaaagaggacagaggaagagagagaggaagagagagggagagaagacagagagggagagaggaagagaaaaggagacagagagaggagagatagagaagaacgagaaaggagagacagaatgtgaatgagaattgggtgccataaaccctctgatggggaaagcaaagggcattgtgggagaatcctctcagcacctgggacagcacccagtgctgatcaggaacatgttaacaaccaggaaaatggtaaaggcgtggacagcccacctggagtccaaacagatgttctaactcccttgggtgtgtctgggaatcaggtaggagatcctcagaggaggaatatgcatgcattgttctctttataataaccatattaacagccagcaatgttctggcacttactatggattaagtccttgttatraatgacttcatgccatccttccaaattcaatgacaggtagctgggcgcagtggctcacgctttgtaatcccagcactttgggaggctgaggcaggtggatcacctgaagcctggagttcaaaaccagcctggccaacatggtgaaaccccgtctctactaaaaatacaaaaatcagccaggtgtggcggcgagcgcctgtaatcccagctactcatgaggctgaggcaggagaatcgcttgaacccaggaggcagaggttgcagtgagctgagattgcatcactgcgctccagcctgggcatcggagagagactctcaaacaggagctggcgaactgtggcgcactgcttatttttataaataaagwtttatgggaacacagctgtgctcacttgttttcacatcatctgtggctgcttcccagctcctctggcagaggaggtgcaacagccactgtgtggatcacaaagctgaaattatttactatctggctgtttgtagaaaaagtttgctgatctctgtcctggaagtcaatgatattaggatttcagtttacagaaaaggagaaaaagacagggaaaaacagtgttgtttttttttcaaggttgagaaaatgaacatctgaaccaattgcccatgttattaaatgtaaacatttattattattatttttgagatggggtcttgctctgtcacccagcctggggtgcagtggcacaatcacagctcatcatagccttgacctcctgggctcaagcagacctcccacctcagcctcccaagtagctgagggtgcagatgcgtgccaccaaacctgctaatttttgtattttttgtagagataaggttttgccgtgttgtccaggccgctctcaaactcctgggctcatactattctccactttggcctcccaaagtgctgggattacaggcatgagccaccatgcccagtctaaaatttttctttatttttagtttggtaaactatgcataaagtaaaatgtaccatcttaaccattttaagtgtacaattcagtgatgttaagtatattcacattgttgtgcaaccatcaccaccgtccaccttcaggtcttttttttattttgcaaaacaaactctgtatctattaaaaaacagcttcccggccgggcgcagtggctcatgcctgtaatcccagcactttgggtggccgaggcaggtggatcacctgaggtcaggagtttgagaccaacctggccaacatggtgaaaccccgtctctactaaaaatacaaaaattagccgggtgtggtgacacgtgcctgtagccccagctactcgggaggctgaggcaggagaatcgcttgaacctaggaggcagaggttgcagtgagctgagatcgcccactgctctccagcctgggtgacacagtgagactgtctctcaaaaaacaaaacaaaacaaacaaacaaacaaaaacaaatcctgtgacttcccaatctcatctccagccccctgcagccaccactctgttttctgtctctatgaatttgactcctccaagtgcctcttatacagcatttggcattgtgtaactggtttaatacgtttgagatggtgagagcttaaggtctacaggcctaaggtttttttttttttgacagaatttcactctgtcgccaggctggaatgcagtagggcaatctcggctcactgcaacctccacctcccgagttcaagtgatgctcctgcttcrgcctcctgagtagctgggactacaggtgagtgccaccacatccagctaatttttgtatttttagtagagacagggtttcaccatgttggccaggctggtatcaatctcctgacctcgtgatccatctgtctcggcctcccaaagtgctgggattacaggcgtgagccaccgtgcccggccattgactaaggtcttaaaatagctcttcctgcctgtataatctccattatggcagggctcatataagaagatgacagttcatctgatgaggaagaaaacttactcctagttagattgggttgaattcttccctgtttccagcggtgtctgctcctggcacctcaggcacagtcaggggtaggaggtggtgatcagatacactcgctgtgagcagtgcaaggggaagcaggtgcccagaggtgcatcccggtttggtgggggtgacaaacatggacaggtaagtgcaggagtgtgtgcaatactcaatctaagaaaggtagttcaggcagagttcagggaagatatctctgtgcagggccagacatggggatgagattctgataatttgggaatgaatcaggcccccagcccctcctccctcagactcagcagtccaggcacccggccctcctccctcggacccagaagtccatgctcccagcccctcctcccttggacccaggagtccaggcccccagcccctcctccctcagacccaggagtccaggcccccagccgccttctcctgcaggaccccaggagcttgggtacccacaggctaytagatccttgtttctgtgcatggaaattctcaaattatctccaaaagtctatgaagaaggtaaacacacatttccagatgaggraataggctgatatagttgaaagacacacagagggtcacagtctggaattgacagtggtgggattcgaacctatttcactccagaactgcgtagcgccttatacgctgcggcaagtgtgacgtcattcgaacaaaccataggccccgcccccggactagccacgcccacaggctcctgaaaccaccaatcccagctgtgacagcgctcaggaccgatgctcataggtcccgtccctaggatccccgccccctccgcccgcgccccgcccctcgcagcccagttccggacgcgggcccagccgcgcctgcgcytccgctcgcctgtggctgcgtcgcgcgctcttcctcggagctayccaggcggctggtgtgcagcaagctccgcgccgacccckgacgcctgacgcctgacgcctgctmcccggcccsgcatgagccgctacctgctgccgctgtcggcgctgggcacggtagcaggcgccgccgtgctgctcaagtgagtacattctagccccgcgtgcgcggtcaaggcgggcccccagcgcaggggccgggaaggcggcggagacccccgcccctcgcacccgggtccaggccccgtagctcccgacccgcagtgcccgcccggagtggggcaaacctgcgctctggccggccaggtcaccggcccaaggtcactcggagggaagggcgagcctgggcccttgtaaatgttgctttccttccagacttttaaactctttattttgttgttttgtattatttatttgttcgtttatttttaaaggcagaatctggctctgtcgcccaggctggagtgcagtggcgcgatcttggctcactgcagccttgacctcctgggctcaggtgatcctcccaccttggcgtccccaggagctgagatcacacgtgcgccaccacgcccggctaatttttgtatttttcgyagagacggggttttgccatgttggccaggctggtctcaaacacctgccctcaggtgatccgcctgcctcggcctccaaagtgctgggattacagacgtgagccacctcgcccagcctacttaatttaaactttcttaaaaattagcctctgtggctggtggccactgtattgcatggtgcccttctctcctgtgggtgcagtgctgtttacctgctcagcctcctgttgctggacactatcttgttgccagygttagcctctgtgggacatgggtgtggtgggcagagtcgtgactcmgtagaggggtccacgtcctaatcctcggaaggtgtgacgacattacctcacgtgtcagaggttctcgctgatgtgttaagtgaagcatcttttttttttttgagacagagtttcgctgttgttgcccaggctggagtgcaatggcacgacctcggctcaccacaacctccacctcccgggttcaagcgattgtccggcctcagcctcctgagtagctgggattacaggcatgtgccaccacgcctgtctaattttgtatttttagtagagacgaggtttctccatgttggtcaggctggtcttgagctcccgaccaaaggggatctggccaccttggcctcccaaagtgctggggttacaggcgtgagccaccgtgcccggccaagtgaaggatcttatgattatcatgtagtctttttttttttttggagacagggtctctctgtcacccaggctggagtgcagtcatgctgtcacagctcactgcagcctcaccctccctgggctcaggtggtcctcccacttcagcctcccgagtagctgactctacaggcgtgcaccaccaagccctgctaatttttgtatttttagtagagatggggtgtcagcatgttggccatggctggtcttgaactcctgacctcaagtgatcctcctgtcttggcctcccaaagtgctgggattacaggtgtgaggcactgtgccggtcctgccttgtagtcttatagggtccttataagagggagcaggaggctcagtcagaggggagatggaagatagaaggagaggttgttgggtgtggtggctcacgcctgtaatcgcagcactttgggaggccaaggcaggcggatcacaaggtcaggagttcgagaccagcctgaccaacgtggtaaaactctgtctctactaaaaatacaaaagaaattagccaggtgtggtggcatgtgcctgtaatcccagccactcaggaggctaaggcaggagaatcgcttgaacctgtgaggcgaaggttacagtgagctgagattgcgccactgcactccagcctgggcgacagagcgagactctgtctcaaaaataaataagtaaataaataaataaataaaggagaggttccagtgaggatgcaggttgaagatggaggcggggccaagagtggaggaatgtggcggtctgtaggagctggaagtggattcttccctagagcctccagaaggaacctgactctaccaataccttgatttattccagtgagacatgttttggactcttgacctgccgaactggaggaggatgcacttaygtggttttaagccactaagtctgtggtaatgcgtacagcagccwtgggaatctcgtgcagcgggcattttaaatttaaatttaaatttttttgagacagagtctcgctctgttgcccaggctggcaccatttcgactcactgcaacctccgccttccaggttcaagcaattctcgtgcctcagccccctgagtagctgagattacaggtgtgcaccaccacgcctgtgaaggggtggcctgcccctccacacctgtgggtatttctagttgggtgggacgagagactgagaaaagaaataagacacaaagtatagagaaacaacagtgggcccaggggaccggcgctcagcataccaaggacctgcaccggcaccggcctctgagttccctcagtttttactgattattatcttcattatttcagcaaaaaggaatgtagtaggagagcagggtgataatgaggtcagcaaaaaccatgtgagcaaaagaatctatgacataattaagttcaagggaaggtactatgcctggacgtgcacgtaggccagattgatgtttctctccacccaaacatctcagcggagtaaagaataacaaggcagcattgctgtaaacatgtctcgcctcccgccatagggcggcttttctcctgtctcagaattgaacaaatgtacaatcgggttttataccragacattyagttcccaggggcaggcaggagacagtggccttcctctagctcaactgcaagaggctttcctcttttacyaatccacctcagcacagaccctttacgggtgttgggctgggggacggtcaggtctttctcatcccacgaggccatatttcagactatcccacggggagaaaccttggacaatactctgtgttcaagggcagaggtccctgcagctttctgcagtgcatcgtgcccctggtttattgagactagagactggcgatgacttttaccaagtatactgcttggaaacattgtgttaacaaggcacttcctgcacagccctagatcccttaaaccttgatttcatacaacacaggtttttgtgagctccagrttgggtcaaagtggctgggtcaaagctacaaattaacaacatctcagcaaagcaattgttcaaagtacaggtctttttcaaaatggagtctcttatgtctttcctttctatatagacacagtaacagtctaatctctcttttccctacacacctggctaatttttgtattttaagtagagacggggtctcgccatgtttgccaggctggactcgaactyctgacctcaagtgatccgcccccgcccccccccacccccaaaactttggcctcccaaagtgctgggattacaggygcaagccccctcacctggccgggaatctcatgcagtgagcatttataaaataatgactgtcacttgctgaaggcgttccacacgccagacactgggtggagccacttatggagaacatgacagaggtcccktggtgtgatgtgatgatgtctgtgtttcagttggggtatgtgagtgagctcagacaaggttgcctgagatcattcagtcaggggcacgtggggtgagagtgggcccacaggactgaccgtgccgcttctcaccctcagggactatgtcaccggtggggcttgccccagcaaggccaccatccctgggaagacggtcatcgtgacgggygccaacacaggcatcgggaagcagaccgccttggaactggccaggagaggtaaaatctcccctgctttggctctcagagagatatctgtacatccatgctcactgcagcattattcacagtccggaggtggaaggaacccaggcacccatccacagatgaacagggaaacagaatgtggcttctatagacaggggcatatgattcagccttaaaaaggaagggcattctggccgggcgcggtggygcacgcctgtaatcagtactttgggaggccaaagctggcggatcacgaggtcaggagttcgagaccagcctaaccaacatggtgaaaccccctctctactaaaaatacaaaaattagccaggagttgtggtgggcacctgtagtcccagctgcttgggaggctgaagcaggagaatcgcttgaacctgagaggcaggggttgcagtgagcagagatggcgccacggcactccagcctgggtgacagagtgagactcaaaaacaaaacaaaacaaagcaaaacaaaaaaaagggcattgaaacagatgaaccttgaggacattccatgaagtgaaataagccagtcgacagaagagcaaatacggtatgattccacttacaggagctacctacagttaaattcatagagaagttkgaatggtgcttgccaggggtcaggaggggaggggagaatggggagttactgtttaatggaaacggaagtttagtttggcaagatgaaacaatttgagagatggatggttgtaatggttgcacaacattaggaattattattattgtttttttttttttgagatggagttttgctcttgtcgcccaggctggagtgcagtggcatgatcttggctcactgcaaccttcgcctcccgggttcaagcaattctcctgcctcagccacccgagtagctgggattacaggcatgcaacaccacacccagctaagtttgtaatgtgttggccaggctggtcttgaactcctgacctcaggtgatccacctgccttggtctcccaaagtgctgggattacaggtgtgagccaccatgcccggcccagccataaatgtttttaataccaatgaactggacacttaaaaatggctaagagggcgggtctcggtggctcacatctataattccagcacttttggaggctgaggcaggaggatcacttgaggccaggggttccagaccagcctggacaccatagcaacacccccatctctaccagagttagccaggcatgctggcacaggtggtacctatagtcccaggtcacttgagcctaggagttcaaggctgaatgagctgtgatggcgccagcactccagccgcggcagcagagtgagactgactcaaaaaaaaaaaaaataataataaacaaaaagaaaagggggttaagatgataaattttaagtgatttgtattttaccacaacaaaaaaaattggaggctgggcattgtggcttatttgtaatcccagtactttgggaggcygcggggtggatcacctgaggtcagaarttcaagactagcttggctaacatggtgaaaccgctgwctctactaaaaataaaaaaataaaaaattagctagttgtggtaggtgcctgtaatcccagctactcgggaggctgaggcaggagaattgcttgaacccaggaggtggaggttgcagtgagccgagattgcgccaccgcactccagcctgggtgacagagtgagactccatctaaaaaaaaaaaaaaaaaggagaggatggggaatcctcttgccttggcctcccaaagtgctggaattacaggtgtgagccaccgtgcccgaccaattcagtgatgtttagtatagtcacagaatgatgcaaccatctttaaaatcaatcttagaacatctgttaccctagaaagaaacctgctcactgtaactatcaagctgtaattccctctccccaccccctgccctagaaaaccaagaatctattttctttctctatggatttgcctattctgggcgtttcataggtgtgaaatcatatacatagaattcatgtaaatgggattgtacgctgtgtggtctttcgtgtctggtttctttccccgagcacagtgtttctgacggtcatccttgctgtagcatgagccagtgcttcactccttttcacggccgtctaatattccatctctatggatggaccacattttgttgtcccttcatccacagatgggcatttggttgtttctaccttttggcttttgtgaagaatgccgcagtgaacattggtggatgtgtttttgtgtagacgtatgttttcatgtctctggggtcagtacccaggagtggattattaatttaaatctttttccatcctgggttttcaggaggcaacatcatcctggcctgccgagacatggagaagtgtgaggcggcagcaaaggacatccgcggggagaccctcaatcaccatgtcaamrcccggcacctggacttggcttccctcaagtctatccgagagtttgcagcaaagatcattgaaggtaggagaacgctggccatgtgggatgaggactgggataggyggctcccagggccaggctctgagaagtgaatgaagcaagcaaactttagagcagagttttggcaaactatgagttaggggccaagtccagttgctgcctttttttgtacagcctgcaagcaacgactttatttatttatttattactactrttattttgagagggagtctcactctgtcggccaggctgagtgcaatggcgmgatctcggctcactgtaacctctgcctcctgggttcaagcgcggacctcagcctcctgagtagctgggattaagatgcctgctaccataccctgctaatttttgtatttttagtagagacggggtttcaccacgttggccaggctggtctggaactcctgacctcaggtgattcwcctgcctcagcctcccaragtgctgggattacaggcgtgggccactgcgcccggctgactttgttttgtttgtttgttttgagacagatggggtctcgctctgttgcccaggctggagtgcagtggtgtgatcttgcctcactgcaacctccgtctcccgatttcaaatgattctcctgcttcagcctcctgagtagctgggattacaggcacccgccaccgtgcctggctaattttttgtgttttaggtagagacagggtttcaccatgttggtcaggctggtctcgaactcctgacctcargtgatctgcttcccttggcctcccaaagtgctgggattacaggtgtgagccaccgtgccctacctgaataattagtttgtttgagacaggatccatctctgtcacccaggctagagtgcagtggtgcagtcatggctcactgcagtctcaacctgctgggctcaagggatcctcccacttcagcctcccaagtagctgggagtacaggcatacgccaccacacacagctaattattgttttattgttttgttttgtttttagagctggggtttcaccatgttgctcaggctggtctccaactcctgggctcaagtgatccacccaggtcagcttcccacagtgctgggattacaggcgtgagccaccgcacctgaccttattaagcatttattgatcaagtgccttccccaccatggttaaagaaatatgtgtttgttatgggacatttataaaatactgcaatgtaaagaagacagaactggctgggcacagtggctcacgcctgttaatcccagcactttgggaggctgaggcaggtggatcccttgaggtcaggagttcgagaccagcctggccaacatggtgaaaccctgtctctactaaaaatacaaaaattagccaggcgtggtggtgcacacctgtaatctcagctactcagggtgctgaggcaggagaattgcttgaacccaggaggcggaggttgcagtgagctgagattgtgccagtgcactccagcctgggtgacagagtgagactctgtctcaataaaaaagaagacagaactaaacaactttgatctgcaccagccccaggagaatcacttttatggatctttctagtcttgtttmtaataggtttgtgtgtgtatttatatatttttatgtaaaactgggaccatcctctagcttttctattcttgttcatctttaaatagactcaagaatacactaaaattatttattgtttagttgacatgtatacttgtatatattatgtacagcatgatgtacattgtatacattgtagaatggctaaatcaagctaattaacatatgcattacctcaaatacttacctgtttttgtggtgaccacatttaaaatctcttctcttaggattgcttgagctcaggagttagagaccagcctaggaagcatagtgagaccttgtgtgtaccaaagattaaaaaaaaaaaaaaaattagccgggcatcctggcatgtgcctacagtcccagctactcaggaggctgaggcaagaggatcacttgagcccgagagttcaaggctgcagtgagccgtatttgtgccactgcactctaacctggatgacagagcaagaccttttttttgagatggagtcttgctctgtcacccaggctggagtgcaatgatgcgatcttggctcactgcagcctccgcctcctgggttcaagcgattctcctgcctcagcctcccaagactataggcgggtgccaccatgcccggctaatttttgtatttttagtagagacggggtttcactatgttggccaggctggtctcgaattcctgaccttgtgatccgcctgcctcagcctcccaaagtgctgggattacaggcatgagccaccatgcccagctgctttgtttcttttctagtctggcactgaaagggccaaagctttcttsttcagagtcaatgtgccccgctcagtaaacgggtactcaggaaatgaacaaggaatgggggagttgtgggacctcatttatttagcagacgtgatctcagacctgaccaggtgctggaggtgtgagatgaaccagagctgtccttgtgccactcacagccctagggaggcaggtgcaggtgcacattcgttggttcattcattcattcatactgagcccctgctgtgcccttggggatcaagaaagagccggcactgttgtcgggtaggtgagaggcactayggtgagatcacaaagaacagtgagagggcaatgcctcagagwctcagaggtggatgaacatttattaagcacctgctgtgtaccaggtacagcactgtcaccttcatgcacactgtcccaggcaatcccacccagggcgcctctgatcctgtctctggcttgtggacacaggtgtccrgagcactgaggtccctgagacagtgaggaccccggctggacacacctgggcaggtgatgcctcctctcttagccacacgttcctcttccgggaaatggaataattccttctattttctgggattctctagagggktttttttttttttctgagacggtatcttgctttgtcgcccaggctggaggacagtggcacatctcggctcactccaagctccgcctcccrggttcatgccattctcctgcctcagcctcccgagtggcgggggactacaggcgcctgccaccacgcccggctaattttttatattttttactagagacggggtttcaccgtgttagccaggatggtctcgatctcctgacctcatgatccagccacctcggcctcccaaagtgctgggattacaggcatgagccaccacgcccagcctctctagaggattaagtaaagctgtgtctgtgacttttttagcaaatcaagtaccagcttcttggtgttttcctaagatcaacagccaggaataaagacagcagtggatttaaaaatagtgaagatsgtccattttatgtggtgtgtattctaccacactggggcaggccaggtgcagcggttcacgcctgtcatcccggcactttgggagacagaagttttgggaagatcagtttgtgagatgacactctgacaaagctggaagctgtggctcttcccagctccmgactagaaagaacacaaagcaaagagccccaggaagcaggtacccacagccttgtttatcagggagtttgagatcagcctgggcaacatagcaagacctcatctctacaaaaaatacaaaacaatcaggcaggcgtgcaggctcacgcctgtaatcccagcactttgggaggctgaggcgggcggatcacaaggtcaggagatcgagaccatcctggccaacacggtgaaaccccgtgtctactaagaaacacaaaaaaattagccgggcgtggtggcgggcacctgtaacccagctacttgggaggctgaggcaggagaatggcgtgaacccgggaggtggagcttgcagtgagccgagatggcgccactgcactccagcctgggtgacagagtgagactccatctcaaaaaaaaaatamaaaacaatgaggcaggcgtgatggtgtgcacttgtagtcccaactacttgggaggtggaggtgggaggattgcttgagcctgggaggttgaggctgcagtgagggattttttttttttttttttaagacggagttttgctcttgttgcccaggctggtgcaatgacgggatcttggctcacggcatcctccacctcctgggttcaagtgattctcctgcctcagcctcccgagtagctgggattacaggcatgcgccaccacgcccggctaattttgtatttttagtagagacggggtttcttcctgttggtcaggctgcaacctccatctcctggtttcaaataattctcctgcctcagcctcctgagtagctgggattacaggcacctgccaccatgcccggctacttttttgttttaggtagagacagggtttcaccatgttggtcaggctggttgacctcaggtgatctgcccgcctcggcctcccaaagtgctgggattacagatgtgagccaccacgcccggcctgcagtgagctttgattgtaccactgcactcggggtgagaccctgtgtccaaaaaaaaaaaagttgaggcagttcccagataaacaaaacaacaggccaggcactgtggcccacgcctgcaatcccagcactttgggaggccgaggtgggcgaattgcctaagctcagaaattcgagaccagcctaagcaacatagccaaaccccatttctacaaaaaattttaaaagtagctgcttgtggtgtcgggcgcctgtggttcagctatgtggaaggctgaggtgggaggatcgtttgagccctggcggcggaggttgctgtgagctgagatcgcgccactgcactccagcctgggccactgagtgagcttccctctcataaaaagaaaaaaaaaaaaacaggctgggcgcggtggctcacacctgtaatccctgcactttgggaggcagaggcgggtggatcacgaggtgaagaattcaagaccagcctgaccaagatggtgaaaccccgtctctactaaaaatgcaaaaattagcagggtgcggtggcgggcacctgtaatcccagtactcgggaggctgaggcagcagaatcgcctgaacccaggcggtagaggttgcagtgggccatgggccaagatcacaccactgcactccagcctgggtggcagagtgagacttcatctcaaaaaaaaaaagaaaaaaaaccaaaacaaaacaccagaagctggcggcactcctgggcgcccagctgtgagtggagtctccctgtcccgcctttgggccttacccgtgctgcgcctgctgcctgcatyccccttccctgggtctccgcacgtgggccctgcctcattttcccggtcccagtttctgcgtcacctcctgagaggggcctcctgtcagcttccacgcagctctgtcacgggtagattctctcacgagtggaagtggctctcagctgcactggaatgtccggtccacacggacgggrcctcggctgtgctgtccaccctgtatttccagtgcccagtaataggtgcttagaaaatacttacygaatgagtaagtatacagttgtaccaggcaggtgatgtyattatcctttttttttttttttttttamaaggagtaaactgagtcacagagaagtgatgtgacttggccaggatcatgcagctggtcggggtggagccaggctttgaacctgtctgtcctgctccagagctggtattcatgacgggtgtgctgcaaccccctccttctcacacagagaaccagatggtgtctgtgtgttacgcgctggacacctaattcacgatccccgccgaaaaccacttcgggagcattatgaattccattgtgtcctccacccccaaggataggttgggatcctgaacccccatccctcagcatgtgacttcatttagaggtgggtgtttacagaggtcctgaagtgaaaatgaggtcattagggtgggccctaatccagtgactggtgtccttatgaaaaggggagatttgcgcacagaaacagacgtgctagctgggcatggtggcgcatgcctgtggccccagctacttgggaggctgagcaagaagactgcttgagcctgggaggttgaggctgcagtgagcagtgattgcrccactgtactccagcccaggtgtcagagggagaccctgtctcaaagaaatataaaaaataggccaagtagactgagtgtggtggctcacgcctgcagtcccagcactttgggaggctgaggtaggtggatcacgaggtcaggagtgtgagactagcctggccaacatggtgaagccccgtctctactaaagatacaaaaaattaacccggtgtggtggtggatgcctgtagtccagctacttgggaggctgaggcaggagaattgtttgaacctgggaggcrgaggttgcagtgagccaagatcgcaccattgcactccagcctgggtgacaagagtgaaactccatctccccccccaaaaaaaaaaaaataggctgggggcagtgaaattgcagcactctgggaggccaaagcaggaggattgcttgagttcaagagtttgagaccagcctgggcaacatagtgagaccatgtctgaaaaatctaaaattaaaaaaggaaaaatgaaaaaaaaaaaagagacagctccaaagggaagagggagagaggagatggtcacctgtgagccaaggagagagaccagagcggatcctccctgagggccctgagagggaaccagccctgcccacaccttgatctgggacttccagcctctgggactgtgattttttttttttttttttgagatggagttttgcttttattgcccaggatggagtgtaatgatgcgatctcggctcactgcaccctctgcctcctggtttcaagcgattttcccgcctcagcctcctgagtagctgggattacaggtgcatgccaccacgcctggctaattttgtatttttagtaaagacgcggtttctccatgttggccaggctggtctcaaactcctgacctcaggtgatctgcccacctcggcctcccaaagtgctgggattacaggcgtgagccactgtgcccggccaggtctgtgaggttttaaaccacctgtctgtggcactttgttacggaacccgagctgagtggtacagggaggaaggccctgtggttcagcgcattttacagctgaggaaactgaggctgcagtctccatctgtgtgtcctttggttgcttgtatgagtgaggtggcaggtttgggaatgaaaccacgcctgcggtgccggggctcccaccggtaacctcccgtttttggcctcggggctccggcaggaagsagtcccaaggcttagatggaggtgyggagggcgtgtgagtgtcctggagctgctgtaacaatgtactgcaaacccagtggcttacaccctcagacgtgcattccctcacggttccggaagccggcagtctgaatcgcggtgtccctgtggctgtgacytgtgagacgggccataatcctcccagcctcttccacttccagcgggggcggcccaccctcaccttggagctgtgcctctccggtctttgcctctgtccacacatggccttctccccatgtgtctctgtctctgttttcccttcctataaggacaccagtcattggattagggctcaccctaatgaccgcatcctgacatggccacttcggcacagaccctgtttccggcacaggccacattcacaggttgtgggagcacaggagtgtttctgctggtgcatcaggctggggtctgtcctcacsgggatgtytcctcctccacccctctcttccagaggaggagcgagtggacattctaatcaacaacgcgggtgtgatgcggtgcccccactggaccaccgaggacggcttcgagatgcagtttggcgttaaccacctgggtgaggcctgggcaggggctgcaccatgggttcaagcgatcctcccccgtcgtcctcccaaagtgctgggattttaggtgtgagtcaaaagtgaccttttcatcatccttaatccaggtcactttctcttgacaaacttgctgctggacaagctgaaagcctcagccccttcgcggatcatcaacctctcgtccctggcccatgttgctgggcacatagactttgacgacttgaactggcagacgaggaagtataacaccaaagccgcctactgccagagcaagctygccatcgtcctcttcaccaaggagytgagccggcggctgcaaggtacgggggygctaggctcggcctccctcttgctttactctgagcctagagcggcctttccatgatcctaggctgatgggaggccaaacggtggatccagaacagagtcagcaaaagtagagcatgtggaccacgctgcccgcttctggtgyctgaagcagacatcactaatcgatcgttcttctgaggattgtctgttcatcccaggtggtctagtctgcctggatcagatgtccttccctgctgctgttgggcaggcagctcagccttttggctccagccagtgagtctcaaccaggggcagttttgacccgcagttgtcaatgcctggaaacacagtgatcacagctggcttggggagagattgctctgggcatctggagggtaaaggcccagatgctctcaatgtcctacagcgcacgggatggcccctcactcctcccaacccacagcatccacagtgctgagattgagaaatctgtgctaggcctttgcttctgaaagacggtctgtggaccagcggtgccagccccactgggagctggtcagagttacagtatcttaggtcccaccgccacgcaccgatgcaggctcccggggtaagctcagcgttctgggtttatgaagccctccaggaaagctcggctcccagcagccatgtggcagagccgctccgcaagataagaccacttcactaagattccagagcaagagggacgatggggtttgagtgcaggaagcagcctggtgcccggaagccccacagctgggtgtrggctgccacagcctcccaggtgaggctggacccctccctcagtcttctctttctttcttccccaggctctggtgtgactgtcaacgccctgcaccccggcgtggccaggacagagctgggcagacacacgggcatccatggctccaccttctccagcaccacactcggtgagtcccctcccagcctggggtctccacgtggagccctccacccctgctttctcagcccagggcccaggaccctccctcagagaccgtccctgaggcctcatgcctgctcctcgcctacgtcttctgaggcacagagcacaggtccctttcctcygttgacctggcctgccagcctctaacagcyccgggaagcaggcagagccctgctggcggatgagaaaaccgtgtctcagaggaagaggccgtggagctgacgcctggagtcaggctgtactcagggtaactccagcttcaccccaaaccagctgcacctcctggggaagagctgttacccctctgagcctgtttcttcatctgcagagtgcaggccttaataggactcacctcacagtcactgggggggttatacgagaccttccttgaaagggccagcacaggaccccgcccagagaataggtggaacaaacagttggagctttacttacttatttttgagatgaagtcttgctctgtcgcccrggctggagtacaatggcatgatctccactcactgcaacttccacctcccaggttcaagcgattctcctgtctccaagtagctgggattacaggtgcacaccaccacacccagctagaggtggggtttcaccatattggtcaggctagtctcaaactcctgacctcaggtgatccaactgcctcccaaagtgctgggattacaggtgtgagccaccacccccaggcagttcatgctttatgactagtgtttataatcctgaaaaacatggagtgggtgattggttggcatcaagaatcttaacttggcgaggctaatagccacgcctgtaatcccagcactttgggaggctgtggtgggcggattacctcaggtcaggagttcgagaccagcctggccaccatggtgaaaccccgtctctactaaaaatacaaaaattagccaggtgtggtggtgtgcacctgtagtcccagctactcaggaggctgaggcaggagaatcgcttgaacccgggaggcagaggttgcagtgagctgagatcacaccactgcactccagcctgggtgacagagcaagacaccaggtctcaataaataaataaataaatgtctttttttttttgagacggagttttgctcgtcacccaggctggagtgcagtggcacaatcttggctcactccaacctctgcctcctcggttcaagtgattctcctgtctcagcctcccaaagtagctgagattgcaggcgcccaccaccacacccagctaagtttttatttttagttgagacagggtttcacacgttggccaggctggtcttgaactcctgacctcaggtgatccacctgcctcagcctcccaaagtgctgggattacaggcgtgagtcaccacgcccagccctttttttttttttttttgagacgaagtcttgctattgtcacccaggctggagtgcaatggtgtgatcttagctcactgcaacctccgcctcccaggttcaagggattctcctgccccagcctcccgagcagctgggattacaggcacccgccaccacacccagttaatttttgtatttttagtagaaatggggtttcaccatgttggccaggctggtctggaactcccgaccccaggtaatccgcccgcctcggcctcccaaagtgctgggattacaggcctgagccacctcgcctggccaaaaaaaaatccttaacctgaggctggtgccaggtgcatttaataagatgttattaaaggagaaatggggtagggtgaggactggggctgaccaagaggaagagagcttccattttcctggacaaagccaggaaggctccttgggggaggcagcttttggtctgatccctggtctggtgggatttgcctgggcagtgccagggaagggaactgcagatggaggcagccaaggggaaagggctagaggagggctctgtgggactccagggacccggagctccctgaccggggagcggggcttccttccttctctctgagcgagtgtggactaaatgccctgtgggctgattgcagggcccatcttctggctgctggtcaagagccccgagctggccgcccagcccagcacatacctggccgtggcggaggaactggcggatgtttccggaaagtacttcgatggactcaaacagaaggccccggcccccgaggctgaggatgaggaggtggcccggaggctttgggctgaaagtgcccgcctggtgggcttagaggctccctctgtgagggagcagccmctccccagataacctctggagcagatttgaaagccaggatggcgcctccagaccgaggacagctgtccgccatgcccgcagcttcctggcactacctgagccgggagacccaggactggcggccgccatgcccgcagtaggttctagggggcggtgctggccgcagtggactggcctgcaggtgagcactgcccygggctctggctggttccgtctgctctgctgccagcaggggagaggggccatctgatgcttcccctgggaatctaaactgggaatggccgaggaggaaggggctcygtgcacttgcaggccacgtcaggagagccagcggtgcctgtcggggagggttccaaggtgctccgtgaagagcatgggcaagttgtctgacacttggtggattcttgggtccctgtgggaccttgtgcatgcatggtcctctctgagccttggtttcttcagcagygagatgctcagaataactgctgtctcccatgatggtgtggtacagcgagctgttgtctggctatggcatggctgtgccgggggtgtttgctgagggcttcctgtgccagagcccagccagagagcaggtgcaggtgtcatccygagttcaggctctgcacggcatggagtgggaaccccaccagctgctgctacaggacctgggattgcctgggactcccaccttcctatcaattctcatggtagtccaaactgcagactctcaaacttgctcatttaaaagaaaaaaaaaagaagaaaatgtacccgagtcgtagattttatttttcctctgtgcatgggtgaatgcccatgagctgaacaaaggcaactcatggctttattccttttaggaaacaaggcatcagtttatcaccagggcaacaggccatgcaaaagttcagacttggccgggcgcggtggatcacgaggtcaggagatcgagaccatcctggctaacacaatgaaaccctgtttctactaaaaaaatacaaaaaattagctgggcatggtggtgggcgcctgtagtcccagctactcgggaggctgaggcaggagaatggtgtgaascygggaggcggagcttgcagtgagccgagatcatgccactgccctccagcctgggtgacagagcaagattccgtctcaaaaaaaaaaaaaaagttccgactttttagagatgaaagcccctttcacctgtttcacaggaaataaccgtttaagtccgggcatcttacaagactgctgtgttagaaactggatagagatcagggtgagatgaaggggctcttagcttaggtgcagaaccgaaggaggcaccgaaaagctcagtaatcgagatagaaaacatgttttcatatttgagatactggggaggccagggatgctactcaatatcccacagtacacagaacagccacctagtctcgctctgttgcccaggctggagtgcaatggcatgatctcagctcactgcaacctgtgtctcccatgttcaagcgattctcatgcctcagcctcccgagtagctgggattacaggcgcccaccaccacacctggctaattaaagacagggtatcaccatgttggccaggcttatcttgaactcctgacctcaggtgatccacccgtcttggcctcccaaagtgctgggattataggtgtgagccagtgcacccagccctttttgcttttttagagacgaggtcttactgtgttgccaaggctggagtgcagtgccrtcacagctcactacaacctcgacctgtgattctcctgcctcagcctcctgagtatctgggactacaggtgcatgccaccacacttggctaattatttgtagaggtggcaacataacatttgctatgttgcccaggctggtctcaaactcctgggctcaagkgacccttccgccatggcctcccaaattgttgggattacaggcatgagccaccgtacctggccttagttttctttccgatgccacaccaaatggctagagggtgtgtttgggatgacctgagtctggtaggcaacttccagtggaccccacrgtgcgaccacctccctttgagtgtgggggagatgtagcgactggcttctagcagtaggatagggcagaagtgacagtaggttagtcttgtggttaggttacaaaactgacctctgtgatggtagcgtccctcgtcagccctcttgtcttgccctctcgctggctggyggtgatggagccggctgccatggtgagcggccctgtggagaagccagggaggaatggagacaatctggagaaacagaatcacaccaacaaccaygtgcgtgagcttgctgtgtgctcttgcttgggagcaagttacaggttcagcccaagaggagyggaccactccagggtgtaaataccaggagggggaattggaagactaccctaagcatgccgaccggagactgtgtgtgtgtagtaggtatttcttactgggagatcacggaaaagcaagtttgagaaacactcccatcagatgggtgggccgaggataacctcaaagcctttggttctccgwataggtgcgtaggactcacccaggcactctttccttttttaaattgtggtaaaaactacataacagtggccaggcgtgatggtgcacgcctgtaatcccagctattagggaggctgaggcagaagaactgcttgaaccaagggggcaccgctcctggctgtaacatgttttcaatatcccccctcttcggtggcacaggggctggccccatatacatgtgcgatggcaactgacagggtccctgatamaccggagtgctccagaaacaccccattgcgtgggacggaggatgttaggtggccctcctagcrtttgagtttgataaatgagcaaaggaagtggtttttactagaaagccagctttcctttttttttttttttttttccagccagcaaaccccaaacaggaacctatggttggtgatggatgtgcgttcagaaagcagggagggagggggagtcagaggtgagggggtcatcagccatagctgtccgctgcatcaccccctcgctatctccaggaagcgttctgggcttttcctgttgtgcagtgtggaagtgctctatcttcattcatatcaaggaaagtcaaaggacaaactaaagccggcagcgtctttctggcttcctagtcaggctgttcggtagcggagtgtcaccctgatttccagccccgcagcacacacastgagabcctgcctggcgtgattcagaggcaacgtatttcccaaggtggctgtgaaggaaccagggggataaacacagcccgtgaaccgcacgccagaggacaggtccggctgcctgccgcggagtcgtcacggcgtgtcgcgtctgagcgcttctccaaagcacccaagtggcacccggggtgacakttacatcatcttgagtacagttctctcaaggaaaaagcaagcccagcatcttctgccatggcaaccctggcttggagcctccataagagagaaggccctaagaatwccattttcttgctctaagttgctcttacgggaaagaagtgataatattcttcctaaacgccatcattcgtgcatccttcccacctayatgtgtcaccggatcattctccgcctgggcggggccgtcctgtgcactgcagaatgctgagcagtgtccttggcttcgaccgaccacatgccaggagcaccccaatttctgccatcgggtgattgacttcactgttgcatttgattttttatgtatcttttaaaaggacccaatagggccaggcacagtggctcacacttgtaatcccagcactttgggaggctgaggtcggtggattgcttgagcccaggaggagttcaagaccagcctgggcaacatagtgaaaccccaactctacaaaaaacaaatgttttatttttatttattttagatggagtttcactcttgttgcccaggctggagtgcagtggcgcaatctcggctcattgcaacttctgcctcccgggttcaagcgattctcctgcctcagcctcctgagtatctgggattacaggcatgcgccaccacacccagctaattttgtatttttagtagagatggcgtttctccatgttggtcaggctggtctcaaactcccgacctcaggtgatctgcctgcctcggcctcccagagtgttgggattacaggcgtgagccaccacgcctagccgggtttatagttttataacccttatgacaaatctcatagtattctgcagggataagcatgaaaccactygttcaataagtgcaaacaaaaacgccaacaattcttaagacatttctaatcttattttaccaataattttaaagccagcttatgtattaaagatttataactacttttattaacacgtttaaaattctatgcagcttaaagcatttataatggataaaactgccaatactgagtgcctgacataatatttgaaaggtggcaggcattcaaccatggtcactgaatgagagatgtagggaagatgatggcagggaggtttttagatatcaacaccctgatagktctcattttaaccacctgtaagtgcacatacaagtcaacggcactggccgggmgcggtggstcaygcctgtattcccagcactttgggaggccaaatcacaaggtcaggagatcgagaccatcctggctaacacggtgaaaccccgtctctactaaaaatacaaaaaatcaactaggcrtggtggcrsgcacctgtagtyccagctactcaggaggctraggcaggagaatcgcttgaaccygggaggcggaggttgcggtgagccaagatcgcgccactgcactccagcctcgkcgacagagtgagactcygtctcaaaaaaccaaaaaacaaaaaacagtcaatggcattaaatataaatacatttacagtgttgtgtaaccatcaccactatggatcccccagactttgtcatcatcttcaacctaagcgctccctattaaatagtaactccccacttttcccaggccttggcaaccaccattctaatccctgtctctatgaatttgactcctctcgatacctcagataagcggcacaatgcagtatttatctgtcaagtccggaatatttcctttagcataatgtcttcaaggtccatcacgttgtagcatgtatctgaatttattcttttataatattttttattttttggagacagaatctcgctctgtcacccaggctggagtgcartggcgygatctcggctcaccgcaacttccgcgtcccgggttcaagccattctcctgtctcagcctccggagtagctgggactacaggtgcstgccgccatgcccggctattttttttttgtattttttgggggttttactgtgttgcccaggctggtcttgaactsctgagctcaggcaatctgcctgcctcagcctcctaaagtactaggattacaggcatgggccaccacgcccggccttatttttatttttgagacagtctcactctgccgcccaggctggagtgcagtggtgcgatctcggcttaccgcaatctctgcctcccaggttcaagcgattctcatgcctccgtctcccaagtagctgggattacaggcacctgccaccatgcccggctaatttaacgcccagctaatttttgtatttttagtagagatggggtttcaccatgttaaccaggctggtctcggactcctgacctcaggtgatccgcccgcctcggcctcccaaagtgctgggattacaggcgtgagccactgtgcctggctgatttttattcttttagttaaggctggttgatattaccttgtgtgtatataccacatgttgtttatccattgttgttgatggacatgtgggtggtttcaccttttggctattgtgaataaagctgctatgaacactgtgtacaaatatgttagagaccctgttttcagttcttttaggtgtgtaccccgaagtggaattgctggattttatggcaatcccacgtttaacttctggaggagctgctggaactgttttccacagcaggggcgccatgttacgtccctgccagcaatgcacgcgcagtycaatttctctgcatactcaccaatatctgctrttttccattaaaaaaaattatagccggtcgggtgcagtggctcatgcctgtaatcccagcactttgggagaccgaggcaggtggatcaactgaggtcaggagttcaagaccagcctggccaacacagtgaaaccccatctctactaaaaatacaaaaattagcctggtgtggtacatacctataatcccagccacttgggaggctgaggcaggagaatcgcttgaacctgggaggtggaggttgtagtgggccgagatggcgccactgcactccaacctgggcaaaaagaacgagactttgtctcaaaagaaaaaaaaaaaatacagccattccagaaggtgtgaagtcatatctcactgtggttttgatgcgtattttcctagtgacatcagggagtttatgggagcacgggaacacagaccaggccccagcaggcggacaaacggtgcaacgccaggctggccagaggagataagcgcggctccttggagcttgtgtgcaagtcactgtactgaggagcyggctacggctcgatgagtctcaattaggaaaggcyggggctggtggaggaagggaggagagcattcttcatcctcatcacatcctgagcctgtgccccaggctcccaccacttccctccctggycacagagctcaggacagggctgaggaaccatgtctccatccccgaccgccctcttctgtcttggtgagtcctgagggtcagatctgggaaatgctgaaggacaggcatggactgccagacaaaggatttttaagaawtttgcattggtgatgaatttcaggacaaaaaggaacctgtaagagccccttcatttgttgggtggggaaacggggggccagcgagctggcattttgcatgagttattccagtgtattcatggctgggtcaggaaatgaacagagtatcctagcattggtcacaactttgttctactacactgcagttgccccttttttaaaaaatgtgggccaggcacagtggctcacgcctgtaatctcaaccttgggaggccgaggtgggtggatcacctgaggtcaggagttcaagaccagcctggtcaacatggtgaaaccccatctctacaaaaattagccgggcgtgatggcgggtgcttstaatcccagctacgtgggaggctgaggtgggagaattgcttgaaactgggaggcagaagttgcagtgagctgaggtcaggcattgcactccagcctgggcaacagagagagcctccatctcaaaaaaaaaaaaaaaaaaaaaaaaaaaggctgagtgccatggcttacacactttgggaggccgaggcgggtgggccatctgaggtcgggagtttgagaccagcctgaccaacatggagaaaccccatctctactaaaaatacaaaattagccgggtgtggtggcacatgcctgtaatcccagctactctggaggctaaggcaggagaatcgcttgaacctgggaggtggaggttgcggtgagccaagatcacaccattgcactctggcctgggcaacaagagcgaaactccgtctcaaaaaaaaaaaaaaaattgtggaattgatatctggactaggtatggatttaatttgtcagtatcccctacagtagtggagtaaatagtctcctgatggatgggtggcaggtcgaatgcatttctgctgcctgatcttcacttgtgctgggcatgtcgaatgmattatttcctgatttcttcagaatttgaccactaaagggacagcatctccaaaaggctaagcaggaagaagatggttgcattactggagatgagagggttaactgtgaatataaacaacctctcattcattatccatccatggatgtattctttttttctttttgtttgttttttgagatggagtctcgctcagtcggtcgctcaggctggaatgcaatggcatgatctcagctcactgcaaactctgcctcccgggtccaagkgattctcctgcctcagcctcccgagtagttgggattacaggcatctgccaccaggtctggctaattattgtatttttagtaggggcggggtttcaccatgttggccaggctggtctcaagctccttacttcaggttccacccgcctcggcctcccaaagtgctgggattacaggcgtgagccaccgcacccagcctgttttaacttttatttatttaattttatttgagatagggcctcacttctgtcacccaggctggagggcagtggcatgatcatggctcactgcagcctcaacctcccaggctcaaccagtgcctccccatcagcctcctgagtatctggaactacagttgtacaccatcatgcctggcttgtttttgtaatttttttagttacgggggtccgctatgttgcccaggctggtcttgaactcctgggctcaagcgatccacccacctcggcctcccaaagtgttggggttacaggtgtggcctgtacaggttactgcatctggcttgttgcttcagtagcttttgggatacaagtggttcttggttacatggatgaattatattctggtgaattctgagattttagtgcacctgtcacctgactagtgtaccttgtacctaatgtgtagtttttcatccctgccccacttctgcccttcccttctgagtctctgaagtccattacatcactctgcatgcctttgcatacccacagcttagctctcacttataagtgagaatatacagatttttgttttccactcctgtattactttacttagaataatgccttccagctccatccaagttgctgcaaaagactttttttttttttttttaaagacggaatytcgctctctcaccaaggctggagtgcagtggtgtgatctcggcttactgcaaactccacctcccgggtttaagtgattctcctgcctcagcctcccgagtagctgggactacaggcacccgccaccatgcccggctaatttttgtatttttagtagagatggggtttcaccatgttgggcaggatggtcttgatctcttgacctcgtgatccacccacctcggcctcccagagtgctggcattacagatgtgagccactgtgcctggccaaaagacattatttcactccttttaatggctgagtagtattccacgctcatttatttttatttatttttattttttgacatggagtctcactctgttgcccagactggagcgcagtggcatgacgttggctcactgcaacctccacctcccaggttcaagcgattctcctgcctcagcctcccaagtagctgggattacaggctcctgccactacgccccgctaatttttgtatttttagtagagacagggtttcaccatgttggtcaggctgctctcgaactcctgacttcaggtgatccgcccaccttggcctcccaaaatgggattacaggtgtgagccagcgcgcccggccggtgagaacatttaaaatctactatcggtgatatgcaagtgtacaatatgttgttattaactacagtcaccatgatgtgcagtagatctccaagacatactcctcttgtccaactgaaactgtcctcctctgaccaacatctccccaaaccttaccccaccgccccggtaaccaccactgtgctctctactcctgtaagttcccaagtccacactctttaccactaattggtgctgctagggtttgaatctactcctgccagctgtaggactgtggataagatactgtctcactagcctgatgtataagaggggactgataatggtgggtaacccgtacgattatggcgacttggagtccatgcacagaaggcgctcagcacggcgcctggaagactcccagccatggtacagcgtcgcatggaaacctacaaagaggctgaggtgggctgtgatgcggcaggaggagggggacagagaagcggccggagcttgsgttggggtgcagagggagcctggggtggacaaagggtggtggctatgggggcgctggtgacaagttgtcactctctgagctcagagtcaagacatgakctgggttcacccacttcttgctatgtgagctacacaaggttgcttggcctctgcccagtttccttatgtttacagtgggaatgacaactatcccgcctttgtgtgtgtgtgtgtgtgtgtgtgtgtgtgtgtaagaatgagggttaccagataaaacactggatgcctggttaaattggaatttcagataattagtactttttttttcctcctcctcttcgttttctgagacagggtcttgctctgttgtcagtctggagtgcaatggggcaatatcatttttttttttcctcgagatggagtcttgctctgttgcccaggctggagtgtagtggcgtgatcttggctcactgcaacctccgcctcccgggttcaagtgattctcctgactcagcctccccagtagctaggattacaggcacgtgccaccatgcccagctaatttctggtatttttagtagagatggtgtttcaccatgttgaccaggctggtcttgaactcctgaccttgtgatccgcccaccctggcctcccaaagtgctgggattataggcatgagccaccgtgcccggccagtggtgcaatcttacctcacagcagacttgacctcctgggctcaagcaattccaggaggggatcgcttatgcacatgtatttgtatacatatgtatatatatacacacacacacatgcatacatatatacgtatacatacatatacacatatgtgtatgtacacacgtatatgtacatacacatgtatgtatagatgtaggtttacatatatgtactatatgtgtatatacatatagtaatcagatcagggtaagtagcacacccatcttctcaaacatgcatcctttctgtgttgggaactttccccatcctccttcaggctatttgaaacgattattatatatattacatcctatcatgtaatcatggaatactgattcaaccaaatgttgtaaataccgggaaacccatggccagcacatgctgagacgtcctgacttacacgctgaggctccatcctgctccatccttggagcccaatgcatcccattagtgtggggttttatcgcatatattacatagacaataaaatacaataatatacaatatgcaatagtatttacaatacttgtctacacaattgcatactattgtaatgtacttggatattatttaatattgggagactgaagggaggaaacgaaggaacagcaatgtctcaggtcccattcctcacatccactgaggaagtcaatgggcaatgtctaacacgaacgagcccaccgtgtctaacacaacacaaacgagtccacygtgtctaacacaacacgaacgagccgtgtctaacacaacacgaacaagcccaccgcgtctaacacgaacgagcccaccgcgtctaacacgaacgagcccaccgtgtctaacacaacacaaacgagtccaccgtgtctaacacaacacgaacgagtccaccgtgtctaacacaacacgaacgagtccaccgtgtctaacacaacacgaaggagyccaccgcgtctaacacgaacgaacccaccgtgtctaacacgaacgaacccaccgtgtctaacacgaacgagtccaccgtgtctaacacgaacgagtccaccgtgtctaacacaacacgaacgagtccaccgcgtctaacacgaacgagtccaccgtgtctaacacaacacgaacgagtccaccgcgtctaacacgaacgagcccaccgcgtctaacacgaacgagcccaccgcgtctaacacgaacgagcccaccgcgtctaacacgaacgagcccaccgcgtctaacaccaacgagcccaccgcgtctaacacgaacgaaccctccgcgtctaacacgaacgagcccaccgcgtctaacacgaacgagcccaccgcgtctaacacgaacgagccctccgtgtctaacacgaacgagccctccgtgtctaacacgaacgaacccaccgtgtctaacacgaacgaacccaccgtgtctaacacgaacgagtccaccgtgtctaacacgaacgagccctccgtgtctaacacgaacgaacccaccgcgtctaacacgaacgagtccaccgtgtctaacacgaacgagcccactgtgtctaacacgaacgagccctccgtgtctaacacgaacgaacccaccgcgtctaacacgaacgagtccaccgtgtctaacacgaacgagcccaccgtgtctaacacgaacaagtccacagatagcagtacgccaccatgccttgccctcctctcccaccacccccagccatggatctgctttcttctccatctcctatagatttacctattctggatatttcatgtaaatgacctcataaactatgtggctttttctgaccggtttctctcacttaaattacattcctgtgtgtcttttgaagaaatwattaggacagagtaaagcatatgcatgcaaaygtcttatcaccgcgcccagcaggcaggaatgtccataaaagcgagtcctggcatctggtccctttcttctttcctcagggctgtgtctggggcgtgtgccagcgcagagtggtgagtccttccccagaccccttccctcctgcgggatcyrccagcgcgggrgcagcggggtccaggcggggtctgcggggaggctgacccagccctgctcctcttccaggaccgctccccaagccctccctccaggctctgcccagctccctggtgcccctggagaagccagtgaccctccggtgccagggacctccgggcgtggacctgtaccgcctggagaagctgagttccagcaggtaccaggatcaggcagtcctcttcatcccggccatgaagagaagtctggctggacgctaccgctgctcctaccagaacggaagcctctggtccctgcccagcgaccagctggagctcgttgccacgggtaaaggaagggggatcrragcctgggactgcgtggtcctccgttcaggacacaaatacgggggacattgagggcagggattagggtgaggcaaacgaggcamtggcctagcgggtggtggtgccacgacatttatggatcaatgtgaataatattttgttttttggacacagggtcttgctgcgtcacccagggtggagagcagtggcgcgatcttggctcactgcagcctccacctccagggctcaagcgattctcccgcctcagccctccaagtagctaggattacaggtgtgcaccaccacgcccagctcattttttatgtttttatagagatggggtctcttgacagttttcacaaaaggcattaaaatacaaaagagagagagatagggtctcgctatgttgctcaggctggtctcgaactcctgtgggctcaagctatccttccaccttggcttcccaaagtgttgggatttcaggcgtgagccactgcatctggctgtgaataacattttcatgcaatttttwaaaaaatcaaaataaattgcaaaaacatccacaatgaaaaaaaccagaatttcaaataaaggcagaatcagccagtgcctgtgtcaagtcataccagagtctgtgccaaaaygaaaaacaggcamccctttatctgtgttttaatgcacttaaaaaaattagcgatggggtcttgctacactgcccaggcyggagtgcagtggctgttcataggagcagtcatagctcactgcagcctggagctccttgccttgagcaatcctcctgcctcagcctcatgagtagcagggactacrgtcaygggccaccgtgcttggctcgggattctttttaaaactttgttttggartaatttttagactgacagaaaagttccaaagataatattaatggaaatatttcacccaggatcccctcatgttaacatcttacatttgttacaaccaaaaaataaacgtagcactggtcccagtggtttacacctgtaatcccagcactttgggaggctgaggcgggaggattgcttgagctcaggagttcaagaccagcctgggcaacatagtgagacctcatctttaaacaaaattaaaaattagtggggcatggtggcatacacctatagtcccagctactcaggaggctgaggcaggaggatcgcttgagccagggaggccraggctgcagggagctgtgatcacgccactgcactccagcctgggtgacagagtgagaccctgtatcaaaaaacaaacaaaaaactaaccatagacacaactatrttatatcaagtaaactccaggctatttgaatttcaccagtctttccactaatatcctatttctgttcccagaccccgtccagggccccacagtgcatttagtatttatgtctccttagactcttgattggtgcaaatattctaatttcttttcttatttwtttwttttttttaagagaagaggttgggccgggcgcggcggctcacgcctgtaatcccagtactttgggaggctgaggtgggtggatcacttaaggtcaggagtttgagaccagcctggccaacatggtgaaaccccgtctctactaaaaaaaataataataattagctgggcgcggtggcgcactcctgtaatcccagctactccggaggctgaggcaggagaatcgcttaaacctgggaggcggtgagccgagattgcaccactgcagtccagcctgggcgacagagcaagactccrtcttgggaaaaaamaaaaaagagaagaggtcttactatgttgcccaggctttagtacactcgctgtattcacaggcatgatcatagctcactttagcctcaaatccctgggctcaagtggtcctccctagtagctgggactataggtgcacccagttagtgcacttttaaatggttattttctagaagtaggttttggaaatagcactgatgcgcttgcatccacaaaagcctagaatgtaaaattctaataaatctttcaggggaataaagtattcaaacagaataatgtgagttttaacgacctactcttcaaattttcaataattttttcaaataygttaattgtttgggaataattaaattttacatcccaggagagtgcctcactcacgccaccctaattcctggccagctgcactgtggtctattccgcgttataaatcctgcctccctcccctcttccctgcctcactcccctccacagcatcactggcctcctctctgctactagaatggaccagcctggctgcctcattacttctttcagggtcagactcaaatactctcttctcgctaagtatatcccccaccaccctagtcaaagtggccctcctcactatctggtatgtgaagtatacctttttttatcttggtggtggttgtctatttttaattcctggtcgggcacggtggctcacgcctgtaatgccagcactttgggaggccgaggtggacggatcacctgaggtcaggagttcgagatcagcctggctaacatggtgaaaccctgtctctactaaacatacaaaattaactgggcatggtggtgcatgcctgtagtcccagctactcgggaggctgaggcaggagaatcgcttgaacccaggaggtggaggttgcagtgagctgggatcatgccactgcactccagcctgggcaacagagtgagattctgtttcccaaaaaaaaaaaaaaaaaaaaaaaaaaaaaaaatatatatatatatatatatatatatatatatatatatatatatatatatatatatatatgccattgcactccagcctgggtgacagagcgagactccgtctcaaaacaaaacaaaacaaaacaaaacaaatgaaacaacaaaaaaagaatacagacagacacataatagttgcttaagtgaaaattaagagaaaatattgctgagtgaatgttacagttatcaggcagcttatatatttccttccttccttcctccctccctcccttccttcctctttctttctttttcttcttgttgagtgaatgccataattattaggcagcttatatttttatcttccttacttcctttcttttgctttctctctctgtctttttttgagacaaggtctcactctgtcacccaggctagtgtacagtgatcatagctcactgcagcctcgccttcctgggctcaagcgatcctcccaccttggcctcccaaagtgctgggatgaccggtgtgagccgccgcacccagcctcaacctttgtttttctgactcctgtgtgcaggcatgcatcaccacaccggtctatgacaacaacctcacatcagagtagtgtaggttcgtgtttaggagcggagaccctggaatcaaactctgtgagtgcagatttcaactctgccacttatgatcttggacaagttttttatttatttttaaattaaaatatgtccagctttgttgaggtataattgaaaaacaaaaatggaatatatccaaggtgtacaagttgatgttttgatatacgaatccactgtgagacagttactactagcaagctaattaacatacatcacctgacacagttaacttttttgtgtgtgagaayacttataatctaccctcttagcaaatttcagctrtacactgcagtattgttacctagagttggacaaattatttaatgccatgtgccttagtttcatttataaaatagggacattaagagtgaggactccataggtctctgaggattcactgaactgatayacatcataagtttggaaggcacccggaagctagcactgtcagccacatttacaacgtaacaattgtatgtggcaatacaagcttacagcacagtataagcttaagctatttacttactccagcgcttgctaggcaacaggcactctgcaaattactgtrtactgtctcattcagtcatccccattttaacagaacaaggcagtgaggctcagatacagagggagatttgtctccagggccaccaggcccctgaaggcagaactaggatttgcacccaagcactaggacgtgagcacagcctccttcctcaaccactgggtgactcgacctctctgtgagcttgggtgggggagtgcgctctctgggagggatacagccaaaaagctccccagctcttaggcaggtgtggggacctccccagtctcagctgagatgctggctcctgccttcaacatcagactttctttttctcccaggagtttttgccaaaccctcgctctcagcccagcccggcccggcggtgtcgtcaggaggggacgtaaccctacagtgtcagactcggtatggctttgaccaatttgctctgtacaaggaaggggaccctgcgccctacaagaatcccgagagatggtacmgggctagtttncccatcatcacrgtgaccgccgcccacagcggaacctaccgatgctacagcttctccagcagggacccatacctgtggtcrgcccccagcgaccccctggagcttgtggtcacaggtaggggtagtgcagaccaaacctttcttcctcagcctttataggtcctgatggccattccaagggaggggccataagtgggaaggaagtgggagggcaggaagccctgggctgcaggggcggggccgtaggtgggaaggaagtgggagggcaggaagccctgggctgcaggggcggggccgtaggtgggaaggaagtgggagggcaggaagccctgggctgcaggggcggggccgtaggtgggaaggaagtgggagggcaggaagccctgggctgcaggggcggggccgtaggtgggaaggaagtgggagggcaggaagccctgggctgcaggggcggggccgtaggtgggaaggaagtgggagggcaggaagccctgggctgcaggggcggggccgtaggtgggaaggaagtgggagggcaggaagccctgggctgcaggggcggggccgtaggtgggaargaagtgggagggcaggaagccctgggctgyaggggcgsmgccrtaggtgggaaggaagtgggagggcaggaagccctgggctgcaggggcggggccgtaggtgggaaggaagtgggagggcaggaagccctgggctgcaggggcggggccagaggtgggaaggaagtgggagggcaggaagccctgggctacaggcagctgggagaatggaggtttcttttttttttttttgacgaagtctcactctgtcacccaggctggagtgcagtggcgcgatctcagctcactgcaacttccgccttccgggttcaagcgattctgctgcctcagcctctcgagtagctggaattacaggtgcctgccacgatgcctggccaatttttgtatttttagtagagacggggtttcactatgttggtcaggctggtcttgaactgacctcatgatctgcccgcctcggcctcccaaagtgctgggattacaggcgtgagccaccgcgtcggacttgactaccattcttaaagggggtttctttcaaaaragagcagcatacctcataatgtggttatatacatgcaatggaatattatgcagccttaaaaaagaaggaaattctgacacatactacaacatggatataccttgaggacattatgctaagtcagtcagtcacaaaaggacaactactgtatgattctastcaaaggaggtatctaatgtcaacactgtagaaacacaaagtacaatggtggttgttaagggccagaaagaggagagagaaggaattagtgtttaatgggcacagaatttcagttttgcaagaaaaataagttctagaggtcaacatattgtaccacaatgtgaacatacccaacgccactgatcagtacatttaacaatgtcatattaaatcaaacaaaatacatcatttagtttttggtagaaaaatctgttttgcccccagggtcacagtgaggggtaggacacaggaatccagaagaaatagaactgaggttgaaaaaggyggacgggagctgcatgcatttccttgttaatagcccagaatgtgccaggtgtgctttacaaatgctgctgcttttttttttttttttttkkrgrgagtctcactttgtcacccaggctggagtgcagtggagtgatctcagttcactgcaacctccacctcctgggtttaagcgattctcctgcctcagcctcctgagtagatgggattacaggcacctgccatcatgcccagctaatttttgtatttttcgtagagacagggtttcaccatgttggccaggctggtcttgaactcttgacctcaggtgatctgcctgcctcggcctctcaaagtgctgggattacaggtgtgagccaccacgccyggctaagcctktttttttcagatggagtcttactgcgtcacccaggctggagtgcagtggtgcgatctcagatcactgcaacctctgcctcctaggttcaagtgattctcctgcctcagcctcccgagcagctgggattacaggtgcacaccaccacgcctggctaatttttgtatttttagtggagacggggtttcaccatactggycaggctgggcttgaactcctgacctcaagtgatctgccctcctcagcctcccaaagtgctgggattacaggcatgaggcactgcacccagctcaaatgcttattaacatccacaacagtccagtgatgtaagctactttaggctcatttttccggtgaggaaactcagtcacggagatgtttcgttatttgttcaggacccacagcgacagagcacagatttatctcattttctgatttcccaggaacctctgtgacccccagccggttaccaacagaaccaccttccycggtagcaggtaggttctgcagggtccattctggtgcacagcgtatgaggtacacggaccccttctctctctcctctctgcctagacttctcgatttaattcagttggttctttcacagatttgctttgttttaaaaatcctttatttctgcctgtaaacagggtgggtgtcctaagtagttagatgttaagatgctgcccccaatcctactctaggtggatggtttatcacatataacatgcagaagaataatcggagtggcttgctatactgtggagtccagctggttgaatatgggtgacaaaaacaaacaaactaaccaaccaaccaaccaaccaaccaaccaacaaacctgtagagtccgggactctgtttctgagtcactgawtgcattgatcagcggttctcaaacttccatgagcataagaatcacctggaggcttaaagaatagatttctgagcccccagggcttctgcttcagtaggtctggggtgaatccagtcattttcattcctagtaagttcccaggtgatgctgatgctatggctccagaatgctgctttgagaaccactgcggtaagttttgtgtgaggcgtgttatcccctccactttcacaaacrtctcagctgaatacggtgtaccagactacggcctgcactttaagaatatcatacgctaggctggaggctgggcgtgtctaacattccctgygtctcagagtgaagcaccaaggcaggagaaacatgctggaaagagccgaggttgataaggatgagatttgcggggttgagggcagagtgagggctattatgcctagtgggcagggacatggaagatggtcacatactgtgtgcgtgcatrtgygtgtgtgcgtgcatgtgcgtgtgtgcgtgcatatgtgtgtgtgcgtgcatatgtgtgtgcatgcgtgcatatgtgtgtgtgtgcatgcgtgcatatgtgtgcgtgtgcttctgactgaatttttgaactttctcttttgaaatggttctagagtcacaggaagtctacaatgatagaacagaagaatcccatgtgctctttttccagtttcctctaatggttacatcttacgtaattagagtacaacataaaaaccaggaatttgacattggcataaagtaggtgtctagttctatgccaatttgtcacagttgtagattcgcgtcaccatcaccgcagtcactgtacagaactcttccgtctcacaagggcctcccttgggctacccttttatattcacacctacacccttctccttcccttgccatccctaactcctggtatccattaatttgttctccatctctataatcttccatttctagaatctgatgtaaatgggatcatccagtatgcaaccgtttgagatatccttttgtcactcagtgcaatgcccctgaggcccatccaagctgctgtatgtatcaatgatgtgttccttttgattgctgagcartatttcatgctatattaggccgattttgtgctgctataaatayctgagactggatcattgataagaaaagaggtttaattggttcatggttctgaaggccgtataggaagcagaaggctggcttctgcttttggggaggcctcaggaagcttacagtcatggcagaaggcaaagagggggtagctgtctcatgtggtgggagcaggagcaagagagagagagagttgggactgggggacatgccacactttgcaatagccagatcttgtgagaattcacttactattgcaaggaaagcaccaagcaatgagggatccacccctatgatccaaacacctcccaccaggcccccacctccaacattggggatcataatccagtatgagatttggtgggaacacatattcaaactgtatcacatggcatgcaaataccacacgctgtgttgaaatcaaaatcaaaacaaggtgtattaaatagggaatcctttccccattgcttgtttttgtcaggtttgttgaagatcagatggttgtagatgtgtggtcttatttctgagatctctattctgttccattggtctatgtgtctgtttttgtaccagtaccatgctgttttggttactatcaccttgtaatatagtctgaagtctgagcctgaggcctccagctttgttctttttgcttagtattgtcttggctatatgggcccttttttggttccatatgaattttatagttttttctaattgtgtgaggaatgtcaatgatagttcaatgggaatagcaatgaatctataaattactttgggcagtatggccattttcacgatattgattcatcctatccatgagcatggaatgtttttccatttgtttgtgtccgctctgattttcttgagcagtgaattgtagttctccttgaagatgtccttcactttccttgttagctgtattcctaggtattttattctctttgtagcaattgtgaatgggagttccttcatgatttggctctctgcctgtctattgttggtgtataggaatgcttgtgatttttgcacattgattttgtatcctgagactttgctgaagttgcttatcagcttaagaaacttttgggctgagatgatggggttttctagatataggatcatgtcatctgcaaacagagatagtttgatttcctctcttcctatttgagtatcctttatttctttctcttgcctgattatcctggccagaacttccaatactatgttgaatasgagtggtgaaagagggcatccttgtcttgtgctggttttcaagggaaatgcccatttagtatgaaattggctgtgggttaataaatggtgctgggagaattggctagccatatgcagaaaatagaaactggacccgttccttacaccttgtacaaaaattaactcaagatggatgaaagacttggatgcaaaacccgaaaactataaaaaccctagaagaaaatctaggtaataccattcaggacacaggcatgggcaaagatttcatgacaaaaacgtcaaaagcaattgtaacaaaagcaaaaactgacaaatgggatctaactaaactaaagagcttctgctcagcaaaagaaagtatcatcrsagtgaacagacaacctacagaatgggagaaaatgtttgcaatctatcaattcacaaaagtctaatatccagaatctacaaggaagttaaacaaatttacaagaaaaaaaaaaccattaaaaagtgggtaaaggacatgaacagtcacttctcaaaagaagacgtttatgcagccagtaaacatacaaaaaaaagctcaacatcaccaatcattagagaaatgcaaatcaaaaccacatttagacaccatctcacaccagtcaaaatggcgattattaaaaagtcaagaaacgccgggcgcggtggctcacgccggtaatcccagcactttgggaggccgaggcaggcggatcacaaggtcaggagatcgagaccatcctggctaacacggtgaaaccccgtctctattaaaaatacaaaaaattagccgggcgtggtggcgggcgcctgtagtcccagctattcgggaggctgaggcaggagaatggcgtgaacccgggaggcggaggttgcagtgagccaagattgtgccactgcactccagcctgggcgacagagcgagactccatctcaaaaaaaaaaaaaaaaaaaccaacaaaagtcaagaaacaacaagtgctggcgaggctgtggagaaataggaatgcttttacactgttgggaatgtaaattagttcattgtggaagacagtgtggtgattcctcaaagacccagaaccagaaatcctttttcctttttttttttttgagatgtagtattgctcaatagcccatgctggagtgcagtggtgcgatctcggctcactgcaacctccacctcccaggttcaagcaattatcctgtctcagcctcctaagtaactgggactacaggcgcctgccaccatgcctggcttttttttttttttttcttttagtagagatggggttttaccttgttggtcatgctggtctcaaacttctgacctcaggtgatccacctgcctcggcctcccaaagtgctgggattacaggcgtgagccaccgcaccagggccaccttttttttttttttttttttttaaacagagtctcactctgtcacccaggctggattgcaggggcatgatctcggctcactgcagcctctgcctccagggttcaagtgattctcctgcctcagcctcccgagtagctgggactgcaggtgcatgccacaacgcctggctaatttttggatttttgctagagacgggagtttcaccatgttggccagggtggtcttgagctcctgacctcaggtgatctgcccacctcggcctcccaaagtgctgggattacatgtgtgagccactgcgcctggccagaaataccatttgacccagcaatcccattactggttatatacccaaaggaatataaatcattgtattataaagatacatgcacacatatgttcattgcagcactattcacaatagcaaagacaaggaatcaacccaaatgcccatcaatgatagaaaggataaagcaaatacagtacatatacaccatggaatactatgcagccataaaaaggaatgagatcatgtcctttgcagggacatggatggagctggaaaacattatcctcagcaaactaacacaggaactgaaaaccaaacactgcatgttctcacttgtaagtggcagctgaacaatgagatcacatggacacagggaggggaacaccacacactggggcctgtagggggaattgggggagggagaggatcaggataaatagctgatgcgtgtggggcttaatacctaggtgatgggttgatgggtgcagcaaaccaccatggcacacgtttacctatgtaacaaacctgcacgtcctgcacatggattctggaactgaaattttaattgaaaaaaaaaaaggtttattaatgcatctcacacgaagagaaataacaaagaccaaataatacccacactctcattatgccaccgagagctgagcataaactagttttttccaagctggttccaccataaaaagactcccaggatagtacccactgcaacaagagcttcgtatttatcagctgaggcagttcaggaatattttggtggcctcaggaggcccctggttaagaaaatggcctggccgggcgcggtggctcacgcctgtattcccagcactttgggaggctgaggcgggtggatcacaaggtcaggagatcgagaccatcctggctaacacggtgaaaccccatctctactgaaaatacaaaaaaattagccaggcgtggtggcgggtgcctgtagtcccagctactcgggaggctgaggcaggataatggtgtgaacccgggaggcagagcttgcagtgagccgagattgcaccactgcactccagcctggacgacagagtaagactctgtctcaaaaaaaaaaaaaaaaagaaaaaaagaaaatggcctaagttggaaggtggagatcccgtgttctgaggctaacacgagctcattcttcctctaggctcacgaagacatggatccacatcttattattcaaactgagatataattcacataccataaaattcaccatgccaactaggatgactatgatttttaaaacaaaacaaacggacaagaagtattggtgaggatttggaagaaccttcttatattgctggtgggaatataaaatggtgcagctgctttgaaaaacagtctgtggccaggcgcagcctgtaatcccagcactttgagaggccaaggagggtggatcacgaggtcaggagatcgagaccatcctggccaacatggtgaaacccygcctctactaaagtacaaaaaaaaaagttggccaggcgtgatggcaggtgcctgtaatcccagctactcgggaggctgagggaggagaatcgcttgaacccaggaggtggaggttgcagtgagctgagatcgcgccactgcactccagcctgggcaacagaatgagactctgtctcaaaaaaaaaaaaaaaagaaaaaaaagaaagaagtctggtagttcttcaaaaagtaaaacacagagttactgtatgacccagtgattccaccacccctgggtgtgtacccaagagaacagaaaacttatgttcacacaaaaacctgtacgtcaatgttcacagcagcaatattcataacagcaaaacgtggaaaaaaaaccaagtgtctatcaattgctgaacggatctgcttcttactaagccggtcatggaagataagtcttacacctttcgaatttgtctgtcttcagtgtctgtgcagtgtgtcagagaaaggggtttcagggagcctagatatctcaaaaggggaatggagatatctagaggatatagggaaccacggggaagacctaacattgttttgctttcttagaattctcagaagccaccgctgaactgaccgtctcattcacaaacraagtcttcacaactggtgagtaaccaggcatttcatgctcagcagaaaggagtgtgaggacggagctctctcttccattatctaagcctgtaggctttyaaycacttcaccgaactgtccgtctcttaccaagaaagtccttggtgtgaggctagagcatgggtgcagagtggagctctggggttcagaaggaggagcrttttgggtgatggggccatttcaaagatggcggagccaaggctgtggcgggacgaccgccatccctacgcactgctcccaggatgaagtcctaggctttggactcggctgtgatccaggtatttaatctcgctcctcactgtgtccaggtagagcccatgctcggacgcacacagactgtaggcacctggacayagcacatcttctaaccgctccaggcctctgcagatacgctttcctcagtctctttccccttgcctgtcctggaaaatctccatttccttccagactaaacaccttcacagattccctgataataggttagatacttccactgggcccacatgactctggctttcatgaggcacctgatcccacgtagttctatttttattttttatttttttgaggtggagtcttgctctgtcgcccaggctggagtgcagtggtgcgatctcggctcactgtaacctctgctgcccgggttcaagcgattctcctgcctcagcctcccgagtagctgggattataggtgcatgccaccacacctggctaatttttgtattttagtagagacggggtttcagcatcttgggaaggctggtcttgaactcctgacctcatgatccacctgtctcggcctcccaaagtgctgggattggaggcatgagccaccgcgcccggcatatcccagggagttctgtgatggaagccttccctatcttcagttcggaacctcccaatcaccctcagsatgcagttccaattcctcagcttgctattctgtgagcttagatatccagcccctgttgatccctccaattttgtctgcataccttccacgcattcccatgctgttctcagccacacacagtcacttgaagctctcctggaggcttcctaacctctcctgactctgcacccaacccactcactctgccttttcttccatttccccatggcatcaattcctcaagaaagccttgaccgtccaggctggatcgatggtttcctctgctctcgctcagtgtcttgtgggctgcctattacagcaatttttacagtatattaaaattatcgctttgtctgtaatcccagcactttgggaggccaaggtgagtggatcacctgaggtcaggagaccagcctggccaacatgctgaaaccccgtctctactgaaaatacaaaaattagccgggcgtggtggtgggcacctgtaattccagctacttgggaggctgaggcaggagaatcgcttgaactcacgagttggaggttgcagtgacctgagatcacaccacagcactccagcctgggcaacagagtgagactccgtattaaaaaaaaaaaaaaatcgctttactttttggtctcctgcaatagtctgggaaccgcagatggacaatgtcttatggtttttttgttttttgttgttgtttttgagacggmgtctcactctsctcactctgtgatctgtgatttcggctcactctgcgatctcagctcactgcaatctccggctcctgagtagctgggactacaggtgtgtgccaccatgcccagctattttttgtatttttagtaaagacggggtttcaccatgttggccaggatggtctcgatctcttgacctcasgtgatccgcccaccttggcctcccaaagtgctgggattacaggcattcagccagtgtcatgcctggcctgacaatgtcttattaatatttgggttcccatggcccagcacatggctgagtacctggcgagtctcaggagatacttgaggaataagagagctggaggccgggtgcagtggctcacgcctgtaatcccagcactttgggaggcctaggcgggcggatcacaaggtcaggagttcaaaaccaacctggccaatatggtgaaatcccatctctactaaaaatacaaaacttagctgggcgtggtggcggacgcctgtagtcccagctactcgggaggctgaggcaggagaatcgcttgagcccaggaggcggaggttgaagtgagccgacatcgggccactgcactccagcctgggagacagagccagactctgtctcaaaaaaaaaaaaaaaaagctggcacgtatgaggtgctcatatgtcaagcacggtgctttatatttctaccattattattatcttgactttcacatcaacctataagggatcttgttaattttattggacacatggggaactggctcacagatgctgagtcacttgccagataactgacatctaataggtgatagagttggggttcaaatctggaggacagcctgactctacagttcttgcttttttttttttggacagggtctcgctctgtttcccaggctagagtgcagtggtacaatcctggctcactgcagcctcaacctcccagggctcaggtgatcttcctgcctcagcctccactgagtagctgggattactggcacgtgccaccacgcctggctaatttttgtatttttttgtagagatagggtttttctatgttgctcaggttggtcttgaactcctggactcaagccagcctcctrcctcagcctcccaaagtgctgggattataggcatgaggcaccrtgcccggcccatgcttttcttaaatgctgtggaattgtgcctcmccatgtgtgtgtgtgttcggagtaggcacagtgacagggggcgggaatatggtttcatttcacacttagcctttgtttggttcccagagacttctaggagtatcaccrccagtccaaaggagtcagactctccagctggtgagtaagtcatcctctccagacccccttccttctcacccgtctcttcaccaaagccaactcctttgtctacgcaggggctgcagctctcagatcttgggttccagtgtgtagagtaaaggcagaatatcagcgtatggggttcagaattgggcattaagatcaggtgggaaggttgagattttaaaaagggtcagagaaagagagattccatctctyccccascccttataactgtcctctcttttgcaatgcatcagataacgaggcagcatctgtgtctggggaggagttgtctcagagccctgtgagagcacaggagggagaggtgctacttagagaattggggtcatctggccctgacccctactcgggaagggagggaccctccaggaaagtgagcggcatcccctagctagtagagaataataggatctctgagaagcccagatgtggcttggagggggtcctggaggtgggctctttcacctgctcctgcctctcctcattcctccaggtcctgcccgccagtactacaccaagggcaacctggtccggatatgcctcggrgctgtgatcctaataatcctggcggggtttctggcagaggactggcacagccggaggaagcgcctgcggcacaggggcagggctgtgcagaggccgcttccgcccctsccgcccctcccgcwgacccggaaatcahacgggggtcaggatggaggccgacaggatgttcacagccgcgggttatgttcatgaccgctgaaccccaggcacggtcgtatccaagggagggatcatggcatgggaggcgactcaaagactggcgtgtgtggagcgtggaagcaggagggcagaggctacagctgtggaaacgaggccatgctgcctcctcctggtgttccatcagggagccgttcggccagtgtctgtctgtctgtctgcctctctgtctgagggcaccctccatttgggatggaaggaatctgtggagaccccatcctcctccctgcacactgtggatgacatggtaccctggctggaccacatactggcctctttcttcaacctctctaatatgggctccagacggatctctaaggttcccagctctcagggttgactctgttccatcctctgtgcaaaatcctccygtgcttccctttggccctctgtgctcttgtctggttttccccagaaactctcaccctcactccatctcccactgcggtctaacaaatctcctttcgtctctcagaacgggtcttgcaggcagtttgggtatgtcattcattttccttagtgtaaaactagcacgttgcccgcttcccttcacattagaaaacaagatcagcctgtgcaacatggtgaaacctcatctctaccaacaaaacaaaaaaacacaaaaattagccaggtgtggtggtgcatccctatactcccagcaactcrgggggctgaggtgggagaatggcttgagcctgggaggcagaggttgcagtgagctgagatcacaccactgcactctagctcgggtgaygaagcctgacyttgtctcaaaaaatacagggatgaatatgtcaattaccctgatttgatcatagcacgttgtatacatgtactgcaatattgctgtccaccccataaatatgtacaattmtgtatacatttttaaaatcataaaaataagataatgcaccgtctccacccctctcatatttactttctgaaggaaatgttaggtcttctcaaggtaaagttctatatttattatagcgtttaggcatttcttgaccatctaatgagtgtaaaactgtaccactgggccaagtgcagtggatcatgtctgtaatcctagcactgtgggaggccaaggcaggaggatcgcttgagcccaggagttcaagaccagcctgggcaacatagtgagaccccatctctacttaaaataaagaagataaaaattgttttaaaaaaggaaaagaatggctggccacagtggctcaygcctgtaatcccggcactktgggaggttgaggkaggtgagtcacttgggaaaagacagaaggatggcaccaagaagttccaggacgacggctgtgaatcagggctagtgagcacacagcttgggtgaagggggaaygggaaagttgcttagagaagcctccaaatgtaagaatgggtcaattcctcgtcttaacatagtggaaaatcatactgagatgctatcagaaracagaggaaaaataattttagaggtcaagtaaactaagtagattttaaaaagaccagtatagcctaggcacagtggctcacacctgtaatcccagcactttgggaggctgaggcgggatcgcttgagcctaagagttcgagaccagcctgggcaacatggtgaaaccttgtctcatatacaaaaaatataaamaattagctgggtgtggtaccacatgcctactctcaggtactcaggaggctgaggttggggatcacctgagcccggggaggttgaggctgcagtgagccatgattgcaccactgctstcaaacctgggtgacagagtgagaccctgcctcaaaagaaaataaaaataaaaaacaaatrtaaactttaggggaacaataacaacaacaaaaataaaagaagcaagttatattacccgaaaattctcrgctgcgaatatctgtgggtataaacatgtgatactggccgggcgtggtggctcatgcctgtaatcccagcacttcgggaggctgaggtgggcagatcacgaggtcaggagatcgagaccagctcagccaacatggtgaaaccctgtctctactaaaaatacaaaaattagccagtcgtggtggcacacgcctgtagtcccagctactcaggagactgaggctgcagtgagctgagattgcgccactgcactccagcctgggtgacagagtgagactctgtctcaaaaaaaaaaaatgtgatactgaatgttgatatgcagacatagagataaacattggaagagaaaaaacagtaagaacaacgctgtagaataactaaggccccgcctattatgataggaatccagtaagtctaagctcattcacatggttacatgtttttagaaacctaatattaacaagttcctaaagaaaacagctaaaagtgggtgtctcttaggcggagcaatggaggagatggttagtcagccactgcattttgtacacacccttttagtgctattggaattttttaggtaggtgctgtcaggcctctgagcccaagctaagccatcatatcccctgtgacctgcacgtacacatccatatggctggttcctgccttaactgatgacattccaccacaaaagaagtgaaaatggcctgttactgccttaactgatgacattgtcttgtgaaattccttctcctggctcatcctggctcaaaagctcccctacagagcaccttgtgacccccactctgcccgccagagaacaaccccgctttgactgtaattttcctttacctacccaaatcctataaaacggccccaccccatcccccttcgctgactctcttgtcggactcagcccacctgcacccaggtgattaaaagctttattgctcacacaaagcctgtttggtggtctcttcacatggacgcacatgaaatttggtgccgtgacttggatcgggggacctcccttgggagatcaatcccctgtcttgctctttgctctgtgaaaaagatccacctacgacctcaggtcctcagacccaccagcccaaggaacatctcaccaagtttaaattgggtaagcgacctcttcttactctcttctccaacctctctcactgtccctcaaccactttctcctttccactcttcaatctctcccttctcttaatttcaattcctttcattttctagtagagacaaaggagacacgttttatctgtggacccaaaactccggcgccggtcacggactagggaaggcagccttcccttggcgtttaatcattgcagggacgcctctctgattatatacccacgtttcagaggtgtcagatcacgcagggacgcctgccttggtccttcacccttagtggcaagtcccacttttctggggaaggggcaagttccccaacccctcctctccatgtctctaccccttctccacctttctggggggcaagaaacccccaaccccttctccttcactcttagcggcaagtcccgcttttctagaggggcaagtaccccaacctcgtatctctgcaccctgatcccttatttccatgccccaacctcttatctctgcaccctgatcccttatttccatgccccaacctcttatctctgtgccccaaccccttatatccatgccccaacccctttcccgcttttctggaaggtaagaactcccgaaccccttccctccgtgtctctactctctcttttctctaggcttgcctccttcactatgggcaaccttccaccctccattcctcctcctctctcccttggcctgtgttctcaaaaacttaaaacctcttcaactcacacctgacctaaaacctaaatgccttattttcttctgcaatgccgcttgaccccaatacaaactggacagcagttccaaatagccagaaaacagcactttcaatttttccatcctgcaagatctaaataattcttgtcgtaaaatgggcaaacggtctgaggtgcctgacgtccaggcattcttttacacatcagtcccttcctagtctctgtgcccagtgcaactcgtcccaaatcttccttctttccctcctgcctgtcccctcagtctcaaccccaagcgtcgctgagtctttctaatcttccttttctacagacccgtctgacctctccctcctccccaggctgagctaggtcccaattcttcctcagcctccgctcctccaccgtattatctttttatcacctcccctccccacacctggtccagcttacagtttcgttcagtgactagccctcttccacctgcccagcaatttactcttagaaaggtggctggagctaaaggcatagtcaaggttaatgctcctttttctttatcccaaatcagatagtgtttaggctctttttcatcaaatataaaaatccagcccaattcatggctcgttcgccagcaaccctgagaagctttacagccctagacccttaaaagtcaaaaggccgtcttattcttaatacacattttattacccaatctgctcccgacattaaataaaactccaaaaattaaattccagccctcaaaccccacaacaggatttaattaacctcaccttcaaggtgtacaataatagaaaaaagttgcaattccttgcctccactgtgagacaaaccccagccacatctccagcacacaagaacttccaaacacctgaaccacggcggccaggcgttcctccagaacctcctcccccaggagcttgctacaagtgccagaaatctgaccaccgggccaaggaatgcctgcagcccaggattcctcctaagctgtgtcccatctgtgtaggaccccactggaaatcggactgttgaactcacctggcagccactcccagagcccctggaactctggcccaaggctctctgactccttctcagcttagcggctgaagactgatgctgcccgatcgcctcggaagctctgtagaccatcacggatgccgagcttcgggtaacactcacggtggaaggtaagtccgttgccttagtcaatacggaggctacccactccacattaccttcttttcaagggcctgtttctcttgcctccataactgttgtgggtattgacggccaggcttctaaacccctgaaaactcccccactctggtgccaacttggacaacactcttttatgcactcttttttagttatcctcacctgcccagttcccttattaggccgagatattttaaccaaattatctgcttccctgactattcctggactacagccgcatctcattgccacccttctcctcaacccaaagcctccttcgcgtcttcctctcctattcccccaccttaacccacaagtatgggacatctctactccttccctggcaaccgatcacatgcccattaccatcccattaaaacctaatcacccttaccctgctcaacgccagtatcccatcccacagcacgctttaaaaggattaaagcctgttatcactcgcctgctatagcatgggcttctaaaacctataaactctccttacaattcccccattttacctgtccaaaaaccggacaagtcttacagattagttcaggatctgcgccttatcaaccaaattgttttgcctatgcaccctgtggtgcccaacccctacactcttttgtcctcaataccttcctccacaactcactattcccatgcttgatcttaaagatgcttttttcactattcccctgcacccctcgtcccagcctctcttcgctttcacttggactgaccctgacacccattaggctcagcaaattacctgggctgtactgctgcaaggtttcacagacagcccccattactgcagtcaagcccaaagttcatcctcatctgttacctatcttggcataattctcataaaaacacacgtgctctccctgctgatcgtgtctgactgatctctcaagccccagcaccttctacaaaacaacaactcctttccttcctaggcatggttagcgcggtcagaactcttacacaagagccaggaccacaccctgtagcctttctgtccaaacaacttgaccttactgttttagcctagccctcatatctgcgtgctgtggctgccgctgctttaatacttttagaggccctcaaaatcacaaactatgctcaactcactctctacagctctcataatttccaaaatctattttcttactcacacctgatgcatatactttctgctccctggctccttcagctgtactcactctttgttaagtcccacaattaccattgttcctggcccggacttcaatctggcctcccacattattccagataccacacctgacccccatgactgcatctctctgatccacctgacgttcaccccatttccccacatttccttcttccctgtttctcaccctgatcacacttagtttattgatggcggttccaccaggcctaatcgccacacaccagcaaaggcaggctatgctatggtacaagccactagccagcctcttagaacctctcatttcctttccattgtggaaatctatcctcaaagaaatcacttctcagtgttgcatcagctattctactactcctcatggattattcaggccccctcccttccctacacatcaagctcaaggatttgcccccgcccaggactggcaaattagctttactcaacatgccccgagtaagataactaaaatacctcttagtctaggtagacactttcactgggtaagtacagtcctttcctacagggtctgagaaggccaccgcagtcatttcttcccttctgtcagacataattcttcagtttagccttgtcattcccttctgtcagacaaaattcctcagttcagccttcccacctctatacagtctgctaacagaccagcctttattagtcaaatcagccaagcattttttcaggctcttagtattcagtgacagactaatggtctattaaaaacacacctcaccaagctcagccaccaacttaaaaaggactggacaatacttttaccattttcgcttccagaattcaggcctgtccttggaatgctacaagatacagcccatttaagctcctgtgtagacactcctttttattaggccccagtctcattccagacaccagaccaacttagattgtgccccaaaaaacttgtcatccctactatcttctgtctagtcatactcctawtcaccgttctcaactactcacacatgccctgctcttgtttacactgccagtttacactgtttctccaagccagcacagctggtatctcctggtactatccccataccgccactgttaactcttaaaataaataaataatctttgctggcaaggctatgctgaacctccttaggcactttctaattagatgtcctgagtcstcccaattcttagacctttaatacctgtttttctcctttccttattccctttagtttttcaattcatacaaaactgtatccaggccatcaccaatwattctaaatgacaaatgtttcttttaacaatcccacaatrtcaccccttaccacaaaatcttccttcagcttaatcgctcccactttaggttcccacgccgcccctaatcctgctcraagcagccttgagaaacatcacccattatctctccataccacccccaaaaatttttgctgtcccaacactttacccctatttcattttatttttcttattaatataagaagacaggaatgtcaggcctctgagcccaagctaagccatcatatcccctgtgacctgcacgtacacatccagatggccggttcgtgccttaactgatgacattccaccacaaaagaagcgaaaatggcctgttcctgccttaactgatgacattgtcttgtgaaattccttctcctggctcatcctggctcaaaagctcccctactgagcaccttatgaccccgactctgcccgccagagaacaacccccctttgactgtaattttcctttacctacccacatcctataaaayggccccacccctatcccccttcgctgactctcttgtcagactcagcccacctgcacccaggtgattaaaagctttattgctcacacaaagcctgtttggtggtctcttcacacggacgtgcatgaaaggtgcgtgtatatttttgtaacacaataaataataacagtatayactttttcttttagaagtatgctgttaaacagaattaagaacaggaagtctcaaaattgtttctttcaggagagaagacttattaatgggggagagttctgaaccacttgctttgcatactgccacttagttaaaaaatcgcattttaacttaaaaatatccaaaaataacacagttttataataaattattacgaatatcacaaaataataaaaatacaagtaatgcagagtggaaatgcaaagctatgagtgctagacggctaacaagtcataacaaacaacaccaaaattaaagaacaagatagttgtgacttaccttggtcaatcactttccatagtaattcaagtcattcaatccaggatctcatctctgaaaatgaaggaaaaaagcaacagaaaatagtgtagaggtctctggtgttccaagaataggcgctgcagagagatgtgggtgcctgggctgtgcccagtcactgaaatggcacacctgatgctacctgttcacttcgggctgagcaggagagagaaaagacgttcccctcagccacttcccgtcttctgatttcacttcttgcctgcctccgactgcaaatcctggtttgacgtcacttcctgtcttctgattttacttcctgtatgacctcacttyctgtcttctacaaccacttcctgtcttcttacttcacttcctgtcttctgactttacttcctgtatgacttcacttcttgtcttctaccaccacttcctgtcttccgaatttacctcctatcttgacttcacttcttgttttttttttttttttttgacagggtctcgctctgtctcctagggtggagtgcagttgtgccagcttgaaaccacctttccaaaattatgactgagacagtgaaagagatttaactgactccattttgcttctaacctccaagctgtcctttttcattcctgggcataggctgaactttgggagaaacttatagtttaaacaaagatgatagcccttttccaaagcacacctctttgttgcctggggactagattggccctgtaggacgaacattagccacgagattagaaattatgacttaggagtcatgcagctggaggctacaagattgtgaccctccctaaactgcttctaagaccagcgcttaatttgcagatgctgcacttgatgggtcagctggcaccacccagatcaataaactggcccatcttatcttttggcctccactcaggaactgagtgcaagaagatagctttggctcccacgatttcatccctgaccaaacagcactcctggctcactggcttcccacccacccaccaagttatccttaaaaactcttcctgaatgctgggagacactgatttgaataataataaaactctggtctctcgtagagccagctctgcatgaattattctctattgcgattccctgtcttgacgaatcagctctgtctaggcagtgggcaaggtgaacacattggactattacaatcttggctcactgcaacctccaccgcctgggttcaagtgattctcctgcctcagactcccaagtagctgagatcacagacgtgcactaccatgctcagctacattttttttttctgtcccccgggctggagtgcaatggtgcgatctcggctcattgcaacctccgccttccgggtttaagcgattctcctgcctcagcctccagagtagctgggattacaggcatgcaccaccaagcctggctacttttggtatttttagtagagacagggtttcaccatgttggccaggctggtctcaaactcctgacctcatgtgatccacctgcctctgcctcccaaagtgctgggattacaggtgcgatccaccatgcccagcccattccgtcttctgacttgacttcctgcctgacttcacttcctgaaggatgtggttaccatggaagttgttttggggcacaggatgtggtctgggattggggattgtgaaaagcaagaccctcaccggggtctttcttccagagctgcagctgagccacaggatcttgaacaggagagagttcttcctattcttgtggaagagctgaggattgagaaaagcgcggcttagctcatgggagtgaccttagctttgagaagcctgaaaatgaggcttggaggtagagagtggtgtgtgtgtgtgcgcgttgggggagggggtcaggctctcatgacttctggctcttttttttgctccaggaacatttcccaagcccaccatctgggctaacccagccctcgtggttcctgggtgcaaacatggccgtggaattgtggaatggttttttttgtatccttagcagagaacccagtgaatactttgttcttgatcatcaatgtgatgagatccagagcaagcaagtgctaatgctgctgtgagcctgaggccacattttcagaattcagtgatgggcggaggcgagtggtcacaggtatagggagagcagtacttgttcatctctgaacgtatagattcagacacacatgaacccatgtgccacaggtttccctgtttaggacttgtaggtcatgggggtgggcatctgagagtgtggctacatgaaatacacacgttggagaaagatggttaattgtgagtgcgagtttacatttcatgggcccctggggtgtcgatagttcctcaatggatgtagatccgttactcaatttcttctctaaagatggggctagattacaatggttctcaacctaagaaaactttgcatttcaggaaatattttctactgcccagagacatttttgatcactgttaactgtgaggatgtgagctggtatctagggggtagaggctagggatggtgccgaacaccctggaaatgtacaggacgtttcccaacgagtagtgatccgatcccaaatgtcaatagtgtggagaaggagaaacctttagtttcttcacgcaatgtcctttttaaactttgtgcctctctttttaccaaccttcccccttcttcccgctgaaactgagaataaagatgctctggaggccgggcacggtagcttatgtctgtaatcccagcactttgggagaccgaggcaggcagatcgcttgaggttaggggttcgagaccagcctggccagcgcggtgaaaccctgtctctactaaaaatgcaaaaattatccgggagcctgaggcagaattgcttgaacttgggaggcagaggctgcagtaagccgaggtcacaccactgcactccaaaccgggcaatggagcgagactgtcaaaaaaaaaaaaaatgctcagggaatgacccatgccgcattgaacaaggacaccttgaaccaggaaacctcagaagcccacactgtatgcagtggaactggaaagtgatggagtggtttaaaggtagtatcagagaacttggatctagtcggtgggaataaaccaatagcccctgatgaagaaatgaaagtaggaagagagattaacttttttagttttaaatttaaatattaaaactacttttgaccaggtgtggtggctcatgcctataatcccagcatttggggaggccaaggtgggcagatcacctgagctcaggagttcaagaccagtctggacaacgtggcaaaaccctatctctaccaaaaatgcaaaaattacctgggtgcagtggtgcacacctgtggtcccagctacatgggaggctgagatgggagaactgcttaaactggggaggtggaggctgcagtgasccgagatcgtgccattgcattccagcctgggtgaaagagcaagattctgccaccaaaaaaaaaaaaaaaaaaaaaaaaaaaaaagaaaaaaatgttgccaggtgcggtgacttatacctgtaatcccagcactttgggagaccaaggctggtggatcacctgaggtcgggagttcgagaccagcctgaccaacatggaaaaaccccgtctctgctaaaaattcaaaattagccaggcttggtggcacatgcctataatcccagctactcagtaggtcgaggcaagagaatcgcttgaacccggggaggcggaggttgcagtgagccaaaatcgtgccattgcactccagcctgggcaacaagaagaaactgtctcaaaacaaacaaaaaaaaacatgattagtgtttaataaaaatttgtactgttctttttcccccttaccgtccatttgtttgctcatccagtaaacacagacagcaacaaagtctccccatgagaagcaactttgccaactagtgttgtctttatagtacagttcgttttgtttgtggttttacagcgtagagcttgcactgctgctttgttgaatttggaattctgtatcacaaggaaataatggagactctatagtgaaaaactatgcataccatgagattttgtttttttttggagaaggagtcactctgttgcccaagctggaatgcagtagtgcagtcttcagcacagtgcaacatccacctcctgggtttaagcaattctcctgcctcagcctcccaagtagctgggattacaggcatgtgccaccatgcctggctaattttttatatttttagtagagacggggtttcaccacgttggccaggttggtctccaactcctgacttcgtgatccacccacctcagcctcccgaagtgctgggattacaggtgtgagccaccgtgcctggccgagattctattttaagttagaatttttaaaaagcaaaatcagagcaatgacatggtcatatatgagctacaccgaagcacctaaaatattgtagattggtaggagaaatcctctggcaagtaatactcagcaggcagtgatccacgcaggtcaacaagtaacaagacaggctaggcacagtggttcacacctgtaatcctagcactttgggaggctgaggcaggaatattacttgcgcctgggagtttgagatcagcctgggcaacatagtgagaccctgtcttcaaaaaaatcccacaaaaattggcctggtttggtggtgtgcacctgtagtcccagctactgaggaggctgaggctggaggatcgcttgaacctgggagcttgaggctgcagtgagctatcatcatgctgctgtattccagcctgggcaacagagcaacactcatgcttgaggaaaaagaaaaagaaaaaaaaaaaagccgggtacagtggctcatgcctgtaatcccagcactctgggaggctgaggtgggtggatcacttgaggtcaggagtttgagaccagactggccaacatggtgaaacctcatctctattaaaaatacaaaaaaatttagccgggtgtggtgggggatgcttgtaatcccagctactcaggaggctgagacaggagaatcgcttgaacctgccaggttgtagtaagctgagatcgtgccagtgtactccagcgtgggcaacagagtgaaactcagtctaaaaaaaaaaaaaaaaaaaagaaaagaaaaaagaaaggaaataccaaggcaaggcaaagattgacaaggcaatagaaatcaatgcaattaaacactgtcacttcccccaccccccaggttctacccagtaagatatcttttctctaacttgtcaaagcccattattaagtaacagcttcatttgtgaatgctctcacctttatttctctcaatatacccgtgatacagatatttcatatgtaacaaagataaggatgtgtgcaggtataaaacagaggcagaatcatggctaaaacatctagcccagcaatgaactcattatccctgaggggtaggggccggggaggagaggagtcacaggcagttcaccaacacctggaaaatcgatgacttcatggagaatgaatgactcggggggattcagatcatgaagtcatgagaagaaggcctttctgcccagggatgatgtttctcagtatcaataatcagttgtgggtttttttcttctatttcttccagcagcttattgagttcatcattaaagtcatcgattttcaacctggggtacaatgggggaagaaaaggttactttgtgcatcaaggagatttgtttcaaattcccaagtacctgaaagtctgttaaggaggcacagggcatgggtcacctttcctgattattctaggtggcaaaggagtgttccacattgattttttttttttttttttaaaagacagtctcaggtggggcgtgatggctcatgcctgtaattcccagcactttaggaggctgaggcgggtggatcacgaggtcaggagatcaagaccatcctggctaacacggtgaaaccctgtctctactaaaaaaatacaaaaaattagccgggcgtggtggcggacgcctgtagtcccagctactcaggaggctgaggcaggagaatggtgtgaacccgggaggcggagcttgcagtgagccgagatcgtgccactgtactccagcctgggcgatctcaaaaaaaaaaaaaaaaaaaaaaaaaaaaaa

SEQ ID NO: 5650 - DNA, 63693 bp, Homo sapiens
tgtctctctgtgcaccactacagcaaatgggacctgggccacttcacttttacaattccagtttacagacctgcattgccccaaccccgttagaccaaagactccctgagggcaaagatggcctcttatttactcttgattccctagcacccagcacagcactaagcattgtacccactgaaagaacatctgaaggatgagcgtttatagcaaaagtggtttccactgacgttcccttctctcttccccaactttggattgaggagcccaggagctggtcaggtggcaagataagatgagaacggagaagtcattacttggggcctctgttttgctggtgttttgctggtgtgtggagatggtgggtttcccttgaatacctgggaggcaggagcaggcatgaactactccagcctctgggttctggatccacatggggtgctgctgctctctggcacccatcagtccttaaccatctggtctccagccagggaaggagcgtggtggtggagaagcctctctgtcccacccactcatcccaggagctcacgagaatcagccaaagtccgagttctgcaccctgagttaggaactctataactttagactttccctgagctttgggagttctcttaactagtgtgaaagcagttacatcatcctgggtcctcctaaaatagacacatgtatccaaatataggcacatgtattgcaaacataacatgtatgtatatatgtaaatatatacatataatttttgttttgaattaagtataaacacaacaagttacaaatatagtactgagaggtccttgtatggccccgcctccctcaggcagtatcttacataactatagttcatgattacaactggaaagttgccattggcaccacatcagaaactagtctgcagaccttgctcagatttcaccaggttttttgtgcactcatttgctttcctgaaaatattttaatgtttttctacatgacttatctccccgacatactgtgagataaggtttttttttctccgaataagcttagagaacaatgaatgtgagaggtgggaaggatgatttggtgcatctctgttttatccatggtgagtctggacctcagagcagaaggaccctcgtctctcctctggggagtcctggtgccaactcagtgcaggctgctaagttatccgggtctgactgtcttcttctctgctaaaatttgtcttaagcatgtaacacagccatgcttattaatgatgaggagacagccaatgaaaattaattttttcaaagatgaatagatatctagattttttcaagcacaactcrtttaagaaaatatcacctcactgagccccaaatgagttaggtctcacttagaaagtgtcccctagtgccaggtaaagtgcctcatatttgcaatcccagcacttctggagacggagataggaggatctcatgagcccaggagttcaagaccagcctgggtaacatggcaaaaccctgtctctacagaaaatacaaaaaaaaaaaaaatagctgggcgtggtggcgtgcacctgtggtcccagctactctggagtctgaggtgggagaatcgcttgaatccaggaggttaaggctacagtgagctgtgtttgcaccaccgcactccagcctgggtgacagagccagcctctgtttccaaaaaaaaaaaagaaagaaaggaaaagaaaatgcccccgagttgattacattttaaccactgtgctaacttgagagatagtctgctatctctttacaggacatgagggctgataatcacctcattgcatggtcctggggactgatgaacaaaggctaacatgtggaaaagggcaactaaagaaagaagagccacctccaggttaattagtacaagtctcctcgctggtatgccctaatacactaaaacagcagtaaaaacaatctgcacattggcatcgaaggcacagataaacttgccgaggacccttaccacggcagagggatgctttatatgagtccttagtagattaattaagttcttgctagttccatttggaaatgatgctgtcctcttggggctatgcagagaagttcatgttgatgaaatgagctgtcctagaatggcagttcccgggcagcagagcctgggctcaaggaaggttgaaagaaggggtggcgtggagctgccaggtgcaaatgtcaggccagcaatgcagtccagcttgcatggacgtgcttcgcctaggaagttgtgacttggctgcattttccacttcaggtgagatggaaggttgaactctacctcacctcctggtgaggttgatgtttcctggtgtttataactttctttgtaaatacttgaaaggaatttaccattttaatgctggaagagacgtctattccttcttaagaggacctgagtggatcttgattgcaggccttatgctgggcagagctaaggagaattcaatttgtctccaatcttatttgaatgttctttttttttttttttttttttttttttttgagacagagtcttgctctctcacccaggctggagtgcaatggcacgatctcggctcactgcaacctctgcctgctgggttcaagcaattctcccacctcagcctccccagtatctgggacgacaggagcatgccaccatgccctgctaatttttggtatttttagtagagatggggtttcaccatgctggccaggctggtctcaaactcctgacctcgtgatccacctgccttggcctcccaaagtactgggattacaggcatgagccaccgcgcccagcctatttgaacgttcctatgcctgctacaagtgcagcagcagaatctccacacatcttgcgtgcgaaagtttcctgtagttcctttagcatagagaggctggggaaggttagagactgacttgtactctttagacatatagttgatcattgaacaacacacgtctgaactgttacacacagatttttttcaataaatgtgttagaaaatgttttggagttttgcaacaatttgaaaaaactcaaagacaaaccatccagctagaaatatcaacaaaaatagaaaaagttaagtatgtcatgaatgcataaaatatatgtagatacctagtctattttattctttactaccataaaatataacaaaactattgcaaaagttaaaatttagtaaaaattgtgtacacactcacagatcgtatatggtgctattctcagttgagagaagtgtatacaaacatcaagatgcagtattaaattgtaactgcataaatttaaccgtagtgcataccacactatggtaataatttcatatcctcctcctgttgctgttgcaatgagcaaaggtgttgcgagtatccacttaaaacgttctgtgatactcaacattccatcatgagcagttcatccccagtgaattgcgcatcacagtaaaaagtgctctctccctgttcgcatgtatttttcgtcctgtttcgtgctgtactgtaaaccttgaataacaccatgggatccaatatgaagtggcactagtgatgctggaagtgctcccaagaagcagagaaaagtcatgacatttgacattacaagaaaaactggatttgcttgatatgtaacagagactgaggtctgtagctggggttgcttccatttcagacagatgattcatcttgtaaacaggtggtgtaaacttactgtatggaaaaatacataacagtaccacagatgtattttctccttacgaacatttccttttctctagcttactttattgtaagaatacagtatatcatacatataacatacaaaatacatgttattaamtgttgctggtcaacagcaggctgttagtagttaagtttttgagagtcagagttatacctggattttctactgtgtatggtcagtgtgccaacccctgaaattgatcaagggtcaactgtaatcctaaaagaatctaatacaatattgtaaacagtaagtggtcaataaataaggaattgaactaataagaatacataaatcccagaatatgtgcaacctgatcatagtacacagagatctctctatatatctcttttcttagttcatgctgttctttcaggtagaaagcgccttattttgaattagttgtctttagagcaaaaatccctccaagagtgctgtgtggtttcctatgcacaacctggaatagtccattgcttcatgcctaccctggacatgaagggccatgccgcagcggaagtctctatgcacccacccccgtctatacctgagcaacacattcctctttgctgctctcttacaggctacagagtgcggtggcgccagcacagagctctgctcaacgtccctctgtgctttcacgatgctgatggattatgaaggtagggaagaatgtacagccaggaggccattaggagggcaactaatttataaaatcacatttgtagaatttaatgcatccaacaactaccaggggaaaggtgggcaaaagctataccaacaccacccaagtcaaaaccaaaacaacaggaaaagaaaattatgtggatgtagaatttctgataacatcattcccaaggtgccttatccaagaggaactgctacaataatattttaagtggaaataaatacatgctggaagcattatatattagtagagtatttttttttcccagagtactttctcaagcacatcaacatgagccccctaagagacatttcacattaaaaataaaatgtctgcccactgctggtttctcaatctgcctccaccttctgtcccctttaatgaactgggccatgaggtgagtcagagaggataaagggagtggtaagaatttgaggagagaagagagtgaggctaaaataggaaatcaggaaaagcgattcggtccccctgtccctcacatggggccaccctcttgttgcccagtgtggcttcttcttgagggttctgcatggttcctcaatcccagggaattccgcaggacattccacccaagaccattgggctcccacctctactcttttgccagttaatgaataggcaggaatttcactgcctggaaagaggaacaatgctttctggtccttatttcacatctaaaatagagaggtcaattgatttattcctaaatatctttgaacactaaaatagaagttttacagcatatatactacctggttgctctagacttaagccagggaaaagtacagattcaacatttaaaattgagatagacgctttccacttaatgctaccagtcttgctttatttcatgagaatgagaatataataatatggcatacgttcatttgggggaaagattgatgtcttataacataatttataattacagaaaacatgtgagttcactgggaataaataaattttgaagataataagatactttcacttatgtcgtaatttctatgtcatttggtgtaggatgtagagatattaacgtttacacctaacttaagtttgtcatctaagacctgaaggggttttgtctatcagctgcacccctgggtagagacacaaccttggggaaggcctcagccccatccctcgtacagcaggaatgagaacagccctgcctgttgggaagcttgagggaggctatggacgtgcagcgcttggcagarggtctcgtcatggaaggttccagcaaatgtgagatacttttatgatttcattttctccaaaagaaagggaataagagaagaggggaggaaataagactaattgcgagagataaagtacaagggtgagggaaggaataaggagacatgacggcagcgtggagcagccgaggggggagattgctttcaccacttcccagcatctattgcagattccaccctcaaacatgttgtaaggactctttattcaaggtaatgtttgaaccctgctgagccagtggcatgggtctctgagagaatcattaacttaatttgactatctggtytgtggatgcgtttactctcatgtaagtcaacaayatcctgggattgggacmcactttctgggcactgctggccagtcccaaaatggaacataaggaagtggttcttctacttcttttatttctgaaatcaggtaagacatagtttttttaaattataakaattattttttctcccacaatgtagtaaaaatacatatgccatggctttatgtgcaattcatttaatttttgattcatgaaacttccagttgaaaatcttgtataagattgaggaattcttcaagaaataagtttaagtttcctgtgaagattgtcagggtgctggaatgaatgggcagagaaaataatgggtgatttttcaaatctaaatgagtgcacccacataatggccagtctaattgaaaaagagccaatgtagctaattatgcaaaggacggctaagctctttgcctggttctcagtttgactaatttatatcatctctgttacggtgtcatgctcccctcacttgcaagttaaaacagtgaaatatctctttgaatatattccgttctctcaccagttcatggtggcggcagggtcggggactcagcatttctccctttgttatggcctgaggaaggctttccatcagtatacgtttgcctcttatccccggaaaaatcacacgcatccatttgccagatgctgtgtgcagatagtgatcaacaaatactcagttgcttgggttaggtccctacatttttacacatacatacatacctgtgtgtgaatgtgagtgtgagtgtgtatcctttacaaatactagcttatttagctcgtggtataggtagggtagcatattcatcctcattttataaacaaagaaatcagacttaggaatatcatgttatttgctcagtgaccaaattctcagatctgggaaataaagaaaactggatttaagccaggtttcccagaaggaatctagggctcttctcacttttcagctttgtttaagcctttgaaagaatattctaaacatgtcctagtacttctttttctttaaaaaaaaaaaagctttattgagatataattaacatatagaattcacccatttaggcatacaatccaatggatttcaagatattgagagttgtgcagccaccatcagaataaattttaaaactattcatacccccaaaaacgcactccactctccttagctgttacccccaatctgcagcttctggcaaccactaatctactttctgtatttatatctttgccattttgaacatttcatacaaacggaatcatacgatttgctagtagttcttcatgtaaataatgtacgcttgaaattcaatctataaattaccagataaaattttacaagttgcactttagagtcaaatacatttgaatttagtggaagccattcaaggagctatcaaagaaaatacagagcaggagaaaattaaagaaatttttgtaagaaattggtgtatgttggggggtatgaatattatatttcaatgcatggaaactaggacatagatcactatgaacttattcagtgggctacacccaaaggctagatcaaacttctctgccacaggattaacatatgttttaacccacctggtgggcacattctctcataagctcttttggaaagccaggttttctgtggatgtatcatctttccagtgtgctgcaatgcccggggagagggaaaagtttcttttacagccatgcttagtgggaagtggagaaacatcttccatttcacaaattaagtcttttacacatgcaaatatgcatacacattcacacaccacagtgaggaagaaattctcacaccattaataaaatacatttgcatcagtagcaatatacatctgcattttgcctataatataaatgtatttttccactaaaagatttgtttgatgtttccttgccagcaaataagccctatcaaatcctattgccatatgagtcctagaggtgaataagagaagaaaaaatgggggaaaattatttcaaactgaaaagagaamagtttgattctgttttgggatatttcctagggacatgagctggggaggggatctcagcagcgatgygctatgaagcatagtaacataacacagagaacttaattgaagggggaaataaayggaagttttctttttttgaatatcagttgtagcctgctctgctatacttcaaaaaaactcttcagaaagtttaactgaactcactgtaggacacactttgtggatttattgtgtgttttgaagtcacactgtgagctatatagaattaaccaaaacacaactcttcttgaaaatgagagttcaagttggcagaaagtgcggggtaaagacayggatatgggcctaaagcatctatttctttgtgatcttttgatatatctctcaagtgctttttagtggattagctttagaatgcatcagccaactcctgctcaataatccatttttccagcccrgaatgtcttaaattgaggaaggacaaagtcccagaggtggggagcagggggactttggccgaggactttgcatgaatcgatgagcatgcatccacctccctgtcctgccccttgtgctctgtgtaccctcaggaggtcaggacaggcctttctgagaatgaraatctgttcatttgctttcctactggatayttgtcatcagcatacaaaccaatgcgctctgcagtgtgtcatctttcagaacctcccctgacckcatgttccctggagggctcgctgtcttcagagccaggcttgtctccygctgcmgcctccactgytctcctagtcactctgtaacccacyccctctgcctgcggcccccaccacgcccctcaaagtggtcaaggttgtcctgttgtctaattccatggagcttgcctgtcttcattttattagcctcttttggcctctyacccttgtgmaaatcactagcattctgtgccaaggacggagctggcatctccaggcttggaatagagctaccaaagctcagccagatgtctggaagagcctcaggacaagggracaccctgtagccttgtggtgggagcacagctgaggcccccttggccaccctctgccacgaccaggcagaaagcagctttcggacagattcgttgtctcagatttgatctcaaagaaaaaccaagaccagtatttgtcccaggtyctgcttttttacaatttcctcyraaatccagatacctrtcaacaccttggaaaaactgayttctccccarttagtagkgttgtgtgactktcataagcccagtacaaaaatggccttctttgttggggagcttcttaccctccagtgttttgcccaatttttgtccaagktggcarcataatttagttcagttcttgtttatttccaccatcatctatgcaccaaaatttatgttyctcaaggagggaccattcagaggatgcttcccaccggttcaagtgacagtgccagaaccaaagcgcatattgtaggaaatcaaacaatggcctccaagttccatttctacccagggatgaacaaatcaacatcaatcttggtaacacaactgccactgatggtgccttactcttctctcatgacatggmacaatcaatagcaaacataaaatttgttcttgtttaaggatttatatccactaatatggtaacatagtagtggttccatagttctaacctgtttrtcaatccagttaatcttttactatcttgcaatctgytaatgaaactgtttttctttgttttataatttcaacttttagagtcaggggtacatgtgcaggtgtgttacataactaaattgcgtgacactgagctttggggtacaaatgatcccatcacccaggtagtgagctaaatacctactaaataggtagtttttcagcccttgccttgctccctctctcccttctctggtagtccccagtgtctttagttgccatctttatttatgtccaaatgcccgactgtgtgttcttaactaaacattttgattcatagctacccattctacttccagtaaacagmaagttttatttggttaatgctaaccaaatagattaaaaggaagtcatgacaattagacatygrcattgatttactgaccatttattccacttggatctcccacctctaggtcaaggagagcctctggatgactatgtraatrcccaggggscttcactgttcagtgtcactragaagcagctgggagcaggaagyakagaagaatgtgcagcaaaatgtgaggaggacgaagaattcacctgcaggtatttccattgtcgttgcacctacgcaggaatctgtaattcagatggcaagtaatttactcacaaatttattaatgatttaagaggaaagagaaatttatggagccagagtttggaactatatttgctcacagtatgtgaagccatactaacagcttcttgttaaggtttattggagtctttgttagaaaaataccctcaaaggaagttatttgtttttacaccggacacaaacattagcagttattgttctgagctccagttttcaacatcatcatcagtaaatgtttgttgaggatcaggtgaatgaaagtgtcctagatagatctgagcaatgacttatagctacaagatccagtgcctgccctttagtatttaaggtgtagtcaaagaaactggatataatgttaaaaaaaaaaaaaagacagcccaagtgaggtacaggcataatcaatgcatgctctacccagatccagaagaaagaacagtgcctaaggttgaggcagctagagaaggctcagggaggaggtgggaactgagctgggtttggagttgagagagctcttgacaagcaccaggaaggcaggggaagatgyggccctgcacyttctgagggggaccattaagagatgaagttgactaaagcagagactttgtgtaggtgacgggcytgggaaggtagctatggaakccagactgagcacccatagcaggaccacgggatggagatgggaggggtcaggggccagggyrgggtggaatgtggarcagaggttcaggggaactgatcagagttgggaggtcatggagayggactatcttggcgaatgggttcaaagcaaccagagttgcttctttcyaacccaaaaacaaaaattaagaagatgagtgaagaagaagtaaagcagttgaaacaggaagaaagggaaaattatgagggagggaaggtaagggcagataagatttgctgccacgttggtgtattttgttcagtacttcatcgatgccatgcccaaataactgaaagaggcagcaattctgarctctctggtccctcaagatattcaatgatctttagcatgtctcacttattaataaacatttgttttctttaaataaagaaaaatacttattggatttcctgcttcgttctgcagggcattccaatatcacagtaaagagcaacartgtgtgataatggctgaaaacargaagtcctccataatcattaggatgagagatgyagttttatttgaaaagaaaggtgagtacattttcttcctcctcctcctactgtcctccccatcctcccrctcttcctctttctctattctatctttaatttataagaccagaggaggaaggyactaycrtgttataaaactgaattctgagttaggacaggatttgattactaactaaccatgtcagcttgagtgtattacttcacctcttagatttaattttttttgttcaaaagatgaaaggattagatttacaaaatcacttctacctctatgaccctgaaaataagatttttaaaatattattttatatttaacaaggagatgggaagtctaagcattccttttggtcttggcttcttattctgcagggtgaccatggtccttgggccctaacatctggatgaagccttgtaaaacagaaatactgaggtgttttaatcctcagaaacatttagattgggacacaaatcttatttttactcttaaatttttcacattttgggggacatggtctatatttttctcagatttctgaaatgttgtcttttaaaaatgtgtaaaagttacagttccttttctatagtttattttaaaatgtgggtcaatagtcccactgcttagaataagaggcagacaggatttcaatagaaattgcatgcctttttagatgtgcaaatgtttcattaagcatttcccatcaagtatatcccatcaagtatgctcccattaagcatatcccatcaagtataaatatttgaagggatgcatgacactttaaaaactgtttcctctactgtgttggtagccaggtattaagactgttaatagtaacaatttagctctccaaacattctgcatcccaggtgttaaagaggactggaaacaccttagttcttgtattcttgaggatgatttgccatattgtgtctagtattacggcaaaactctaagtagcattttaaatagtatttatttgggttggaattatttctatgcattgactcatcttcctgggtttcattagctgtaygcattgtacttccttccttaccactatttatctcgaattcttgagattaaagtgcagattaaatctaaactttatctggtgaagttattagttcttacaagtagcaagcaaacggtaaactaaataggatcacctaattgtaccagatttwaaaaaaaaaaaaccctgattctcctgattctctctacaaaatgctaacatttaaatatgtcatttgtaaattgttaaccagaaggaacatgggaatgactgtaggttgagtttgaagtctgaagtttgaaggcttagtttgcttgttttcaaagtgacagaagggagcaaaaggttatataaactctgatgggtacatacaaaaaaaaaagaagtgaaaagtcaaaagtcagtcattttttggtccttgtttctttgctgtgggatattgacctgctactaacttacctgccagggttttgccaggaacagtcagtgttagatcacatttacttctgccacttgccaccagccacactgccttcaccaagtccaagaccctatcaccactggttggggctacttgtagctgtacacatgatctctaagaaatgtaacttccctgtttaaagcccttcctagtgcccttaaaataagacccaaagacttcccaaatgtgctagggcccagcattatttaagtaacccccagctgctgtttgcttggcttgctaaacttttctacactggccttacttctgttccttcaccaccccaagcacacaccctcctgcctgggaccctcttcacctttgtcctgctgtgccagctccttcttatctcctaggtgtcagctcaatcatcatgtcctttgcaaatcttccttgacccctagacctccctttcacaaagtaccttgagtttacacttttgatgagtgtcttatgtctactgtaatactatgtcccaatgaagatgtacttgcaatcataatasgcagtattgggttaaaagcattagtttgctgyaggtaygttaggagcactttccccatgtgattgatcaattaattaaaaaatggctaaagtgggtaaccttaaatgatggtgyaaatataccttaaacrttttatattttcattgaaaacacaagtgtacttgacaccttttgacgtagagcagaggcttttcttcttcgaatatggggtcaccagtagaaggtctctggtgtatttcctgcataaactatgctccagtgcaacatctacaataattactttccttatttttgaagtggaccatatctcgacatttattaatcaatctgmatgtgtaaaacctttagatttttatgaattcctcctcaagctttatagtcaactatatgagtggattgccctctgtggatytgatagcaattttttaaatgattcaygtttcaacttgttaaaaacatttaatttagttaaaaaccaaacaaaaaagagctttgttycttttcacattcatttctcagtttagatcatctttaattaaatataaatgtaagaaagttggaaaatgcaaagaaaygactcgttgtaagcacataactcacgtggggggaacagacatgggtgggcacactagcaaacacctgccagctgcatgtggacccaggtgggcacsrgactgttttaaacacaggagagggcccrttgtctaactggtgagttggttgagtggaagctggttgagaacttttactgcaaaccatttacagtagaccacaattttatagccctgtttggcactttttcatatcactgggagcctgaagaaatagaagtgggttggatctctttcagcctctgaaaagcctgccattcccccatctaaaaagccctttccccattctctcactctgtctcatcatgtatgtaatatgtatcatcattaagtgatctcattttataytgtttccttgaatatttcctgtaacccccctgcctgattccaytagaatgtaagctccatgacggccaagcctctggctgcactgtgccccrtgtgtccccagcatcctggtggggctcgatacacagagagctcataagtagcatttgaatacatgaatcaaagaatggctcagtttactgcagcctttttgcagatgcaaaagatgatcttttagaaagcagaaacagggggtctggtgcatgagatctttttctcaacgtgactatgctgtgcagaccttcatgtggtgtcttgtgaaagactttgaccactgtgtggacttcccttcagtgtatctytcagagtgcaagactgggaatggaaagaaytacagagggacgatgtccaaaacaaaaaatggcatcacctgtcaaaaatggagttccacttctccccrcaracctaggtaagacattycctttcatctttgtgttcatctactgtaaagttgtccctctgtgtctgtgagggattggttccaggacccctgtggctaccaaaatccatgcttctcaagtcccttatataaaatggtgcagtatttgcatataacctacataccttctcttgtataatccctaatataatgtaaatgctatktaatcrttgttatactgtattgtttttatttgtattatgttttattgtcatattgttattttctgtcatctttttcaagtcttttccatccacagttggttgaatttgtkgatctggaacccatggatacagagggccaactgtatttaggataatttcatcacttttaattcaaaccacaatatgtraataagcagatagaaagaatctttttgatgtcgatgttcaactatttttgkcaccatagtagaacatggttgctttctattttttcttggatatggaggtttcttgaagacytagaacayagaagaatgcctagtttaaaaaaaatcaatgaaactatgagttttaggccaaatctgagaaaagatcaaagatgactaygtttgggactgaagtaagcatatcargttagaactctcatcacatgttcgactcaaattgtggagcaaaagagtaaataagatataaaaatgaaaatgaagatacgtgaaattcaaatgttrcaacttgcctattatttattttagtgcatttttttgtacttttcccagtttggtgttaggtggcattaagttctcagtaatgacrcttatcaaataggaacttagtgcttgttactcacytttatccattcccccaacactcaacaaattgcctttgctatatccctatgagatgagcagatcaaatattccccgtgasttaatgaaaactgattcaaccaaatggcaaagtcagagactatcgggggccatggagacactctgggccatttttatgaggtagtctaggctcatctttatgagggaactgaggtctcrgggggtgggggttatcccaaataggttcacagaagaaccagaaataaaacctgcctttctagactgtaagtcttgtgattttcatctaaayggttgtctctatacagcaactcatctctagaactgaaaataagcttaaatccctcctccatccccaataattcaagctgcatttcagagaaaaccaggactttggaatcagacagatcaactttgaattcttgatctgcttcttcatagctatttacacttaggcaagttttgttttgttttgttttacgttgccactcagttttctcatctgtaaaatagggrtaataacaccttcctcaaatggttttattaggactaaaagagagaatgtgtggaaagatgttagtggaattcctggcagatagttcacatgracaaaatggtattaactacaaaaatttttacagagaaaacggtaactgacaaaagcasgtgtttggaatgaattaagaccatggcagccttttgaggcctttatatttctcctgactgtgcaataaaaatattttggctctctaagacttggctgtcacagtagcaatggtaatattagctactgtgccagaagcagcctatcaatagagaaattgaaaatctgaccacacaaatgctgcagcacccagctgaaatgcatttggatgacaatctcagatgggaatcragagcatctccttctgccttgctaatagcaagctgatttttagaatatagtctaagtgcttcttttccatcctccccagattctcacctgctacacacccctcagagggactggaggagaactactgmaggaatccagacaacgatccgcaggggccctggtgctatactactgatccagaasagagatatgactactgcgacattcttgagtgtgaaggtcaggagtggttctagaaaatgttttcatttctgcycttcacctgtaaaataatttgttgtaaagccccttcccacagggatgttattaataattgagtaacgtattcacctctcggaaagaagcaaaaccccagaattaacctgawttttttttttttctgagacagagttttgctctcgttgcccaggctagagtgcaaccgtgcaatctcggctcaccacaacctccgcctcygggttcaagagattctgctacctcagcctcccaagtagctgggattacaggcatgtgccaccatgcctggctaattttatatttttagtagagacagggtttctccacgtaggtcaggctggtcttgaactctcgacctcaggtgatccgcctgcctcagcctctcaaagtgctgggattacaggcatgagccaccatgcccagcagacctgaattatttttattaaaatgttacatcaacatgtacaaatataaaactacatctaaactctaagtacaaacttcttatgcttacaactcttacacagtgttaaccccaagacaggtttgcaattaaatagttaaaataaaacaacaaaatcaataaaaatcaaataaacaatatatatttaatgtggtagactttgctgttttgctgaagctaagcaaggaaccagtttttaaatcagcaatccattatttgaatggactgagcaatttaatagtgcacctcaaaggtcaatgctaaaaaattttaaaaaaatcctactgaaaaaactgtcatcgtttcacatttctggctacattagtgcaaaagggaataaataaaggtgagatttgtgtgacagtgtggatatggtactgtgtgacaactcagttctcccatcacttccacctgttcgaatcacggggatcctttatttgtacaccatgttataggtatttgcccttaagcaycaccaatgcatcactgttatattaagtctgcccgttttccttagtactccataaaatttaagtcacatattactctgcctcaccatgttayttcaataattctgaatcaaagtttaagtttgtgaataattttgcaaaaaagagccaatcatgcttctcaacaacataaaaagagaagcgctgtcacttcaggtgaatattgttctccctgaggccatgagcataaacaaaaactccagactaaaaccctgagacggtgccaggtcattcagcagtcagcggaatgatcagaataatttcatacaaagttttaaagatcattattgaaatgaagatgccaaatattgaaaactcctaatggagaacgtagactcctgggaatatatgcacccttggctccccactggcctgtgcatcccggtctaaggacatggcatcatggaaattctgaacttggtcatgactacaatagttgagggagtattgactaaaatatgtgaatgttacggtttaaaaggaaaatgacatttggattatgctagaaaatcctgagtccttattgccaattttattgccaagtgcctgttgtgaattacatcggaatgagaggcaagtcgcacttaagtgagtaggattctggttyttactctctattttgcttcatccatttcagttttcttcttcctctctgtccttccttcccactctgtccagaggaatgtatgcattgcagtggagaaaactatgacggcaaaatttccaagaccatgtctggactggaatgccaggcctgggactctcagagcccacacgctcatggatacattccttccaagtaagtctcactgggaaaaacattccatgtttaattaaggctctgcagctctatcagacatttgctgtcatttagatattttagcattcctcaagaagtgaacgcctgatgwttttaatttcaaagctaacctcctcccacaatattgcaagtgaaatacgcattcttgctgctcaaaatatggtccacgggtcagcagcagggatgttttctgagagtttgttagaaatccagaatgtcacaccctctgaatctgatttgaataataaccagatcctcagctgatgtgcacacacattcaaacactaatgtcagtaatgaatacattaacatctgtcttcagaaatrcacacacacatgttgctggtgtattttccaaatattttccttttctctttactccttgtctttcttttccctttgtaccaatgagattcaagtctcctaacctttgacctatgagcagacgtcatggatttttgaatccctgatgttttatgtatatttacatcaatgtgtttttctggaatgaggattcrtaacttccatcagattctctaaggggaccacgaatttaaaataagaataagcttcttgctctagaaagtcatgatggttcctagaataaggtttcgtgagtattctatttcacattaattgtgctggaaaacacctcccattccacagtcgcttctggtcttcctcttcattctatgatgactacagggccataccagggctttcaagaatgcagaagtgaggctgagccacagattccacggtggaaagcagctctattgaatttgtacacctcccattccaaatagctagcttaaaacacagcagctgccattttccttcaaaggagaaatacaggaaagacctaagggtccaaaactgggtaaaggcacttccaggaaaccagaaggagaagaggattgcttaagccgctgctggctcctctttccatcctggtaagcatttacaatcagagagggaatgaataaacgcagagggccaccaggcatggagtgcatccaacagccctggccactgggccccactgaggaaggatccagccccatactgcatggtgagacccttgcaagagcacagcttctcctcttggtttttctaagcttcaaggctggtgggagcagagcctggtagaccagaaggaccattcctttaagctatgaagatgcacatttcttggctctgttaggtactagatgagtatctttaggcagggagcactttacattttaaagactgctatcatttgtggttgaataactggaatttgcttacatcaattttccagatggccaaaatgataaggtcactgattctgttgagtgatttttacacatgtaaactgttagaaaaacagtgcttggcagccgggcatggtggcacatgcctgtagtcctagttacctaaagggctgaagcgggaggattgcttgagtgagttcaaggagttcaaggcaagcctgggcaataagtgggaccctgtctctaaaaacaaacaaaaaaaagaaagtccttggaatacagggccaaccttgtttccttgttgccatctctgaacacagccttcatctgattacctcctccatgcccgactgtgcctagcacacagcaggtgctcaatgtttgctcttgaaaaagagtcttatccatgaatgtaaatgttcagtgctactaaaatcttkcttgtccattcagatttccaaacaagaacctgaagaagaattactgtcgtaaccccgatagggagctgcggccttggtgtttcaccaccgaccccaacaagcgctgggaactttgygacatcccccgctgcagtgagtatgatgcacacccagattccaggatttggacctgccctgttcttgaaatcaaaagaaaacatgtgtcagtgcctgagtgcagcctctgaaaagtgacctacaagtcctatgggatgttattggtctttattttattgctggtttaaaacagttatggttattggttactgtgggtgattgatcagagcrtccatttatcatgtttttctttctttgcaactgaaacttctgcctcaggagttcactgaaatgtaggctttaggtgttgttcatcctattctctctgtgctaaagggaaatcagacccatgctctctgacacatggatttcattttcaaccagagttctaatagttgttttgtaaacaaagagtgtctttstttacaatgttcaggtctgtgggtgtccagtttttccaccttggggagcagagggtgagtggtgggggtggggaagagttcaagaggagaagatgaaatggcagacctagtagaaatgatgtggagtaaacaattttatcatattttcctctctgagaatttgaagcaaaggattacacactaagagaaatacaggcatgaaaggttaaaaaggattcagtgagggttggcctcccctcctttcctctgacatgtgtcctttgaaagcggaagttcctcaggcattctccctttttatgaatattaatttctctttttttttcagtttctctttttgtcatcttttttcctcaagaatatcttgatttctggatgcacacacttttccttggaggtgttttttgccttctttccatggactctttccctgttgtttggcttttatggcatgttgggtgccattcagtcatgtctactcagtgaataatttattcttcaggaaagagagtggacctttggtgtatgtgagaattcggggtgtgaggtgacacgtgttgatacttaccaggtaggaagaactgagcaaagagaacatagaaagaagcacctacccaagggtctttctctgaaggagttccttgtgaaagggtctcacaggcatagatgstactaaattgatttcatctgaaaacatgaaacaattctcaagtgccaaattccaagagaggctgagcaraagccaagacaggccagaacaccctgcagccatcctccttaacatccatctgtgcattctctattttaaaattattcattgtagggctgggcacggtggctcacgcctgtaatcccagcacttcrggaggccgaggtgggyggatcacgaggtcaggagttcaagaccarcctggccaatatgatgaaaccccacctctactaaaaatacaaaaaaattagccagttgtggtracacgcacctgtagtctgagctactcgggaggctgaggcaggagaatgacktgaacccaggaggcagaggttgcagtgagctgagatcgtgccactgactccagcctgggcgacagagcgagactccrtctcaaaaaatatatatattcattgtaacttattttgcccattcaagcaacacctccaccatcttctggtcccacctaccagtgtctgaagggaacaggtgaaaactatcgcgggaatgtggctgttaccgtgtccgggcacacctgtcagcactggagtgcacagacccctcacacacataacaggacaccagaaaacttyccctgcaagtaagtcccctccrgtctcattctgctgctatggaatgtgaaatcccattgactttgccttagttttagttactgtaggaacgcaggataaagtattctggaagaaaaactgatctagtcataagtaaaggaaatgaactttagcacgttttttcccgtaacggttgttctcaaagcgtggttccctagacttttttctttttggaaagctaaactcacaatcacttctttttcagaaatttggatgaaaactactgccgcaatcctgacggaaaaagggccccatggtgccatacaaccaacagccaagtgcggtgggagtactgtaagataccgtcctgtgactcctccccagtatccacggaacarttggctcccacaggtaagcaagggtatgggagcttactgagggcccaagttttctccttatttttgtataccagtggcatcatcacaatatacagtagctttgtaagtttaatgctattgtggtcagaaagcctgcccttatgatttcagtttttttagatttgttgaggtttgttttatggttcagaatatagccatcttggtgaatgtttcatgtgctcttgaaaagaatgtgtcttctgcggttgttgggtggggtgttccctcaaggtcatttaggtgaagttggttgctggtgttcttctgtatccttactgattgtctgtctcctccttcattgactactgtggatgaatggtgatgtgtccaactttaactgtaaattagtctatttctcttttagatcgtaactcttttgtatattttgaagctcttttgttaggcacatatgtatttaggatggttatgtcttctagatgaaaggacccctttatctttatgtaatgtttcttcttatctctgggaatatttcttcttctgaagttctgaactctctttatggtgatataaatacagtctcacagctctattttcactagtatttgtgtgatatatcttttaaatttgtatgatatatcttttaaatttatctgagcttttaaattgagatgttcaaaccatttgcattcatgcaattgttaatagagttgaatttacatctaccatcaagttagttatttctctttgtcccatttaaactttgttccttttttcatctttttctgccttcatttagattgagtttatctccactactcacttagtaaattaatttttaatggttttagtattttccacaatgtttataatatacatttttgacttttcacattccaccttcaaatgatatcattctacttgacatatgaatccttacatcattgcagttctacttcctccctcccaaaatgctatactattactctttgtaatagaagcttacttctactatgtcacagatctcacaatacattgacactatttttgccctaatagttgtgttttaaagtgatcaagaataaaactattttaaatattttctttatttatttattttaccatttctggtgcttctcatctactggggtagatctcaatttccatctggtrtcagtttctttctgtgaaaaacaacttttagcattttttgtagcacaggtctgctactgctgaagtctttcagattttgagtgtctgaaaaagtattttgccttcagtttttaaaagtaattttgctgaaygtagatactgggttgagagtttcatyacttgcaacactttaatgatgatgttccattatcttctgttttaaatagtttgactagtaatctgatctttgttcctatgttttcaataggtcatttttctctgactacctttaagattttctcatctttgtttttcaacagttcgactatgatgtgtttattattaatttctttgtgtttaatctgcttgaggtattctgagttcctagatttgtagattgttgatttttttcttttctcttttttcttttcttttctttttttttttttttttttttgagakggagcctcactctgtcacccaggctggagtgcagtggcgcaatctcggctcactgcaaactccacctcccaggttcaagtgattctcctgcttcagcctcctgaggagctgggactacaagcatgtgccaccaggcccagctaatttttgtatttttggtagagacagagtttcgccatgttggccagactggtctcaaacttctgacctcagacggtccatcaccttggccttccaaagtgctgacagtacaggtgtgagcaaccgtgcccagcctagattgttgattttcattgtccttgtaaaattcatagccattatctgttcaaacgtttctttttgcacttttctctctctgtattttccttttgggactctaagtaccacgtgtttgggattctaagtacccacaacattcatgttgtttcataaatcttgtaagcttgttctctttttttttcagtaactctttttcattctttgtgttggtttggataagttctggtaacctatttccaagtttatggattattttttcagttgtttctagtcatctcctcagcccattgagagaattcttcatctctgatattatgactttttttctagcattttcatgttactcttttctatagtttccatctttgctgaaattctctacctatctatgcatactgtccaccgttacaacaagatcctttaacatactaatgtaggtatcacacaatcccaatctgatagtttccagatggcgtcttctctaagtctggctctctggattgctttattattcaacagtggctttttgttcccccttgggttttttggtgtgtcttataattctttaatcaaacactagacattataaatagaagaacagtagaggttacagtaaatattatttatactttgaaatggacacccttgtcttgcaaatatatatcgtggataattgagtcaatgtagtcactagtttaactgaattgggatttgtgattgctagttttaccttaagtgcaccacagatataaattcctccagtgatgtgctgctgctatcttttacttagagtggggcctggggtgctaaagagttttctccgtgttcctatccattcccagatttcagcagtcactgcatgcctgcactacagaggagatatcttcatacacataatctaaccccattgacactcggctgtttcttgttactgaatgctcactttttggtggacgtaggagaatacttatctccctggtctacctccctcttaggccagttgagcacagctcggctttgaaagtagtgatttttcagtgttcttgtgcctccttctgatggaacttgtacctgtggtgggtttggaaagaaagagtagtaggcttctgcttcattgcaatgcaggatgttgggcacaagaggattccctgtaacttctccaagggaataagatttttgcctccaccactctctgagaagctgtggatctttgcctgcagtcctagatgcaggaccatctcctgccctatcacccagaagctttggtctttggctttgtttgaggaaggagctagagaaatgtgcaaagctttcatgtctgccccccactgacagccactcaccacccacagcctgcactgccgaatgcatcctcctctcatctgccctcgtgttctcatgaacactcagtagggacccataaaaaagagcttgcaygtaagtgcaatttccaattataagtactctatctgttctttcmcacccaggttttaaatgaaatattactaggaacttattaatgttctaaaatgctataaatctatttttatgttaatctgtctgctaatacagaaaagagaacagtcataattctcagaggctaccgtactgtttttgtcatarattgcttcatgcttcttttttttcagtaattgttaagcttgatttcttttattttaatttcagcaccacctgagctaacccctgtggtccaggactgctaccatggtgatggacagagctaccgaggcacatcctccaccaccaccacaggaaagaagtgtcagtcttggtcatctatgacaccacacyggcaccagaagaccccagaaaactacccaaatgcgtatgtctytgatttttactgtaagaggggcatcagccaactgaaatttctgttaaaagagccatgcttcatgcttcaagccaacttcctaggaccaaatttctcttagacccagaatgtgtagaaaaatgtctcaagaatcttgcttttgaagaaagggcctgcgagaagagaaattttaggctggctatttttcctgagtagttttatggatgcaggaggacatctggaggtgatgaggtcacattaattgaaagctcaggagtacatatgagcaaatgcttagaaacagtaccattccacaatgcccactaaatatcagtgcaatatttctaccatagaaatctatcattttaacctccaacccctgaaatgaaggttgaatttgctatttttgtcttgggtcacaagtaaatatactttatatatataagtatgaatatatatacacacatatatatgtatacatatgtgtgcatatataaatacacacatatatgagatatacaagtatacatatatagtgtgtatatatatgtacacatatatgtgtgtatatatatgtacacatatatgtgtgtatattagaatatatataacataaatatgtatatatatatwttctgacctgtataaacacagtggatcctgagcaccagtggcctgaaaggatatgggttgctgggacatgaagaacaaaagcaggatacgcagatgctgaacagcgaaagaggccrttagatgaacagaaaaccaggtctaacaaggacagcttttcttccataaatgagtacacaatatatggaaaaaactatttttacatattggagaacagataaactgagataatttagaaagggaatcaaatgagatcaacccaataactaccttggctttgttcctggagacttcctgggctgaagaacaaggagatggagcccaagccgaccacagcagtcttgctgaactgaggaaggagactggagttgggattactaaaacagctgagattttctaggctaggtaataacatgaaaggaaacattgtggaggaaagcagctccaggaatgtccatagaaaagtcctcaagtctttggctaaatagaaagctgcatatgcacagggagargttccagagagaaaataggataaagaacagctactggggaaagaaaaacygcaggggaacagtgagctcaatggagatgccagagctcacatagcactgggggatatttgagttctgaccagcctgaggagagacctcgctgaacatcttgggcattcagtagtcaccacataaagccaaactttgggagtaggattagtgtattcctataataaaggycactccagaaacagcatagtaaagctgaaaagcaagtctaaaaaaatcaacacgatctccaagtaaattaactgattgccagaagaaaattcaaccctttagaggcaaacaacaaaatcaagttgctcagttatgtggcatccacaatgtgtgacctaaatttataactttaccagacatacaaaaagcatttactgtgatccataaccaggagaaaaagcactcaawacaaataaaccccaaaatgaagaaattggcaagaagatttgaaatatatatatatcayaattgtgttcaaggatttaaataaaacatgaacatggaagaaacaaatggataatatcaaaaaagaaaaattataaaataaccaaatagaaattaaataactaaaaaagtgcatgtttaatgaaaaatgtactggctacccttaccatcaggttagacattacagaagaaaaagttaactagaaaataattcaatagaagtgatacaaactgcagcacacacatacaaagactgaaaagataaagaaacagagcctcaagaatatctatgaaaatatcaaaagatttcatatatgtgtaaagcaagtcacaagagaggaaagagatattgggacagaaaaaaatacttgaagcaacaagaaaaatcttattagaagccagaagaagaaaatatatgtttacacagaagaatagtggtaaaaatgactgatgccttctcgtcagaaactatgctggtcagaaacaatgaaataacacctttaaagtgatagaaaaaaataaaaaagattaacatagaatgttatatccagcaaaaatatcccttgaaagtgaatgttatataaatacatattctgcctcccccaaaataaataaaacactaagagaatatttcattactaggcttatataataaaagatgttctagaaatctattttggtagaagaaaaatagtgccagatgggaactttatactaagtaatgaagaaccctggaaatggcaaatgtaaaagattcatatttaatgccttaatttctttaaaagataattgatgggaggctgagtcgggcagatcatggggtcaggagtttgagaccagcctgaccaacayggtgaaaccccatctctactaaaaatacaaaaattagctgggcatggtggcakgtgcctgtaatcccagcaactcaggaggctgaggcaggagaatcscttgaacccaggaggtggaggttgcagtgagctgagatcgtgccattacggtccaacctgggtgacagagcgagactcaaaacaaacaaacaaacaaacaaacaaaaagataataatttactacttgaagcaaaatgatagcaatgtattgctactttaacatatgtaaaagtaaaaatttctaaataataataatcacataaataatgtaggaaataaatggtagtatactgttctaagtttcttgcattatccatgaagttatataatacacatggttgaaggtggtaagttaaagagggttattgcaaatcctagaacaactgaaaaaatttaaacttagaggaatagataataataagaatgttccatttatccaaaagaaggaaagaaaggaagaaaaaagaatgaagaagatatggcaaagagagaaaatacacagcattatggtacacttaaactgaactgaaartatatttaatatactcctaagcatattaaatataaagggattaaacattgcacagaaaaggcagagattrttaagctgaataaaaatcaaagcccaattatgttctttttactatacatgctctttaattgtaaagagctagtccaaaaaccaagtgtggaaaatgacrtatcatgaaaataagaatcagaagaaagctggagtggtaatgttaatcccaaagtaatctacaagaaataataccacgatgaaaaagttatttcttaagtaaaaaaagtttattcatcaagacttaacaatgctaaatgggttgcaccctcataagagcccttctgatatatgaagcaaacactgacagaactgaagagacaaacagataagcccacaattagagtgggagatatcctaatgtctctctccgtatggwtatacatcttcccaaacaaaatataatagaaaaaatacacaaaaaaatcagaaagaatatatatgttttaaaggaaattgtcaacctatttaacactatgccaaactgcagaatacacattcaagtatgcatggagcattccccaacatataccatatgtgtgggcctacagcaagtcttaatagattgaaaagaattaaaatgatacagagtctgtttttgagcaaaacagaattaaatgagatataaataacaaaaaaattgggaaattatcaaatatctgaaaatgaaacaacacatttccaaatacttcataagtcaaagaaggaatttagaaaagttttgaactgaataatagtaaaaatacaacatatcaaagttcgtatgatgcagcgaatgtttttagggttttataactttaaatgctttcagtagaaaatagaaacatgtaaaaatcaatgacttaagatggcatttctcaaagtatgctctggagaaacctgaagtctcttgagatcccttcagagacagtctatgaggttaaaacacctttaaatttaaaaaaaaaagattttatttgctatttcacttttatttcctgataagtgtacagtggagttttccagaggctacataatgtttgatcacattatctctctgatggctaataaaatgtgtgattgtctattatgtttaaaaacattctcagttttggatgcaataaatattcatagtatatattacaaaatgaaagctctttagggtccccaatactttttaagagttaaaggggtcttaagaccaaaaactttgagaactgttgatttaagataacttaaacatctagaaaaggagaagcaaataagatccaaggtaagtggaaggaaggaaagaatgaaaatctgtgaaatccagtgtataagaatatagacaaacaattgagtaaatctgtgaaacagaaagttggttcttttgaaagattcatgtaattgataaacctctgcctaaactgacgacaaaggagggagcaccaccgtcaacatcaggagtaaaaaaagggaagagtcattgctataggatctttttgatattaaagctaataaacaaatattgagagcaactttacgttaacaaattcaataacctagataatatggactaattccttagaaaaaaacaaataagcaaattggacactgaataaactgaatttctaaccaatctgatatctattaaagacaacatgtgtatataatctttaatatgttaatatatattaataaatcaataaacttcccacagagaacactctaagttcagatggcatcattagaaattttattatttaaaaaaaatccaattcttcacgatctgttacagaaaatagaggagaagggaaatatttcttgactcaatttgtgagaaaaaaaaaaaaccctagttgtaaaaaagtagacaaggatattgtgagaaactatagcacattatgtattgtgaacataaatataaaaagatgtaacaaaattttaatcattaacatgatgaatatcccaaacaagtgaagcttctcttcaagaatgcaaggctggcttaacatttacaaaacaatccatgtaatccaacatgttaacagaataaaagtgataaatcatatgattatgtcaatagatgcagaagaaaatgtgacaaaatttaacacttatccatgataaaatgtcttagcaaactatgaatagactggaacttctttaacttgatcaaaggcatctacaaaagacctccagataacatcaacttaatggtgaaagattaatgttttctctctaagattgggaataagaaaaatatgtttgctctcagtacttctaatcagcattttactacattggtcacaaccattgccataagacctgaaaacaaaacaaaaagagaggaaaaaaaggaaggaaagaaagaaagggcctaaagtttggagaggaagaattaaaactgcctgtattcacagaaagcttaattaacggatgcagaaagtcctaaagattaataattaaattttgcaagattggagaacacataagtatatacatgatcaatataataaaagtagttgtatttttatacactgccaatgatcaactggaaaataaaaatgtcagagcaataccactgacaatagtatcaaaaccacaagatatttagtgatacatttaacacaatatgcacaagaattatgtactgcatactaaaaaacattgttaaggaaggaatcaaaagatctaaataaagatatatcacgcttatatattaagagtcaatatcacttctcaccaaattgatctttggattcagcccatacccaattgttaaggaagaaattacaagatctaaataaagatatatcatgyttatatattaaaagagtcaatatcacttctcaccaaattgatctttggattcagcccatacccaaccagaatctcagcagtcgttttttttaaaaaatgtgaaaaaatgtatatgctagaatcacaaggacaatatttaaagagaagaaaaaagttggaggacttacttacccaaaggtaaagacctataaaggtacagtaaacaagatatgtggtattgggaaaaaaaagtatacagatatagaaatggatggtccagaaacagatccacatatacatgatcaatttagtttctaggtaggtgacaaggaaattcaacagggaaaaacatcttttccaaaatcattgtgaaacaatcggatatccatctagaaaacaaaaataaaaacaaattttgacttctactttccatcccaaattaatgtgcaaaagctcctagatctaaatgtaagagctaaaacttaagctgaaataaaacaattccaggaaaatatataatattttcacaaacttgaggaaggcaaaatttttttcaggcaggacccagaaaacactagctttraaagaaaataaattataatttgggctttcataaaatgaaaattatgttcatcaaaagtcattgttaagaaatcagtaggtaagtaacagactggaataaaaattctctccatccatatatctgacaaatggtttgtatctagagtataaacgtttctcccactcactaatcagaggacaaacaacctaattaaaatgggcaacagaattgaataggaaatttctcagggaacgatggacagatggacaataagcacctgaaaaaatgctcaacattttagccatcaaagatataagaattataaccatcacaagatgtcaccaacacttaatgggcatgggtatcattaagaagacacaacaataagtgctgtcactgatgtggagcgaggatgtgcagctctcgcatacgctggttaaagtacagtatgctggttttccataaagttaaataactatgagtctaccccaaaaaactgcaattctattcctgaatatttaccccatggaaatgaaaacagaagtccacaaagagatctacaagaatattcacagcagctctagttattataaccccaaactgtaaacaactacaaggtcaatcaatgagaaaatgaatcgataatttgtgatctattcatataatggaatattattaagcaattaaaatgaagaagtgactgatcctctcaaataggatggatggaactcaaaaatatattaaggaaaggaggcagatacataagtgtacattctgtatgagcccatttatatcaggtttgaggagaggtaaaactaatctttagtgaaggaaaccaatagtatttccctctggcagtgggaagagggtagcaggaattgaatgagcagtgacacagggtgtttctagagtaatggaagtgttctgtatcatatgggagtgtggtttacacaagtataggtgatcatcaaaactcaccaaacaacatttaagatctgtgcatttcacactatgtaaaagtatacctcaactgaagagagtggaaatctgtttcaaatgctcagccttttaacacatccagttgcttagactatgaacttcctcaaatggggtgtctgggcttgagattagatcacatgtgtagagtcgctagagagacaatgttgcattcccatggtacataatacatttcccgttttctcagacagccacaggtcatgaatgtgaggattctgagaggttggagcaacattcttgggaggcatgagggggagcacattctccaagatcccccccagcccggggtcctcgcctgctttgactattactccgttgttttcggactcctccgtagctgcccgacctcttcagatcccatagtctccctttatatcttgagtcccactgttcttccaactcatcccccattccctcagacctggagtggcagtggccagcagaggatggattgagagcaggagaggatgtcctgcccaggaacccatcctagagaaatggcatcctgcctgggagctagtttcccagggtggctttgatacgtcttgcagaaacaaacccacttgacacacctgatacggtattgacagtaacactatttttcgtggttgtttttcatagtaaaagtagatccctttagttacactgtgagtacttagagtaaggtgactggcctgggaatgataccatcttggatgtcattttctccttggagaaatgtattttagttccaatgcacatttcacaatacagtcctatagagagaaatacagagagctagacagttagagatatacttttatgtgcataaaaatataaaatatgcactttaaaatctgtacctgttattcctgagaaatgtatttggcagaaggtgggagggggatattctgatccttttatttacatgtttatgtatgatctgagtttttatatggagcatatactacttttgattttttaaagaaaaattaaaatctgtctttgaaatgtacacagttgtttagaagttgaggaccatttttgtttgttacaacattattgtacctataatgggaatatttcaaagccacttgttaacactttgttagaacaaaatgtagagggtgctgggtgcccctgaatattctcccacctcttgtgacctgtattgttttggaatttccagtggcctgacaatgaactactgcaggaatccagatgccgataaaggcccctggtgttttaccacagaccccagcgtcaggtgggagtactgcaacctgaaaawatgctcaggaacagaagcgagtgttgtagcacctccgcctgttgtcctgcttccaratgtagagactccttccgaagaaggtaagaaatctgtggctggacatctacacrcttggacgctgggatgaaaagccatggaaaatctcactgatgcagaaaccttccatgctacacgagaaatcaagtgtttttagagggtctgccatgtggaaggaagcctcagtgcactctctcaaggaggcagaggtgtgacttttggcacaacrtgagtgggctgtgcctttaggacaggtgcaaaccctccaaggtgctcaacttaaccactcaccttgttctaaaatgggttatctcagtatcccagtccaaattcgtattctatcatgctgccatatgtgtgattctttccaagccagtaagcatctccagtaatttcttaaggtaggcagcgttcattgcagtcttcagcattgcagtttctgaggaatgtggcccctgattctgtcatcctagagaaacctgacatgactgtattgattccatatcatcctgggtctctgtggctcttcataatcatccattttttccctgtacagactgtatgtttgggaatgggaaaggataccgaggcaagagggygaccactgttactgggacgccatgccaggactgggctgcccaggagccccatagacacagcattttcactccagagacaaatccacgggcgggtctggaaaaaaatgtaagccactttgatttggactctttggccttttgctcaccaatctttgcaaacagaattggttctgtgttacagaaaatctgacctggactgctcttttttgtaatgggggagaggggacagaagaaaatattggaaaggcatcagggggctamgctagaatataattggccttagtatggaaagtacaagcagcacaggccaggaaacctccacacatgtgagggttctcaggcctcttccctttagtgacatttctttaaagtttccattattggggactgtctctagtttctagtgtttgtatgctaggttccagtaatcaaagatgccctttatgaaatttaagtcagatttttcgagaaaaaatttggatgggccatcaggtcaccatgggacttcccttagcctcatgcattctctgckatggtttactttggggcctatgaatagggaagactgagatataggaaaaaccaaagtgtctgtgttcccccactctcacacccatgcagcataacacttctcacaccagatgtggggggatttctcctcacaccccaagcgagtctccagcagataccagctgggtgtcctacaatgtaactcagtgctgacactctatctggagacagtgtcagatcccataagttaaggctcagtcccacaagaccgccccactgcagatgccaatcccaagttccaggcggtgacctgtacttctgcccaactggacaaaaatctgtttttctacttgattactttgctagagtggctcacagaactcaggggaacacgttacttttatttacccatttgttataaaagatattacaaaggatcctggtgaacagccagacagaagagatgcacggggcaaggcatgtgagaaggggctcagagtttccatgccctctccagtgcaccagcccccggtaccccaagtgttcagcaacccagaagctctccaagtgcagtcttgctgggtttttatggaggcttcattacagaggcacagttgaatacatcgttggccattggagaccagctcaccttcagctcctrttccctccctggaagttggacgtggggggctgaacagttccaaccctgcaatcacatggttggttcctttggcaaccagccccatcctgagactatccaagaacccaccaagagttgcttcattcaaacaaaagatgctcccttcactcaggaacccccaagggatttaggagctccgtgtcaggaactggggggcagagaccaaatatacgtttcttattctaccacagtgtcatatgaaggggaggacaacactgcctttctgtgtcttgccccatagagggcgcacaatgcatggaaataaatgtttctgaatcaacagcaaacaggcttcatcgggtaggagagcgctgagccctccagggacaatgcacatcaatgatgtcccactgtcctttggtgctggggctctaaggcctccactgggtcaggctcctgaagggagacccattctccaaagacccccgagggtcaccactccctgtccaggggtgtggcctcatagctccttttgaacaggggcacaggaaggacggctttagagcattcaaaaaataactttgccaaaataataataataataatagaarggaagaagaggctgagcatggtggctcacacctgtaatccctacactttgggaggctgagacaagcagatcacctgaggtcaggagttcgagactagcctggccaaaatggtgaaacctcatctctactgaaaatasaaaaaaaaattagccaggtgtggtggcgtgcacctgcagttgcagctactcaggaggctgaagcaggakaatcgcttgaacccaggagatggaggttgcagtgagctgagatcatgccactgcactccagcctgggcgacaagagcaaaactccacctcagaaaaaaaaaaaaaaaaaaaraaggaaggaaaaagaaacactcctttatgtcttctaaggatagacatgaaatgygtgagccttggaacaccttctccctctcctgccccacgtgagctggagcttacatgccttcttgttttcagtactgccrtaaccctgatggtgatgtaggtggtccctggtgctacacgacaaatccaagaaaactttacgactactgtgatgtccctcagtgtggtaggttgccttctttttggtaaggaaactgcttacttaatatggatttgcaacmaaaaaggaaaagggcttctgagcagactgcttctggggaggagatagctgccctctccatcagaccccactcttcatcatgggcatcttgaatctgccctactattggccacatttgttagaggaacacctgcccatcgccccaggcacacataaataaaataaatgtaaaattcccaaagagcaagcttagaggtaatctagtcagccccaggatggtcccactgaatgctgccatgtctagcgtgggatgcatgaaaaatttagagtcattcggatgaaaaactttccctttccacagctgagaagtaagaaagaaaatacaaacagcaggaaacaggtaagcatgtaacgcacattgtaaacctcagatggccatcctaggaattcaatgaaaggtagtgcagctctttagccccagatggcctttcttataagtttactactcacaagtcacattagtgacatagcttagagactgcttgttgggttccatcctcattgctctgagactcttgttgggagtatgaggcttggatcaggggaaggggagttgacattagttcttaaagaattggaataacaaatccatgggtatttctgaaaaaaaaaaaaaraaaaagaaaggaagctacttggaattgtcccatatttaacattctgctgaccaatcaatttgtcctagttacagaaaaccaccctggacttctcctatgcataatttggttgcttgtggttgggtctgccatgtggagggaccttgagctgggggaaggagcttggcctccaagtccactgaagaccagcatcctgagattgcctgggaaggtggtacagggcagtgatgaagatcatgggagccacactgcccagcttcgcatttgggcttctcctagggacaccaagagggaggaaggaggggttaggatggtatgaaagattctacttggccaatattattgtaatgcggcattgtgatctctggatttagcatgagttgatagctgactttttctgcagaagcatcttggtggcacctctaactcaaagtccctcgatggagtcagttccagttctccacttctggccccatctggtacacaccactgcctctcactgcccgggctctctatccttgacaggctgccttgaagttgagcccagactgattttcttgcctcagaccccactaccgtgcctgggactcatgcacctttgactcccatggaagggaagtgcagtagtttcccaggtgcaattctggtgtcctcacccacattgaggatgtacaagaatcaggttcttagagattggagaaagaaggaagaatgggaacaagatttttcccaaaggactgtgaggtcccccacctaaccttgatgtgagacaagtgaggttaaccccaagcctggtgagaagcgttcccatcagacacttggaaatcctgaggactgtttcatgcagaaggatatggtttattcaggtttgactcgtgcttgagaaagctagagcctctggtggtgaatgattttaataactatttcctttccaccaacatatacagtacaaataataataagcaaaaataaatagaaacattcagttttgttttgaatagtaggagcagggtaccatcatttctgtagttactcttttagtacaacgatgcatgtctactgtatgtaaggcatactagcagaaattgagctcagcactagagaagatgattgcattctatgccttgcttcttttttwaaaaaaaggcttccatagatagattctcagaacagcccatggcaaatgtaaagttatttggaaaacccaggttccagattcactagagcatagaatctctggttggttgggaaggaatttcctcttacagttgttactaataattgtatgaacaattatttaaaatattaacatttacatttgtgaagaccttgaagggctggagacaacagagaagcatttttgaataccctctgcagcccctgcactgttgtaggcattggtggatggtaccaaagatgggacactgtccctacctccagagaccctgtgggctggctacagagagaaggcagggaggaggaaaagaagaataaagtcatatgtttaagtcacccccacggccgttggttagtcatgggaggctccccagaggagctgtcctgaagctggctgacagaaggcaacatttcaacttaggacagtaatccttgctacatacaatcacatacacacacacacacacgtgcacacacagagactcacatggaaaaataaacctttgtgcctttcagcagtgatgacaattatggttttcagtaaactttacatggtttagatggtgatggtgatgatgatgattatgggaaggatggcatcatgttctaaacatactgcatggagtcagaataacaatgacaaataaccatttgtcccaatcaaggttttctcagaaaatatctcattctgatgctaaactataccagtctgtttgatcacttctccaacaaaataattacaaagtgcttatattttcttgaaaagagagggtcctgtgttgtctactaccacttttgaaacttagagaaaatgttccaaaagatgatgattttactatttagttcggcctttaagatgtcaaaaactcagtgcttggaatttgtctcgaattacaccacaaaattgctaccttgtctcaaatgggatttctttcccaccttgtgccacagcggccccttcatttgattgtgggaagcctcaagtggagccgaagaaatgtcctggaagggttgtaggggggtgtgtggcccacccacattcctggccctggcaagtcagtcttagaacaaggtaagaacaggcccagaaacgatttatactgtccctccacgtaagccctgcaaaacccttctacatttacataaaatccacacagctgaggcatcagcacctgcctctaagttttctgaaggaggaaaaaagctacaaaaattaatatatgtatatatacatatatatttttataggttctctactgtgaaaatgacaaaaattgctgtctttttcttgatctgggcagctccatcaaaatctgtaggcacagtgatttgcaccaagttccaatattgctggaaaatactgaagatgctctgaggatttctatggatatccattgtctcattgtcagatgaaaagagggggaagtttttagaaatgtgacactttctgggttgggagagcaaggacaaaattatctccagtctatcacaggcacagattctttttctttggacactttcgtgaatcattgaattcaatgcagaggctactcatccattcgcaaacaaaaaaattctaggtcatgatccccataaatgaagagtgatcagtccaatcccagggaacctggacattttgggtattgtttcagtggaacatgcctttcataagttccattttcttgggtatctcttaggaagcaagcataggaaacaggcccatccgtctgcctgttttgcttcctcatctcacttctacacgagggygcctgtgctcaattgctgttttcccctaaagagactcttttccataagtttgtgaaatgccatcgacaaacctgatcgcattgcatttcactctgctgttgagtcgatttttctttattttatcatttagtaactccttgctctacagagctttcaccttccacatatttcagattcattctttcctaaactatgtggtggtctacgtcctcactgacttatcaacatgctaccatcatgcacttcctatctctattcctcttctttaaatttggttccaaatggctcacaccattattctgagctattacctgcctacgcagtcctagaaagtaagtgattcaggaaacattccccaaaagtaaagtttctcaggtaagatcagaagactcccatgagtcactgctgctcaggatcacatctggctccttgaagagtgattcatcagaccttacatagatcttgtcataaaaatgaaagaggcctcgggggaaggtcttgggctggtggcttctgttggagtcctgggctgtggggtgaaagccgtggctgtagagcttcatgcggagttacttagctttgctctcctgtggacaggccatgcctgtgcctcccccaagcatcggaaaaattggcatagatgggcccttctcaaaaatcccactcctggagcactggccaaaattactaccatcctgatgctgggcttgcagtcctttcctttgggaatatgaacatggtcaaaattaagtgaacgtgtctttctggctttctgtacaatggagcagaacaaagtatcaatttaactaaaatttgaactaaatcctctttccaggtttggaatgcacttctgtggaggcaccttgatatccccagagtgggtgttgactrctgcccactgcttggagaagtatgtttaggggacaattgacatgaagtcttgtcttaaatactttttctgtccttcttttcctcctttcctcctttcctttctcactcttcctcccttccttctctggctgtgacactagggaccaggccagggcaattggataagagagaagggaagggtttctagaaagaaactgcagaggaaagacacagtacagatgattttgtgggcctgaataaactgcagaacagagctgttcactaccataggctgtatcagtctctgcccaaacagcccaagaacattccttaactgcctgtttcaagcaaatcatgaattttgcttcttgccactcagaagtcactaattctgagtggccaagggtgtcagggagacagcaccaatttcatggcacagaggttacctgaaggggctggaccatattttcctcttgacrtcctcatcttttctaggtccccaaggccttcatcctacaaggtcatcctgggtgcacaccaagaagtgaatctcgaaccrcatgttcaggaaatagaagtgtctaggctgttcttggagcccacacgaaaagatattgccttgctaaagctaagcaggtactcgttcacctgtggtcttcaccccacgctggtgaagatatttgctttatgtctgggttttatgggccatggccactgcatggcagtggggaggaactgtctatcacatgaaaggctcaagggctttggggacagcatcaatcttcaaccctagccctgccacatgctagctgtgctcttgagaaaggcagcaggactccgttttctcatgtggaaaaagagttgaaatgaggtactctgttactcctagaactcacttaaygttcaccagttcatacacattcatgatcagagaaygattcagttattccaggctgacaattcccccttcatcataatatgtttaagagaatcatataagactatatttgtttcaaagcactttaaaaaccacaagatcgagttgggtgtctggtgtgggtgcctgtaatcccagctacttgggaggctgaggcaggagggtcacttgagtcccggagtttgaggctgcagtgagttatgatcgtgtcactgcaycagcctgggcgacagagtaagacactgtaccaaaaaaaaaaacaccaaaaaaacaaaaaacaaacaaaaaaaaaacaacttcacaatgtcaaaaaaatcacaaatacagtttataaatgtaaattatattattattattgtcttctttgatttgattttctctttcctgttgaaatgttgtttcactaagcctgacaaagtgaaacatttgcttatgtcactcatttagtgctgtttggagccagatactagttgagtcagctaagaaacagctatttgtaggagaagcaggtttgggacaggtgacaaggcacgcagggcgctcgctgtgctggtggttctggaagacagggtgtcagtgtggacagggatgagcatggcctggatgagaaggcacggggcaggagcctgagctgctctcctgggcctggccacaagcccagggcagcttctctgggtctgtgaactgaggggtgatgtcctgggatgctctgacactctagaaggagagaagagcctttccagctcagcctttataaacagtagctgatctccctcctgctccccagtgtcctccccgccatcccagcaaatgtgcaaatagaaggtccccgttcctcatgatcctcagagagctggggtgttctgatggcttgaacaagtaatttggaaattttgggttttggaggagttctctgataggctgatacatttcgagtttagagttcccaccccacatccccacaccccgagtctagggcatttagtgctccaccagggaacctgtagagtgaggacgtctgcatgacaggctgggccttytgatgatgctcagaagcagaaagtgtgcctgcttcaaagttggtgacgatgatgtttyttgatcagaatagggcatttyttatttccaatcctttatcctcttgaacttactaaagtagaatcaggtctaaaaaccggagttctaatgtttgagagtccctgggactctaaagtatatgaatgttctttgaaaacaaataccattttgttcaagcaaaaggcttatttccaatcctctttcatttggtatcaagtattttactggattcttacaactatggcgtagtaacattcactgaggaggaaatggaggatccaaggatggagcaagttgctctgggcacacaacacatttgcaattttacagcctcttggtggcatctcagtcagacattccatgcactgatcaatgccctattcgattaatgtaaaaggacacactcagcatgagattccagttgtgcacagaatatacatgagaagtgcgcctttgtcatccctactttcaaaggtgaaggccaccagcagtatcttgcatgcaactgatgcctttcaaatgaaaccttacatctgcatagtccatagacaaccacaggcaaatgtgagggtgaaactctgtgttctrcgytgctctgtgtcagtgaagcaaggcagtgccagttcagagggctctggggcctcaagacagggatgactggttgtgggtrctgcagctgcgagcagagcagtcaaacataactgctgatgcttttctttcagtcctgccgtcatcactgacaaagtaatcccagcttgtctgccatccccaaattatgtggtcrcyraccggaccgaatgtttcatcactggctggggagaaacccaaggtgagataaattccattgcccacataacraattggttttgacctacagtccatgtgacaaaatgatcattttggagaaagctgtgcaaattcctatccatgaawrtggtccaccccactcctgattttgcctgggcacctgtctatgtcttaatcagtcttcaaggcacatgatcaaagggaggaaaactgtgtctttgagtctctctctctctctctgttttcagaacatttttatttcaattaattaatttttaacttttattttaggttcaggggtacatgtgcaagtttcttgtatatgtaaacagtggtttgtcatgcagattattttgtcacctaggtactaaccctagtacccaattcttagtatttcctgctcctctccctcctcccactcttctccctcaagtaggccccagtgtctgttgctctcttctttgtgtccatgagttctcatcacttagctcccacttataactgtgaacatgtggtatttggttttctgttcctgtgttagttttctaagaataacggcctccagctccattcatgttcctgtaaaagatattacctcattctttcttatggctaaacagtattccatggtgtatatgtaccacatwttcttcatccaatgtgtcattgatggtcatataggtgattccatgtctttgctactgtgaatagtgctgcaatgaacattcatgtgcatgtgtctttagggtagaatgatttatattcctctaggtatatcgccagtagtaggattgctgggttgaaagttagttctgcttttakctctttgagaatcaccatactgctttctacagtggatgaactaatttacagtcccaccagctgttagtgttctcttttctctgcaaccttgccagcatctgttattttttgactttttaggaagccattctggctggtgtgagatgatttttcattgtggttttgatttgcatttctctaacgatcagtgatattgagctttttttcatatgtttgttggccacaggcatgtcttctttagaaaagtgtgttagtgtcccctgtccattttttaatggggttttttttttcttgtaaatttgtttaagttcctcatagatgctggatattagacctttttcaggtgcatagtttgcaaatattttctcctgttctctaggttttccctttactcccttgagagtttctttttctgtccagaagctcttaagtttaattagatcccatttgtcaatttttgcctttgttgagattgcttttggcatcttcatgaaatttttgcccgttcctatgtccaggatggtgttrcctaggttgtcttccaggatttttgtacttttggattttacatttaagtctttaatccatcttgagttgatttctgtatatggtgtaaggaaaggggtccagtttccatcttctacatatggctagccagttaccccagcaccatttattgaatagggagttattttcccattgcttgtttttgtcagctttgttaaaaatcagatgtctgtaggtgtgtggccttatttctgggctctctattctgttccactggtctacgtgtcttttttttttttttttaccagtaccatgctgtttttgttactgtagccctgaagtatagtttgaagccaggtaatgtgatgtctccagctttgttctttttgtttaggattgccttggctattctggctcctttttggttmtatataaatttttgaagtagttttttaatagtgctgtgaagaatatcattggcagtttgataggaatagcaatgaatctgtaaattactttgggcagtatggccattttaatgatattgattcttccaatccatgagcatgggatgtttttccattcatttgtgtcatctctgatttctttgagcagtgttttgtaattcttattgtagagatctttacctctctggttagctgtattcttacatattttattctttttgtggcatttgtgaatgggactgtgttcctgatttgcctctgggcttggctgttgttggtgtaaagggatgctagtgatttttgtacattgattttatatcctgaaactttgctggagttgattatcagctgaaggagcttttgggctgagactatggggttttctagacatagagtcatgtcatctgccaacagggatcgtttgatttcctctcttcctatctggatgccctttatttctttctcttgcctgattgctctgaccagggcttccaatactatgttgaataggagtggtgaaagagggcatccttatcttgtgccagttttcaaggggaatgcttccagcttttgcccatttagtatgatgttggctgtggacttgtcatagctgtctcttattattttgagatatattccttcagtacctagtttattgagagttttcaatataaaggatggtaaattttatcaaaatccttttctgcatctattgagataatcatgtgggttttctctttagttatatttatgtgatgaatcacatttattgatttatgtatgttgaaccaagcttacattctggggataaagcctacttgatcacgatggattggcttttttatgtgctgctggatttggtttgcaagtattttgtaaaggatttttgcatcagtgttcatcaaggatattggcctgaagttttttgttgtttttgtgtctctgccaggttttggtatcaggatgatgctgacctcatagaatgaattggagaggagaccctcctcctcagtttttttgaacggtttcagtaggaatggtcatagctcttctttgtacatctggtggaattcagctgtgaatctatctggtcctgggcttttgttggttagtaggctatttattactgattcaattttggagctcattattgttctgttcagggaatcaatttcttcctggttcagtcttgggagggtgtatgtgtccaggaatttatccatctcttttaggttttctagtttgtgtgcatggagctgtttgtagtagtttctgatggttatttttatttttgtggcatcagtgctaacatcccctttgtcatttctaattgtgtttattttggtcttatcttccttttcttcattagcctagctagcagcctacctatcttattactgttttcaaaaaaccaactactggacttgttgatcttttgaatgaattttcatgtcttgactttcttcagttcagctctgattttggttatttcttgccatctgctagctttggggttgatttgctcttgtttctctaattttttccattgtgatgttaggttcttaatttgagatctttcttcttgatgctagcatttggtgctatgaatttctctcttaacactaccttagctctgtccaagagattctggtatgttgtatctttattctcattagttcaaagaacttcctgatttctgccataatttcattattcacccaaaagtcattcaggagcatgttgtttgatttccatgtaattgtacggttttgagttattttcttagtcttgactggtatttcattgtgctgtggtctgagagtgtgtttggtatgattttggttctttggcacttgctgaagattgttttatgtccaattatgtggttgatttttagagtatgtgccacatggtgatgaaaatgtacattcagttgttttgggaaagagagttgtgtagaggtctatcagatccatttggtccaatgctgagttcaggtcctgaatatctttgttaattttgtgcctcgatgatctgtctaatactgtcagtggagtactgaagtctcccactattattttgtgggcgtctaagtctctttgtaggtctctaagaactttatgaagctgggtgctcttgtgttgggttcacatgtatttaggatagtagatcttctttttgaattgaaccctttaccattatgtaatgcccttctttgtcttttttggtctttgttggtttaaagtctgttttgtctgaaattaggatggcaaccyttgcttttttgtctgatttccatttgcttggtaggttctcctccatccctttattctgagcctatgggtgtcattacatgtgagatgggtctcttgaaggtagcataccagtgggtcttgctttttatccagcttgccactctgtgcctcttaagttggrcatttagcccatttacattcaaggttagtattgctatgtgtgaatttgatgccctcattgtgttgttatgctggcttgtttgtgtgatggttttatagtgtcattggtctgcgtatttaagtatatttttgtattggctggtagccatcttgctatagttagtgcttctttcaagatctcttgtaaggcagttctggtggtaaccaactccctcaacatttgcttagctgaaaatgatcttatttctctgttgcttaggaagcttagtttggctggatatgaaattcttgggtggatattttttaagaatattgaatataggccccaatatcttctagcttgtacgggttcagttgagaggtatgctgttagattgatggggttccctttgtagacgacctgtcctttctctctagctgcctttaacattctgtctttcattttgaccttggaaaatctgatgattatgtgtcttgaggatgatcttcttgtatagaatctcacaggggttctctgtattttctaaatttgactattggcctctctagcaaggttgaagaagttttcatggacaatatcctgaaatgttttctaaattgtttactttctccccatccctttcagaaatgccagtgatttgtagatttggcctttttacataatcccatgtttcttggaggctttgttcattccttttcattcttttttcttaatttttgtcaactgtcttatttcagaaagccagtcttccatttctgagattctttcctcagcttggtttattttgctrttaatacttggattgctttgtgaaattcttacagtttgtttctcagctctcagctctgtcagatccattaggttcttttttaaaccagtgattttgtctttcagcttctatatcattttattgtgatcctcaatttccttggattggattttgccatcctcctggatcttgatgatcttcattcctatccatagtctgaattccagttctatcatttcagccagctcagccttgttaagaacccttgttagagaactagtgtggttgtttggaggacatatggcactccggcctttatgttcctttaactgcagtgtaggttgaatacagccaatagacttgttctttggatgtttttacagggccaaagccttgtgcagggtctttatttgtagttgatttcttgtctttggtttcatagtgtggtatgttagcaaggtatttttggtgttgaagctttggggtgtgatccattttttatttgtatatttccctacacctaaaacaagcaaaaaaacagtaaaggtctttgagtctcttaatccataatttcagcattcctragtatgcttccctgggtaagtggggttttcacccagccctcaagttaagagtgttagattatttttcatgtgaaattagccagactggctttcttaacacaatgtaaaacaataacaacaaaagttataattagactagtcttcttcccaaatacccacatgtctaatgtaagtgggatggtgttaaacaggggacctacaactgggggagaggcggacaggtcccatggccccaggtctaggatggcatttggtattggttgatgggtgtggatgagaacaagagagggaacayttgtgcaggatatggtatcagcacctgtaatacattttagggattctttcttctctttgcagtatgccctgacaataattatatccatcagcctagtccccttggccattgaaacactaagactgtcttaggatccctgctgcagtttctcagaggtgctaggagggcattaggagtctgaagccctggaagtgtgttctgactttgccactagctagatagacctggactaggcacrttacctctttgtaccactcagctctaacccctcattcaaaaacccagcattttcaagtggtgtttttcacatcagcctttgcataagttttcatttgaagaaaggtttttttgtttttgttttcttggtttaatcaaacatttaaaaacgaatggtctagatgatttcaaagtggctttccttttcctgtgcttttcctactatttaaaaacttyacctccttgatttcttgatctccctttctgcactgctgggtctgggagcattgaggccaagtaaaaggaaccttggcaaaggaggaacacctatgggtgtgccaggctgctcccagtgttttgcatttttaaaaatttaaatgctgcaaacctctatgaattacatattattgttcctagtttacaaatgaggagcctgagkctcagagaatgtgtgggatggtacagactaacctgaattagaaccctggctcccatttactggctgtcaggacttagaaaagtcataaactctctggctgggtgcagtggctcacgcctgtaatcccagcactttgggaggccgaggcaggcagaccacgaggtcaggagcttgagacgagcctgaccaacacggtgaaaccccgtctctactaaaaatacaaaaattagccgggtgtggtagcacacccctgtaatcccagctactcaggaggctgaggcaggagaatcgcttcaacctgggaggtggaggttgcagtgagccaagattgtgccactgcactccagcctgggtgacagagtgagactctatgtgagaaagaaagaaagaaggaaagaaggaaagaaggaagaaaagaaagagaaagaaagaaagaaagaaagaaagagagagagagagagaaagaaagaaagaaagaaagaaagaaagaaagaaagaaagaaagaaagaaagaaagaagggaaagaaagaaagagaacgaaagaaagaagggagggagggagggagggagggaggaagggtgggtgggttgtgaactcttgttgattgtttcctcagctgaaatgtgggctgcagggctattgggggagaaacaataagaaagtgcaccaagcaccaagcacatgctaagaagtccatcatggcagctcctgataataatatggaatagagttgtatctaacatgactctttcttgcaagtgacagaaaatgcaacttaagttggattaagcaaaaaagagaaatyattagtgaactgaaaattctgcaggctcacatcatggccccagaccctgtccattattcttgggcacaaatgtgayattctcgtggcygcagatgctgtggtggctctggctctgccaggaaaagaaataaggaaggccactctccccattacacaaacaatagtcttccagctctgagaggtcgaacttgtgtcaccagcctgcccctaaacccgtcactgattaactccaacctgcatcagctgttccatgmtggaggtggacgcaggaccacactcataccaagatgggggcaaagtgtagttccctcaacaggattataggatatagtgtgataggctgctgggcagccaaaaagcaaacagatcctctacaattcctcaactgatgaaagcacgaagctaaaatcataaagatctgtgtgtgagttctggctctcccatcttccttgtgagattgagcagttagttaatctcttttagcctcagctttctcacctgtaccaacatataaggtcattgtgaggattaagattatgcctcatgatcatcattatcatcatcaccatccacattgcaaccacaactaccatcatcatccccaccaacatcatcaccaccaccaccatcacaattatcattaccaccaccaccattgtcaccctcaacatcaccatcatcactatcaccaccaccatcatcatcactaccactaccaacaccatcactctcatcattccaccaccatcaccattaacattaccatcactatcatcaccaccaccaccaccacccccatcattactgccatcaacatcaccatcaccatcatcaccaccatcaccatcattatcaaccatcatcaccaccattccaccaccatcaccattatcatcactaccattatcaccaccaccatcatcaccaccaccactaccaccaccatcaccaccatcatcaccataaccatcatcaccactatcaacatgatagtaattatgattaccaccaccattagcattatcattaccaccaccagtaccatcaccatcaccaccgccaccacctccatgatcattactacccaccaccrtcaccgtcaccatcatttcactaccagcacaattatcattaccaccaccatcactaccacccttatcacaaccctcatcatcaccaccattccaccactgccaccaccaccaccaccatcactatcattaacaatagacatcacataaccagtttgtagctggaccttgagcccagagcccactcactgtttcttcagtcccaccgccaaccaccaggatgagtcacaaaacataactcaggcctgctcctcaattttctacatgtcaataatgacattgaagcaatgggtgttctctgcttctcagagggaagttgaaattctcctgctcttcccttcatgtttccagatgttccctgacttggatattccaaacgcagagtttggaggtgttgaggccaaggggtttttccaggtcagccatcatctgcaatcactgagctgatcctgctgctggactttccctgttgccctctccccaacgccccatcggggagggcttcaatcctcaggtcacctgtggcctttctgccctcagaggtgccatctctacatctaccactggaaggcagcacctactcacagattgcatcaatttcccagcaactcatggtgggttttcccccttatcagcgtgtttgccttgctcagagagcagatcccagagcagtgacacctaacttaattttcagcaaaacattttgagaagggtgctccctcacacaactacacagtccaggtgatgcacccactgcccaatgcttggtagtcaagaggagcttcctccctgcagctctgcccagatagggctgagctgggctctggagcsaggcgctgggatgagcctcttccatgctgctcatgtaaactccagattcagtgtcggttttctgaacccgagacaatgatctaaatgcagtcgaaggctttggggaaagagagagtgcctcggttcttacctgtgtcatgctcgcaaagcaaagagttttgcaaaattttaatgaaacctgggcttgcaaaattggaaaactagattatttgtgacgacactgagacatccctgggcatgtctatctggaaaaayggcattttctctggcaattttgcagacattctatttcaatttggcaaagaaaataaagcagtttttcacaaaggcagaaatacaactagaatgttcactctccctaattgtcaaagaagtgtaaattagaaaatgaatcaggacaatttcaacctattagattagctaatattttaaaaattgaagactcatacaagtgaggtgaagtgattgttttctagtggcacggtacactgtcacacccttttagaaaataatttggcaacgttattgggagacagaaatatgtctatgtaatttatgggaacttagactcagaaaatgttaaggaataagaatgaactttatgaacaaagatgtggaaagctggaagcaagagtggggccaacacgcatggggaggaagcatttgggcagtgactccacagacccaggctcaggctgaactacacaacctccttacgcctcagtttccttaacagtagaacagaaatgataaaagtgcctgtttcacaggactattgcgaggattaagtgagatacatcgcattataagcttgtgtctggaaaggttaattcttggtaaatgatgactattcttttttattgcaataaaatatacaaaacataaggtttactattttaaccattttggaaggtaccactgagtggcatttagtacattcacaatcatgtgcaaccatcatcatatttccagaacattttcctcattcccaaaggaaacctcatgttcattaagcagtagctccccttaacatattagttatgaagatcatagcattatacaaaactcatgacacaatgatgagtgaaaaaatcaagatgtgaaattttgtgttatgatgtaattagtaaaagaagcatattaaaacatctgaaaaaagagtatataaaaatagcaattgcatttttcagactctacattttaaacattattctttatagttttaaaagcaaaaagtaaagaaacaacaaccaaccccaaaccaacacgacaaagccsagattgttaattccagggctcaggaacacagaatcatatatgatgtttacactctgcagggtcagagactccagcggcattgggagctgcctcgtgttctgcagcctcacagacaggaggtccagtgccgctgctctgttctggaatatcctcctgaatgtgttttgggtgcagttgccatttctttcatctttttaaacacaggtacttttggagctggccttctcaaggaagcccagctccctgtgattgagaataaagtgtgcaatcgctatgagtttctgaatggaagagtccaatccaccgaactctgtgctgggcatttggccggaggcacygacagttgccaggtaagcaaagatcaagagaccaaagttagtcttgtgctctcttgtctcagtctcagyccctcagacttcattccccaggtggcaaattcaaggattttcaaccgaagaccccagtctaagtgttgtttagaaacttcctagatctgtccctgaatgcgtattcagatcatctaaggggatgtcttggggcttgagttccaaatcagtagcaagcgagttttaagtgccataactacctcaggccactcaccctcctggggtgtgctggtggccagggactaaagtggtgacttttccggtagggaaggaggtagaggrtacaggacagagaccaactgcacacactttacactgatgcccaggctagcccagtctaaaggaaacaccaacataggaagggatgtgtgcaggattcacaaaagatcttttctaccccccggaaaaactaagtggtgtggtttcgctaaacagattttgctaagtacttaagcactgcagatgcttgagtaatatgctcataagttcctttctgatttsaattactgggaaaatgtayatatggatagtagaaggatggcatcccataataaaaggcaggcagcctaaccctcacatgcatttttctctccctctgtatagggtgacagtggaggkcctctggtttgcttcgagaaggacaaatacattttacaaggagtcacttcttggggtcttggctgtgcacgccccaataagccyggtgtctatgttcgtgtttcaaggtttgttacttggattgagggagtgatgagaaataattaattggacgggagacagagtgacgcactgactcacctagaggctggracgtgggtagggatttagcatgctggaaataactggcagtaatcaaacgaagacactgtccccagctaccagctacgccaaacctcggcattttttgtgttattttctgactgctggattctgtagtaaggtgacatagctatgacatttgttaaaaataaactctgtacttaactttgatttgagtaaattttggttttggtcttcaacattttcatgctctttgttcaccccaccaattttaaatgggcagatggggggatttagctgcttttgataaggaacagctgcacaaaggactgagcaggctgcaaggtcacagaggggagagccaagaagttgtccacgcatttacctcatcagctaacgagggcttgacatgcatttttactgtctttattcctgacactgagatgaatgttttcaaagctgcaacatgyatggggagtcatgcraaccgattctgttattgggaatgaaatctgtcaccgactgcttgacttgagcccaggggacacrgagcagagagctgtatatgatggagtgaacckgtccatggatgtgtaacacaagaccaactgagagtctgaatgttattctggggcacacgtgagtctaggattggtgccaagagcatgtaaatgaacaacaagcaaatattgaaggtggaccacttatttcccattgctaattgcctgcccggttttgaaacagtctgcagtacacacggtgacaggagaatgacctgtgggagagatacatgtttagaaggaagagaaaggacaaaggcacacgttttaccatttaaaatattgttaccaaacaaaaatatccattcaaaatacaatttaacaatgcaacagtcatcttacagcagagaaatgcagagaaaagcaaaactgcaagtgactgtgaataaagggtgaatgtagtctcaaatcctcaaagagctgtgtttatttcattgacaaatagattatttgtattcaattctgatgtgctttaaggatgaagtttctcattttacaattagcacacacttcgtatatgttgtcacctgttctccttacacaaatgttgttccccattttgaaggattccctttggtaccagttttgcctgtccacataaagtatttcatttaaaaagctcagcataaaatatagactgcatctgaaaagatattgaatataatatacatagcagaacacacacgttccacatttcaaaagcctcgataacaaaaaagaaagatcaaagcccttattagtcgctgtaaagccatttataaagctcctgctgatcctgttaagcatggatataattgacctttcttttaaattaaaatgtaagcttttccccaagacaactcaaagtgccaagactgaatgggaactgtccatgtttctaactcttggccacgggcaccatcagaactgaacttaacaaatatatgaaaaatatctcttcatttttaaaatcctaagacccagaaatcataatccatgggatttgtttagtaaagaagaaaatctgtggctctaggtgtccactaaaggagagccaaaaatgtcccgaataatctcaggaccacagcatcattttatgaataacagaaccaagacctcagattgtacaacagattggttcttattgctggaatggggcataaaccatgcctggaaccccagatgctacagagaaggtagatgggagagacttctgacctgttcatgttgcaaaggcgtgcggagaccaaggtgagcagaggacacgaatgctcacattctgtggcccaggaacctgtgattcaatctcctcattaacaggattcccaaattttcatcctccctgcaatttttcaaatgctcggttatgggcttagtcccttgactgatcagatttgatgaacatttctgcacaaatttcccaaatccttggttttcaaatcctgcattcttgatggagctgttatgagaatcgggtggggggcttctctcgtctctctttagcctaatgaatcagagaccaggaagagccatgcacctgagaggctcttttttaagccagctacatattatgtgttcccagaaacttcaacagcactacaaataatactaactcatccaacattatataaaaatactctggatagattgaggtctttatacagtattacaacagtgtggcataatgtagctgaaatgcacacgtgcatctctgcaaggacagctttgcaaggaggatcagctcctggatagctccttccttccctctgtcaggggcctcaaaggtgagagctggaaactggagtttttttattcctgccacacttataggaatgtggactgaaaaaacaaaggagaaaggagaaagtcttcgtgaaagattatgcaactagttagaggaaggtcttctgttattatttaatagcatagctggttttgatcaaatacacatacctaacttctgatgaaaacccaactcaaaggtaacaaaaatcacttcaggctaattttttgacttgctttcagaccctagacagaggttagttagcattacagtatttaagctctttatgaatttctgctgaattaacatatgtttggaaatcagctgctgatgtgaacccagcagaaatgatagaataatccagtgcagttttagaagggaatatactaacaggtttcagtaatttagcacgaactagtttttttagagtaaataaccatggatcacaatcaatgtgcttaatttgtagtacagtaaaccatacttctagattttttcaagtgtggggactaggtataattaatctatccaacttttcattatgaaaatttataaacagaaaaaaattagaatttgtgtaacttaaatttttgttggtagaattcctcatgtttatatattagttggatattgattttccttgctccccattgggacaatcctgcaccaccccaccacccttcaccagccaaaaacaatctctcccagttgtttaattttaatgcagctgatgtggtagaagagtcctggtctcaaaggactccctcttcctccatttcttcctgatgagtttgcaaatctgactgattctgattgaatcaagaatgaatgcatcactctcagtgtgtaaacaggcagcagtcaatggagtagaatcaaagggaagaaagattttcctcaggatttttgaaatattaaaaaacattagagttccatatccttaatttccagttcattatcaagattgctttttattttttaagttagcagttaaatcatttttaaagattacgcaaaaaaacaagactatgtgttctatttaaaaaaaaaaaatcaaacagtacagaagtctctgacaggaaagtgatggccctcccttcgctacccatctccccagcccatttgtgtccccagatattgttttacatcttttactgtaattctcatattcatatctctgtcttttttagtgaaaaatgtcaaacagaaacttataaagatttcagtaatgttaatttttgttgatataactcttcatgttcatatattggctggatattagctttccttgtacactatttgcctccaaaactcaatctctctttcttttctctgtctacttacctctattacctatctatcatctattatctatttatccattcatcaatccttctacccattatctatcctctgtgtctatctatctatctatctatctatctatctatctatctatcatctatcatccatctacctattatctgcctatctaccatttgtgtgtcatctgtcttcctatccagctacagagagggactgcctttggttttagttttttataaatactctaacacattgttgagtgatgtttcactttgtaatcagtcttgaaaacctgcctatgccattccatctagacagacctgacgtcagcctcctcactctgtagagtaagccacactgttaatcccctgctgctgcacgtcccagcgatttccactttcccacgtcagcagttcctgcctttagatcacttctgagtcttagcaccttacatggaaatgcttctctcttcacaatcatgtttaaaaaataatgaatattcttatctagctttggtgggattttttacattaatattttatgtttactttgaattttttgcttacgatgtaagatgaggatttattgttattttttccccatgcatgttcaattttctcaacatcttcctttctccagtggtttgaaatgctgcttttatttagggtgcattgaattttggacaatgcctgccaagtttttctacatcatccactgtttctggcaaggcaatacccgtgatttcaggcaaaagcatcacgaggccaccacagatggatgccagggtacctacggaataggggagaggtgttactgcccccaggaacacacagctgggccttcccccacaggcctcctcactgtgaagccaccgtgttactcactggagtggctctcaaccacagcaacctctacaccccagatcactgccttggctctccttcaccatgatttcaaatgttctctcccttcctcaaaccctgagctatggcccctgtacacctggcagccatgggttctctcacacatctcacagtgattgactgagtgccttctcggggtccaacacccaaggcctcccctcctgcatcacagggaaacagaagtgctggaggggagtcccctctgcacctgctcactgacactctcacttacctgctcctctccctcccattccacctgtcaccttacactggaagaattgtcttggtgtctaccccagggccagtgctcacctaggcttgtctttttgggtgcctcactatggtgattaaccctttctccagtatctttaacctattgggagaagctttcaaacacattaagatctttcttgtttgaccagccttctctcattctcacctcatccttccattaccatcctttcttttactgttctttagagccaaagttcttgaaaagccaccctctcctattttctccacttatttgtatccaagtggtgtgctagtaaatgcctaacaactggctttggacaatcaagccctgattggcagcatctgccaatgtgcacggtgtaaatgctcccactgtgggcccttcagtctactgacacaacatccctgcctgtgccactaggaagagatgcaggagccccatcaatgtggcttccaccataaagacgcagcagacacaatctcaggaacacaggtaatactgaagatgtagtagatgaactagaaactgatgaatgttgagactaaaatcagttcctactttaaatgcatagacattaatgtaacacaacaagaaacatgaaaaaacaaggaggtaaaataaaacaccatcaaaggacacaataatttcccagtagctggtcccatagaaataaagatatattaacaacctgacaaagatttcaaaataattatttgaagaaagcttggtaaacttcaagaaaatacagagaattcaataaaatcagaaaaacaataaaagaccaaaatgagaaatgtaatggagagattaaaactgtttaaaaagtcaaacagaatttctgaaactggaaaaataattaagtgaaaaatgcaatagacagcatcaaaagcagaattcatcatgtagaataaataatctgtgaacttgaagacaggttatttgtgaatatagaatcgaagaagaaaaaatagtaaaaaaataaagtttacaggacttatgaggcagcatgaaaagtgcaaatattttagttataagagttcacaaaggagaaaaaaaggggtagaaagcttattttaaaaataacagaaaactttctaaatctagggaaagatatcaacatccaggtccaagatggtcaaaagtctctaactaaattcagttcaaacataactacatcaaggcaaagtcagactgtcaaaaataaagacaaagagaaaatcgtaaaagcagaaagagaaaagaagcaaatcacatataacagagttccagtaaggctagcagcaaagttctcaacaggttccatacaggccaggaaagagcaggttaatatattcaaaatgctgaagaaaaaaactacaaaataaggatactgcattcaccaaagctgtgcctcagaaatggagatatcaagtttttaccaaataaacaaaagctgaggaagttcattaaccccagacctgtcttacaagaaatgctaaagggagtctgcaagatgaaaaaagatgctaattagtaacaaaaaagaaaacataaaactcactagttaaagtaagtacatagtcaaattcataatattcaaatacgttaatggtggccacatatatctgtaatatgaaagaatgaatctcttatatctttagcatgaaggttaaaagacaaaactattgaaaataatagctacaataattttttaagggatatatgctataaaaagatatacattgtgacataaaaaaattttaaatgcagggagatgtggagtaaaggcacagagtttttatgcaatcaaaattaagttgttatcagcataaaatagcccgatataattatgagactttttgtaagcatcatggtaaccacaaagcaaaagcataaggtaga

SEQ ID NO: 5651 - DNA, 33175 bp, Homo sapiens
gggaaaagcaagagatcagattgttactgtctgtgtagaaagaagtagacataggagactccattttgttctgtactaagaaaaattcttctgccttgagattctgttaatctatgaccttacccccaaccccctgctctctgaaayacgtgctgtgtcaaactcagggttaaatggattaagggttgtgcaagatgtgctttgttaaacagatgcttgaaggcagcatgctcgttaagagtcatcaccactccctaatctcaagtacccagggacacaaacactgcggaaggccgcagggacctctgcctaggaaagccaggtattgtccaaggtttctccccatgtgatagactgaaatatggcctcgtgggaagggaaagacctgaccgtcccccagcctgacacccgtaaagggtctgtgctgaggaggattagtataagaggaaggcatgcctcttgcacttgagacaagaggaaagcatctgtctcctgcctgtccctgggcaatgcactgtctcggtataaaacccgattgtacgttccatctactgagttagggaaaaaccgccttagggctggaggtgggacatgcgggcagcaatactgctttgtaaagcattgagatgtttatgtgtatgcatatctaaaagcacagcacttgattctttactttgtctatgatgcaaagacctttgttcacatgtttgtctgctaatcctctccccactattgtcttgtgaccctgacacatccccctctcagagaaacacccacgaatgatcaataaatactaagggaactcagaggctggcgggatcctccatatgctgaacgctggttccctgggtccccttatttctttctctatactttgtgtctttttcttttccaagtctctcgttccacctaacaagaaacacccacaggtgaggaggggcaacccaccccttcataacttaataggcaaagcattatccaaacagactgttcacagaaaagaaaaatattaatgactcaaattcacaaaaatatgctcaatctcactaacaaaatgcatggacaagacaattcgatgcaacactgtaatcataaaagataatcaccctctaggagcgagttaagtaaaatccatgcaatagtattccatacagttactgaaatgaatgaaataatgctttataatgatgaagataatagttaacatttactgagcacttagtatatgccaggcctgtcttaacggtttatagataaagcttatgtctcaattctattattttttctatatttttttttagctgcagaaactaacacagaaaggttaagtaacttgaaaaagattaaaactagtaagtaatggagccatggtttaagtcccagtgtctggctccagagtcaatgctcttaactaccatgaagaatctccaagatgtatttttaagtgcgtgcttggggtggttgagggtggtggtgaagaaagatgcggaagtgtttatcgtatgctaagatttattgtttttaacagtttttgcttatatgcatagacaatctttagaaggacacacaagaaactgtactccctttggattttataacatacgtatatgttaccctttaaaaagtcaagtttaagttaaagaaaacacacccaaatcattagattctcactaggattctcaatgtgaaatagaagaggcattagatttggaaatatggagtctactcctggttttcctggtggctctagtaaaaaatcacaatctctttttttttttttgagacggagtctcagtctgttgcccaggctggagtgcagtggcgcgatctcggctcactgcaagctccgcctcccaggttcacgccactctcctgtctcagcctccctagtagctgggactacaggtgcctgccaccacgcctggctaatttttttgtgtatttttagtagagacggggtttcaccgtgttagccaggatggtcttgatctcctgacctcgtgatccgcccgcctcgacctcccaaagtgctgggattacaaacgtgagccaccgcgcccggccaaaaatcacaatctgttaaaccaggagtcaacaatctttttccacaaagtgccagatagtaaatattttaggctttctaggtccaatagcttctgttgaaactgttcgactcagccattgtagtgctagaacagccaggtgatgcgtaaacaaatgagagtaggtacagctaggttctaagaacctgggcaacgaaatttgattttcatttaattttcccaagccacaaaatattcttttgattttttttttaacttaaaaaaagtaaaaacaagtttttagctcacaatctacctttggcccacgggccgtagtttgctgacacttgaaccatttgttcaatgaagggcccgattcattatgtcaaaggtcatttcctactataatattctgaaattctctacttttaatattgcgagtaaggcagacagagaaaaaatgaggaaatacatctttagttatttttaatgatccaaatattaaatcaaagtaatgcgttggggccgagtgcagtggctcacgtctgtaatcccagcaccttgggaggctgaatcaggcagatctctcgagctcaagagctcgagaccagcctgggcagcagcaaaaccccatctctacaaaaaataccagaaaaaaaaaaaaagaaaaagaaaaaaattagccggccatggtagtgtgtgcctgcagtcccagatgctcaggaagctgagatgggagaatcgtttgagcctgggaggcagaggttgcagccagctgatactgtaccactgcactccagcctgggtgatagagccagagcttgtctcaaacaaaacaaaacaaattagctgggagtaatggcatgcgcctctagtcccagccactcaggaggctgaggtgggaagattgctggagcccagggaagtcaaggatgcagtaagcagatatcataccactgcattctagcctgggcaacagacccagaccctgtctcaaaaacaaagaaaaaagaaagtaataggttgggtgtttcaaaagatttttagccttaagatccagattatttaaaaagtgaactgcctactccctttcttggactccctcctctatgagtaaaaatgtattacagcaactgtaacacatcattatccccattccactttccactatgaaacttaagacttttgatgacagggataacatctactttatctttgtaactcctgcctctaacgcaatgcctagcaagtgatacaggtatgatgcttgttcaataaataaataatacatcacacagtaatgatttccaatttactcttacaactttacatagtacttaagaagtccttaagaaattctaaaaaatcctcaccaagcagataagcagcagataaacctgataaacacttacatgctgtagtatagtggtaataacctagygtcctggctctgaggtcagttaaaacatatgtaaatcttagctctggcacttactaatcatgtctccctaaacctcaatttctttgatcctgtaaaatgggggaaattataactgcttcatgatgtaattttaaggattaaatgagaaaaaacatataaagcaagtagcataattcctggcaaatgtaagtgttcattaaacaaccacctttataacaaagtatctcaagtcatactagactcctaactggtctttcttcaagtcctgctccctcaaaaatttaatcttccaaaaagcagctaaaatgatttttttttttttgagacagaattttgctctgtcgcccaggcgctcagctcactgcaacctccgcctcctgggttcaagtgattctcrtgcctcagccactggagtagctgggattacaggcgtgcaccaccacgcccctctaatttttatatttttagtagagacggggtttcaccatgttggccaggttggtctcaaactcctgacctcagatgatccgccttcttcggctggctccctaaagtgctgggattacaggcatgagacaatgcgcccagccagaatgatcttgaaaaaccaattcgggctcaagctttaaatcctctcgtagtttcccactataatgaaaagaaagtctaaagtgctcatcttgacttacaaagctaatcatctgtcgcctccttacccctccatgttcatcttgggccattcatcctctgcccattgagcttcagatccacaagcccttcagttcctcaccccagcagtttcctttgctaggactgctctttctggcagatgactaggcttcttcctctttcagatctcaccttcttaaatgtcacctcagacaggcaggtatcctgtccgctactgtaacatcctctttaaatagcccccatcacacctatttgttgtttgttccagcccctccgcgaaccctgcctctacccgccgcatggcagctacctgggagagtgcctggagttgaatgaatgaaaatagtctgtagggtgcactgcccttgtcaatcacaagcagatttaattacctgtgccagaactcacgggagggaaacaccgtccgccagccccgctctttcctggctacagataaaagctccaggttccgggggttccggttggtgaattctggggcgacagcttcattttccacagggtccacttcaggtttcgctgccggctcggagctggttgacagggctgcgaacctgcaccctgggcaacgggaaaaaccgcacagggcttaaaaatgacggatatggacagcgcacgaacccgctctaacgtctatccgcttttacacccccaatctttaggcccgaggggacgaaaaatacgtatgcccacagggtggagtcagcactgaccccgtccttaacttcctactgtggtcttcgcagtgccgcgagctctatttcgatccggcacgtcgaatacaaaatagaacccgcacgttccaatgtactgtgcaagcccaggcgagtgagctgggagaaggggggcaagactaattaccagggttcctgcaaaccgagaacccccaaaactgcgaccgaagcgccatcgctgagacgatctcggaaaagcctcgcctctttttcctcacggacgactcagtcgctcgccaggcgcagccatataaagtcagggacaagcctttggctgctgtagatccccaaactctccacgccagacgccgccgacccggaagtagcaagtcccctgccactgagtggccaagaaggcgatctgttatcctgcaycgccaatcatcgctcacgtcgaggggcacgcaggccctggagcccaccaaccacctcgtagctacgcccaagaccacgcttgttgcttaagtccggggtcaaaggcacacaccccacaaaaccatgtttgggttttctactcggagagcttgggcggtcattgactggtccacacacaccccacctgggcaccgcgtaggaataaggcagggcaagatgcagttttctccttaaaaagggtggttgtcttcctcgaaccaaaaattttcccgtatggcccgctggaaaaactgccccgtcccacccaggttcgcgcccttaaacttacactcctgaggcctggagcaaagccggccgatctgcctcacgctccccgagcagggacaaggaaaagacactaaacctaaaacgcacgactcgctcagaaccccaactctaacttggagaagggcccgcccctccagttacaccccagctccaagctccacccttcttacaaccttttctagaaggcactagaatggcccactgcgtctgcgcaacatcgtttgaggcgaaggttcaacctcttcccagcggtccaacatccgacttccgttctccgctttcgcgcccttcccatcggctatctaattggacaaaaatgccgaccccgccccttccccggagcctcacttccgtcacagtcctgtttctctccctgttgtccctgcctctttttccttcccgccgtgccccgcggccgggccggggcagccgggaagcgggtggggtggtgtgttacccagtakctcctgggacatcgctcgggtacgctccacrycgtcgcagccactgctgtggtcgccggtcgsccgaggggccgcgatactggttgcccgcggtgtaagcagaattcgacgtgtatcgctgccgtcaagatggaggggcctttgtccgtgttcggtgaccgcagcactggggaaacgatccgctcccaaaacggtaagggcgggccgggcctgggtcgggtttgcggccggggagggccgagtcccaccgcgaccggaccccggctgccctcgtttctctcctttacctccgcagaaagggcctcggggccccgcagccggacccagcccacccgccgttctctggggcagggcgctgtggccccacttttcccacagcgaggaggagccccgccgcgcgcggcagggttttgagaccggcaacgcgtggatgtggtgtccggkgcggcgttggaaacgcgccctccgcgggaaagcgggcctcccgggctcgcacgtgcgggccacgcctcgcacccccttttgtttcagggcgaccccctgagtgtccatgttaaacgccaggtttyattttaggaccatttaccagaaaaagagtaggtccatccgcgcgccctcggatgagcccggtgccctgtccgcccgcagctgcagtcgaggtcgggcgtccggcgtccagccgtatccgggttgacagcttcttacagtagagttagcccaggaaacgccactcgagtgcattgaccccaggagacggcagcgctaacttagcagagcgtttgctgtcaggcctttggatacctacagagcttactgtttcttgatagaytcctaatttttttcgtaaacaaatctgaaagtcaccaccttccccgttgactaccgatttctctcctcacagataaagagagttttaatgagcaaaaaacttgcagaatctgaaggaaaaggctggtatagctgtacgaagtggcagagcrtgaaattggtggttattactttttttttttttccccgccatcagattccaccccgcatcaaagctgtgccaaataggctcgctttgtttagggacagggtcccacctgtcgcccagacgagagtgccatcatagctcactgcattctccaagcacaggtccgcgccgccgcatccggctttgtttttattttttgtagaaatgggtttcgctatgttgcccaaaggggtctcaaactcctggcatcaagcgatcctcctgcctcggcctcgcagtgttgggattacacctgtgagccacagtgtctggccccatttacactcttagtaggtggtttttaaataattaacacagatttgtagatttgggaaatacgggggctgttggatgtcatttacctttaggctgaaattactgtctttcagagttgtggcttatcctcatttcttttttatttttaattgattgtctacagttatggctgcagcttcgattgccaatattgtaaaaagttctcttggtccagttggcttggataaaatgttggtggatgatattggtgtaagtacacataactgttgtgttagtttccttaaagtaaaactatcttcagtgttttgctatgttctttctttgactttatcagaatccacgtactggaaggtgatattaaaggtgaacgtgtattataatggggctgtgttgatttctataagtggttcatattttttcctgcgaatttcttaggatgtaaccattactaacgatggtgcaaccatcctgaagttactggaggtagaacatcctgcagctaaagttctttgtgagctggctgatctgcaagacaaagaagttggagatggaactacttcagtggtaggtagactggctaaagaatgatcatttttctaaaaaygaccgactttcagaaagttgaagccataagtgggtcatttgtgctgtgtcagaaataagttacatattctgaatgcccagaagattgagcaagaagaaaaaacaaaagaagttacacatttaagaggggaaataagcttcttaggtacagattcagaaacaaaatttgtaagttgatagttacagctagtttgtacagtttaagtaggaaagaatttgagttcatttgacatagccccattgttttaaatgttggtattcacaagttttgagggcttatttttccttttatggcagtattcagacatcacacagatttttttatggtctctcaaaagtcttgtttcctcccccatcaccccttgagacttggaaagctctcaacttttctgattatttggaggataaaatgttaccaatctgggggagaaacaatgtttttatattattatttttaagagaccatctgtagcacagtctgaagtgctgcagtgctgtcatatctcactgcagcctggaactcctgggttcaagcaatcctcctgccttagcctcccagagtgcttgggattgcaggcatgtgccaccacaagcaactaattaaaaacctcttttttttttttttaagagacagggtctcgctatgttgcccaggctggtcttgaactcctggcctcaagtgatcctcccttctcggcctctgtagtgctgggattacacgcatgagctgcactcagcctgttctattttttaaatcctgacaggtaatctcaggaattcaaaatgggagtgtgagaaattaataaatacatcatgatatgacagtgtgatcttaccgagtcagtaaatgtgatacacagtataaactcttcatagatcatccagcatgcyggtatagtagaaacactattgtttggtgagaaagatgttaattctggagaaactagatagtttgtggggaaaatgtatttctagattaaactttagccatgaaagaatggaatctactcctaaaatatgaatatgatctttgtctaacttacgataatgtgatttaacaaatgtagttttccttccataagaagctgacagtctttttgctttaaaaatatttcttagtgttttatcaacttgaagaactatcttttttaaataaaataatagcytaatataggtcatatgaatagtcacactcggtttagcttctgttgagcattttttctaaaggtaatagatgtgttgtcttttacggttgtattgatgaactagtttcttattgctgaactagtttcttagaacatttttctggctcctacccagttttggccatttgcatttataatacaataagacctcactgaacatccacagtggcttcatggaaactgactttaagaggaaagatgatgtataaaaaaacaagttttcctccccccatcagcgttacaataaacaactgtatttgagaaattgctgtccattgttttgcttaaagtggcagtttccaagaatttatgagtaacgtggaggacttggagtgttttgtagcgttcttctcccttcacgcccaggtttctaataaccagttaattcatttcatcactaccattttggttaataatatatggccattttagtgtcattccatatgtattgcacatgttgaatatccggcacactcagaccrgtgaatgttttctcaacaggttattattgcagcagaactcctaaaaaatgcagatgaattagtcaaacagaaaattcatcccacatcagttattagtggctatcgacttgcttgcaagtaagattgtttgcattcagagaaattttttttgatgtaatagttgtaaactgtgttgtcttaacgttttgattaataactaaattttaatttgaaaaccttcaatttaaatgttttagcatttaagtagtaatatttgaagttaaaaacttggaccagtatcttttttctcatttgactaccacattttctcctaataatagattttagtggctrtgcttatgggatagattaaacttgccatgatctgaagagggagggttttttcatgtcctcctcctatatgaaatggctgaacggrtattattacttacgacattttggctctgtgttaagcatgatgaatgcaaagagtttgagtagtgactttataagcgtttttctcccccacacttttaaacagggaagcagtgcgttatatcaatgaaaacctaattgttaacacagatgaactgggaagagattgcctgattaatgctgctaagacatccatgtcttccaaaatcattggaatgtatccttgtggttgtcagataaaatttagactttttaaagcataagactttgagatgggcatggtggtatgtgcctgtagtcccagctactaaggaggctgaggtaggagtattaattgaacccaggagtgcyagtccaatgtgggcaacatagcaagaccctgtctcgggagtgggtgcgtgtgtgcgcatgtgttgcgcgcacgcgtgcgtagtagcagcagtatcaattttgtgcaataaaattttgaataaccaattttatgcaaattgatatcaatagrgaggagtaatgctgtatkgaaattacytgttgccttccctgcttttttagggtgaaaaggtaataaaaagcatgtctaaaagtgatatgaattgcagatagtgataatgttgtaacattttggtgacaagtaatgcttgctkctttaatagattagattactaaaaggaagtcccttgaaattacccttgatttttcacgtgtgtaccctttgtccattccaaacctgttactgtccttaacttttggcgtagaaatggtgatttctttgctaacatggtagtagatgctgtacttgctattaaatacacagacataagaggccagccacgctatccagtcaactctgttaatattttgaaagcccatgggagaagtcaaatggagagtatgctcatcagtggctatgcactcaactgtgtggtgggatcccagggtaaggtttgggatttggtttatagaatgagattgctacagattaaaactagcttttcttttggctgggcgcggtggctcatgcctgtaatcccagcactttgggaggctgagtcaggtggatcacgagggcaggagtttgagagcagcctgtccaatatggtgaaacctcatctctactaaaaaatacaaaaattagctgggcatggtggcacctgcctgtagtcccagctacttgggaggctgaggaaggagaatcactggaacctgggaggcggagattgcagtgagccaagatcacaccactgcactccagcctgggctacagagtgagactccgtctcaaaaaaaaaaaaaaataaaaaatgtttttttgtggattatgtgcagtacatctttttgtaatttaaagcacatacaacatggtagaaggaatgtgaattaaaagaaattacgtgcatttaatgccataaaatttttctaagataaaatgcaatgaattagtctaaatttgtgtgtttacatacaatcgattataggtactctttattatgcttttaaggatagacgtattaacttaatcttatgttcaattgtaggcatgcccaagagaatcgtaaatgcaaaaattgcttgccttgacttcagcctgcaaaaaacaaaaatgaagcttggtgtacaggtggtcattacagaccctgaaaaactggaccaaattagacagaggtatgttgagagattatttttggccttttaagtgtgagtgtcttggaggactttaacatttttagccaagtcaaactattttacttccagaaaaattagcctggtggtgtttttagagggatttggggttatacaacctatatgaaaatcggcctttttgtggaattttgattgtatgagtctattaatattaaagatgtaaaagacaggaatctaatttcctcaaagcagtacagaactcagcagtatagtattgactgtaacctactgtttgctagatactggaggtgcaggtgatattagtggttggcatgccagaagagctaatggtggaggtagtgtgaccattgctatagatttgactgcctgacagtcacttaaaacaataaattgtttaggctgggcacagtggctcatgcctgtaatcgcaacactttgagaggctgaggtggcaagaatctgaagcccaggaggttgaggctgcagtgagctgtgattgtaccactgcactccaacctgggtgacagcgagaccctgtctcaaaaaaaaaaaaaaaaaaaaaatagtttaaacagtagttaaaccagacctacaagaaagctttgccaagagtaagaaatgtgytgtcatcttttaaatcagtctgcacgggtrttcttttttccttccttcctcatacaacaaagtgtcctttcttccatcaaagccagtccctctacagtaagtgttctagagtctgtttccttctgctctagagccttttctttgattcttgtttcatacttgcatcttcaactaattatgctctttcctggattcttcctgtggctcttttgtccttcaagcttcttcrtacatccttgtgctataggtactccctatcgtacatctttacaggcagatgtcatgagtggtttactacacaaaacttctctggtgcttttcttctcatcccttttcagccctgttctccatttgagggactgcatgttaaggtctctagcgtgaaattcggaagacattttcagccttcctcttacttgacctttagcaaccctttgattatgtccttcttgaaatgctttcggggatggaaggctttgtgatgctgctttgtctggaccatgtcataatactctccaggatagccyctttgttcccatgacttcatgtattatctctctatgccagagactctttcagctgtttctctaagctccaaacacacatacctctatctagtagaatgcttttcaagcatctcaaagtgaacatgtctaaaactgaacttgtgataataccgcaaatctgcttttgaccattttagtgatggggagtccttcacacaggcagaaaactaggaaatgtccttaactcctcctttttaccaacactttttctcctaatctgtcaccaagaccgcttgatttctacctccaaattaaatttacctacttttcattttcttgcctagactgttgtagaaacacacccaagctagtctcttagagaagcttttctttcttcttcaatctaaattatattctgttgtaacttcctgtattttttcttcctggggcttattacagtttttaccatgagtttatataacagtgtgtagcacacagtacttgtttagtagacaagctgcttttgaggttgatctgtaattcattttactttaaaaattcttcgaatgatctattcacatggcttcactcatattgactcttcaaatctggatctcccatagtttatggtttccatgatgtaagtgactgcctcctgggagcttcacctgagtaacagcagagacttcaaacttaatcttgtcctcaactaaactctcatttcccatcctgcccccaaaactcttgttatttattttactccaggagtcacccaagccataaaatttgacttttctgtttaggttgtctttcagcttatatctcatgttattatcttcttgtcttcagccattcagtgcagtttccacattgataatcagggaatccttttgaaaacacagatgatatactagtcttgcttagagatattaagcttagtatctagattgtttggtgtaacctgcaaggtttttcacttttctggttctrccttcttttgtgctttcaactctggactcctgtttttgtttgtttgtttgtttttgagacggagttttgctcttgttgcccaggctggagtgcagtggcacggtctcggctcactgcgacctccgccttccgggtttaagtgatactcctgcctcagtctcctgagtatctgggattacaggcgcccaccaccaggcccarctaattttttstatttttagtagaggcggtttcaccgtgttggccaggttggtctcgaactcctgacctcaggtgatctgcccgcctcagcctcccaaagtgctgggattacaggcgtgagccactgcacttggcctggactcatcttcattgtccacctcctaggctaaatttatgtcttttatgtgcttgtaatctctgcataccactttartgacacttgccctggagtgtgattggtaatccctctccccactagatccttgaaggcaggacctgtgttccctgtttaaccatagttctcaattagtaattcaaatttgggttggggagagctaagtggtaatttttaattccttcaaattttccatgaattsgactaatttaaattctggtcagagataacaaaggataatacaatttgatctrtgattatcttgtgataaatacttaatggaagttaaattatttttaaaaatcacagaaggtaaytcaggttacaaaaatactttgcagagaatcagatatcaccaaggagagaattcagaagatcctggcaactggtgccaatgttattctaaccactggtggaattgatgatatgtgtctgaagtattttgtggaggctggtgctatggcagttagaagagttttaaaaagggaccttaaacgcattgccaaagcttctggaggtatgtcttgtgctggctgtcacataaaatacttttattatccctgatcctatcaaaggtctttttacattrgaatattgacagaaaacagctcaaaaacatttatattctcttaatgctttgtgctaccaacacatttatagagccatttttcatgtaactggagaaattttgttggaaatttgtgaactgaatttgttcatttctaaaatgacagttccatcttaggataaaaggagttaccgtgtgctgcctaactaaattctaaacttgtaatatagcacttttaycacaaatgctactgagtccaaggatattaaaatcatgaaagagcaatattcacagatcctttgtaactctcttattagcaactattctgtcaaccctggccaatttggaaggtgaagaaacttttgaagctgcaatgttgggacaggcagaagaagtggtacaggagagaatttgtgatgatgagctgatcttaatcaaaaagtaagagccactttctaaaattgtaaagttataccgattttgttaagtaaaagtaggttttcttcccatttatttgctgcttgtagtctcacagtgatacgagcagttatacgcatgggataaaataacattgggccactgtaaattgagatgaagtaaccattttcatctcttctgcakggactagacattgtttctgtatagtatatctaaatatcctgtgtaggcaggacttaagggaactttatgtagacttattttattaaaatgccattttttttgagaaattgatggtcttggcaaaaaaaaatttttaaaaatgctattacaagaattgtacttttgttttgaacagtactaaggctcgtacgtctgcatcgattatcttacgtggggcaaatgatttcatgtgtgatgagatggagcgctctttacatgatgcactttgtgtagtgaagagagttttggagtcaaaatctgtggttcccggtgggggtgctgtagaagcagccctttccatataccttgaaaactatgcaaccagcatggtaagaacagtcatttcttgtcttagaggcctgagagcagtagctgtggacttcaattttttttttcccttttgtgaagtcacctaattttcttcttttcctaggggtctcgggaacagcttgcgattgcagagtttgcaagatcacttcttgttattcccaatacactagcagttaatgctgcccaggactccacagatctggttgcaaaattaagagcttttcataatgaggcccaggttaacccagaacgtaaaaatctaaaatggtaagcatggtttcccgctctttgttaacctctgcagaacaggttgcattaaaaaggatagtagtcaattacatgtcagcaaacataagtaacagacttgtcaaatacttaacatgaaaaacttcacagcaagcatttgttgttcagtcactgtaattcaagggataatgactaattattagcactggtgtgtcttcgttaactgtgattgctaatctctccctgcttcttttggtagaaagactacctacaagatctctagtctgatttaaaaatcaaccttaatacttgaatgaaatgctggagttaataggccacctaatgaaattgtaagcggccgttaaataattctttcttaattgcaggattggtcttgatttgagcaatggtaaacctcgagacaacaaacaagcaggggtgtttgaaccaaccatagttaaagttaagagtttgaaatttgcaacagaagctgcaatcmccattcttcgaattgatgatcttattaaattacatccagaaagtaaagatgataaacatggaagttatgaagatgctgttcactctggagcccttwwtgattgatctgatgttccttttatttataacaatgttaratgcaattgtcttgtaccktgagttgagtattacacattaaagtaaagtacaagctgtaaacttgggtttttgtgatgtaggaaatggtttccatctgtactttggtcctctgatttcacatattgcaacctagtactttattagtttaaaaagaaattgaggttgttcaaagtttaagcaattcattctctctgaacacacattgctattcccatcccacccccaatgcacagggctgcaacaccacgayttctgcccattctctccagtgtgtgtaacagggtcacaagaattcgacagccagatgctccaagagggtggcccaaggctatagcccctccttcaatattgacctarcgggggagaaaagatttagattgtttattcttctgtggacacagtttaaaatcttaaacttgtctttttcctcttaatgtatcagcatgctaccctttcaaactcaaattttcattttaactgcttaggaataaatttacacctttgtgaaaattcatccctgcctatcttacctcgttccttttatgccaagtaagccaatgtctttttttttttttttttttttttaccttgggaagtaatgaactcagtcctagtaactagtatttctttaactattacccacatggccaacacctagaagatactatcttaaaattggattgtgaaattcactggtaagctctcagggttacttgtgcatctttaccttctctgggtttaatccaagttctttaactattgcagcagagacagctgcaaaggcttcattgatttcaaatatgtcaacatcttccagtgaccaacctgcttttgtaacctagaggaaagattcatagaaaagaggtctaaacttgggtggaaaggctaaagttaaaccattctttgtcaacataaatatatgctgcatgatactggtaactgctastttggtttgttcttaggttaatacagtgacattctcacacatttttgccttagtgacatccattccatccaaaaggttaagggtgtgatctaaaagatcccttagaaattctaaattgtcttaaaattttgaaccagtagcatctgttaygtgtacctaaggctaatgtaacagaatcagttcccctagaaagcatgtgatccaaatgctctcagtggctgggggtagtggctcacacctgaaatctcaacacttggggagcctaaggcaagaggatcaattgaactcaggagttcaaaaccagcctgggcgacatagaccttgtctctacgaaatgaagaaggcktggtgcacctgtagttcgaggtaatgggaggctaaggcaggaggaatatttgagcctaggagttttgaggctgcagtgagctatgatggtgccactgcactccagcctggacaacagagcaagaccttatctcaaaaatagaaataaatgctcttggttactcttctggtagggaaagactagagctaactacatgaataagctcacttaaggctaacaggaagacaaatttcataaaagggaatarggttatactcacagcttgctttatggctggaattggtcctattcccataatggaaggctccacacccacttgggaccaggaaactatccgtgctaaaggtgtaagyccacgtttatcagcttctgacttcttcataagaacracagctgcagcaccatcatttattcctgtaaaatatgagtgacttaatttctaccatgcttattaacctcagttacatatctgtggcttctttaccacctgaagacatgagttaaatgattttacctgttggctaaggcatttactataattcaacagactttacatagaaattatgtttggcaatatattgaccacaaaactttccaactagagaaagtggtaggattacagtagtcggggctgggcgtggtggctcacgcctgtaatcccagcactttgggaggtggaggagggtgaatcacctgaggtcaggagtttgagaccagcctgaccaatagggtgaaagccatctctacttaaaatagaaaaatcagccggtgtggtggtgtgcgcctgtagtcccagccactcaggaggctgagacaggagaattgcttgaacctgggaggcggagattgcagtgagccaagatygcaccactgcactccagcctgggcgacagagtgaggctccgtctcaaaaagaaaaaaaaaggattacagcagttggggaggggagatctctgacaggaaatggaagaataagcctgggcttcacaaggaggtattgggagtttctggtactggaaaaatacaaaggtagataaactgaagttccctaatttacttcttcatttgtatgtctagttgggatgtcaagaaaccaaattaattctttcagtataggttaagtcaatgatcaaatacagagaaatgacatgtttccttmaactgttttaagrataattttgtacataaatattgagttgggtgtggtggctcatgcctgtagtcccccagctacttgggaggttaaggcagggggctcacttgagcccaggagtttgaggctgcaagtgagcaatgatcatattgctgcacacgaacctggctggcagagtgagtccctgtcccaaaaaatagtacttttgtatataaataaagagaaaaatattcactcggtagacattatagaacatagtattcccccagatgtccttcagaaaatctaacctgaagcattggctggggtgactgttcccgttccatcagtaagaaagtaaggctttagcttggacatggcttctatgttgctcccatggcgaggaaactcatctgttttaacttcaataagacctaagcaaaggaaaaccaattactcaagattagtccagagacagaagtaagtgtgctgggaatggtgggttctctgccattaaacatgaggattcatatttagcagaaaagttttaatatgtgaccactttgatgacaacaggaggaaagtacacacaagaattattgtacatgaaaacaatttatgagtatgtccttatgagacacctgtgttttccaaatccataggccttcctgaggaaagtagctaccagggacctgtttgtgccaaattctgctatagtttgggtcatagtacttggctggttacgagtgagtggatcaggcagtctcaragccaatcgtgcactgctggcakgacataagagatatcagttatcaataagggagcttgacgggagcattctgtattagaaaatagcgagtgaccccaaaagatccaccctttagaaatgtgaaatggagatcacacagaaacagcgagaagtaatgggtgtccacttctgaggaggttgagcctatacaggaaacaggtcagctggtgcctcctaacaaccatgagccagtgctccagcttctcatgaaacctgctgtgtgtgcacagtggtcatggacgctctggaaccaagagtgcttgagtgctgacataggtcccatgttaccgtgtccygtaaacccagcataccccctccccacattcatgtatccaggacatatayttgcaacctgaaaaacataactaagatataatttctaaagattcctatgtattactcttttagatgttactcttacctataaataggttgatgtttaaaccactatgatatactcacctyttctagttgacaccaaaactggtacaatctctttgtcaaaatggccagctttctgtgcattctctgtcctgttctgggacagaactgcaaccttgtcctgatcttctctactcacttgccattttttggctacattttcagctgggaaaggagaaaaacagcaaaaaactaacattttcatgaactggcatttgatagctcaagtcgtccacatttgaccaagcactgactgaccacatatgctagcaggctcatggtggcctgtgcaatgctctgtgtggggtggccctgcctgccactggcagttggtttggaaatgttgcagtgactctcaggagtcatacttctctccttccctttctatataattgtaaacttacagaaatttccttcacccagagtcaccatttatattttccctccatttgctttaatattttctttctgaaccatctgagagaaagttggagatacaatgccttcttactcttaaattttaatttcagtgtatacttccccaaaacaaggccactttcttacataagcacagttataaaactcaagaaattgggccaagtgtggcggctcacacctgtaatcccagcattttgggaggccgaggtgggaggatcacttgagcccaggagtttgagaccagcctgggcacagcgagaccctgtctccattaaaaataaatttagccgggcatggtgtgtgtgccatgtagctagtagtcctagctgcttgggaggctgaggcagaaggatcacttgagcctargagttcaaggctgcagtgagccatgattgtgcctctgcactccagcctgggtgaccctgtctcacaaaacaaaacaaaaatcaggaaatttaacatgaatcaaacactattatctaatccttggtccacattcaaayttcacctatatttcagtaatgtccttctagctcctttatttgagccaataaagaagcatgcattgtacaactatcaatctctctagtttgcttttgtctgtaacagttcttcagactatgcttcttaagcttgatatttttgaagaacatgggcgagttcttttgttaagggtcatcaattttgatttgtctgatgtttcctcagaattagattaagattctgccaaaaggcaggtataccactgaatgatagtatgatttttctcagtgagtcttattaggacacaaatgacaatcagtttatcccaggtgatgttatctttgatcacttggttaaaatggtttggtattcaccaggtttctagcttttaaaggtaccattttttcatttataagtaatcaataatttatcagaggttctttttggattatccaaatatcttcttccccatcatattttcacccactagttttagcattcattcatgactttctaactccaacattccttctattggtaagatattaattggcattttaccayaaagaaaaccttttccttttctcccatttattcagttatttatatcaggatggactcatacattttcattttattgaataagttataactcattactytcattacttactttgatgctgaaatttttcaatacttgggcagttataacccattactatcattacttatttgcacgctgaaattgttcaaaatttaggcagttacaacccattactatcataacttatttgcacgctgaaattgttcaaaatttgggcagttacaacccattactatcattactgactctgatgctcaaattgttcaaaattccactacaggaaagtggaagccccgtaggctgcctcctgtgtgctttcaacatgtccctgagcatgtccttaattttttagcattttttccctagccttggaaagggccatttctccaaacaaccttagttccttttagtggataaatgtatttagaagatctgggtgtcaggactgcttgttgttactggtttgtcattgtttctaggtctgttcagtagaaacttccatatgtattatttataattttacatatacacacacactcatggtaacaccttgagttcatactgcattttgagttctccaaaatgcaacctaacaccacaagctacattcttctccctttccgtatttgtaactctcttctacaaatgtgagaattggccaggtttggtgggtcacacctgtaatcccagcactttgggaggctgaggtgggaggatcccttgagctcaggagtttgaggccagcctgggcaacatggtgaaaccccatttctacaaaaaatacaaaaaattagccaggcatggtggtgagtacctgtggtcccagctactcaggaggctgaggtgggggttgcagtgagccaagattgagccactgcactccaatctgggtgccagagtgagacccgtctccacacacacacacaaaaaagttattgctttgctttctatgtcttgtctttacttatcaagctgtttttctttctttttttttttttttgttggatgatgtctcactatgttgaccaggctggagtgcagcagctactaacaggcaaaatcaaccatagtatactatacaacctcaaactgctggcctcaagtgatcctcccaccacagcctccctrgtagctgggactataggcacctgccactgcaccctgtaaaagctattctcttatatatacttctagaagctttacattttttgcttttatttttaaatccatgatttatctcaaattagcttttatatagggtgtgaggtagggatctaggttcatctttcccatgtgagtaatctgttattccagcaccatttgttgaaaagactttaatttctccatttcattccattgatgcctttgttgaaaacgagcataagtctgggtctatttctgaactctgttctctttctctgtccttatgccaaaaccacattgtcttgtttacaacagctttataggtaatgttaaaatcagagcatgtaagtgctattttctgacttcaaaattgttttggctattctgagtgctttgcattttatacagtatttatttacactatttatttatttatttagagatggagtttcattcttgttgcccaggctggagtgcaatggtgcaatatctcagcttactgcaacctccgcctcttaggttcaagcaagtctcctcccttggcctccagagtagctgggactacaggcacctgctgcaacacctggctaattttttgtagttttagtagagatggggtttcaccgtgttagccaggatggtctcaatctcctgacctcatgatccgcccgcctcggcctcccaaagtgctaggattacaggcgtgagccaccgcgcccggctggaagctattcttttgttgttgttgttgttgttgtgtcactatgttaaccagactggaatgcagtagatactcacaggtgcaatcatagtagactatgatagcattgcccaggctagactcaaactcttggactcaagcaatctcttgcctcagctcttgagtaggtgggactacaggcacataccaccatgcctggctcctttagtatttcttgtagtgtaggtgtgcaggcaattcattttccttcatctaaaaatggctcttcactttcactcttgttttttttttttttgagacagagtctcactctgttgcccagactggagtgcagtggcatgatctttttttaactttttgctacaatttgctaaggtgtaatttttcccttgtctatcttggtctttgaacttcttttcacaccaaatgtggaaattttcttcagtttttttctgccccattctctctcttccttatgtatgagattcctattccatgcatgctagtcctatttattttgtcctgcagaccaccaaggctctgttcatttatattttatttttttgagacggagtttcattcttgttgctcaggctggagtgcaatggcgtgatctcagctcaacgcaacctccgcctcccaggttcaagcgattctcctgcctcagcctcccgagtagctgggattacaggcatgcgccaccagcctggctaattttgtatttttagtagagatggagtttctccatgttggtcatgtgggtctcaaactcccgacctcaggtgatctgcctgcrttgacctcccaaagtgctgggattacaggcatgagccaccacacctggcctattttttaatttaatttaatttaatttaattttttgagacagagttttgtttgttacccaggctggagcgcaatggtgtgatctcagcttgctgcaacctccacctcctgggttcaagctattcttctgcctcagcctcccaagtagttgggattacaggcatgggccaccacatccagctcatttttgtatttttagtagagacagggtttccccatgttggccaggctggtcttgaactcctgacctcagatgatctacccggcttggcctcccaaagtgctgggattacaagcgtgagctaccgtgcctggcctgttcatttattcttcattatttttctctgtgttcttcaggtcgtgtatatgatctatcttcaaacttcctgaccctttttcttctgtctccaagatgctgttaaggccattcagaatttttttttctttttttttagagatgaggtctaactatgttgctcagcctagtctcaaacccccagcctcaagtgatcctcccacctcagcctcccaaggtgctgggattacaggtgcgagccaccatgcccggccccatcccagtgaattcttaatttcagattgtgtactttgcaagttctagaatttctatttggttcttgtttatattttttccttttactcctgagatgtccacatctattcctctatgaagattatattttcctttgtatctttaaacatatgtaaaatagagcctttaagatcctcatctgataattctagtattgcagggtctgttgactgttgtggtttttttccaccctggttgtaagctatattttcctaattctttgtgtatctagaaagttctcattgcatgctgaacattatagttgctacataactggacatagagattttattatctttagagaatatattgagttttgtttccacaagcagtcaaaatactggcaaatcaccttgatccttttgaggcttgtttttaagcttattagtttgggtctagagtagcttttactctatggctttggccctacccctaaactgtggtctttctgagatgtcaatggagtgtccaaggagttcagtaaggtttccactcgcttgtccagaacttttatctcctagtaatctataaaatctccagttcacctctcctttgcagctcttttctactaggccttgtaagctgttatctacaagcttagtatttgatcaaagacttaaggggaaccttttgcagatttctggagctctttttttcttctcccccttattctgccccacaaactccagccatctcagaagccccaaattctctgcttcttcagatcactgagaccactgtttccagcttaggctctgcctctccataacacagtttgggaagtgccctgggtagagacagtgacagtggggttttcccttctctcaaggatctcagtcttacatgagtattagtcaaaacctgacatacataaaacagtggctttatatattttcacaagttttatgcttgtttatagtaggaaatctaatctttgtcaattactccatcatgacctgagccttttttcttttctttttttctaaagaagagcaatttattttcttacagttctggaggctggaagagtaccattcaatccacagtacaccttggaaagggctcgggatctgaatttttaatgaccacctctagttatggttgaggcagttggtcacacagtgtcttccattgtctgcctgtgtttttatagccttctctgttgtggctgtaagtcgagaagtggtcaagatgccttgagcttctcattgcttcccatatccctaagcccttccttccttcctagcattcatgcacacagttccctcttggaatcttgtacttttccccattacctttttcacatatttatgtgttacataaaaccagagccattgctgcatgcatttgagcaaggtgcttaacttctcagggtttgattctttaactctaaaatgtctattctgtttcttaagttttacatgtatactaaagacaagagtgcttttgatttcccagttgctttgccattaaacttagaccacaggacccttcagcatgaatgaccaataacccaattgtgtagtacaaaaagtacagctaggtaccaaaaaaacaactggtttatctctgtcactacctctgccacagaagcactatttgtgggccctgtttcttcatttggtaaaatgaggggttgatccagaagaactctgaggtacttcccacttctaacattctctgataatcaagagttcacaaagaagagaatacttacttcacttcagttaatcaaagaagagatataaaaatccttaagacagtctctggccataaggacgaaagcacctaagaagcagattagtatatkgtctttttaacctttttaaagctaatacagtttcagccatgtctgccttacctgtaatacccatatgacagttgtgaaatgcatctgtaagaccatcacagagtatactgtcagtcagtggcatctcacctatctttactcctgttctcaagtaagccaagtgaggagcctagaagtcagaaataaaaatggatttaggcttagttgcaattagtcttctccccagaatacaactcaaaactatctagtatttcctaagtcttcatctaggcccctttgcagcccttctccccagttctaggtcctcagccaggccaaggtctaaagacccctggaattagcagacttcatctttcctattgttgggaacgattactctcctacctacccattttcaattctccctcaaacctacccattctgtgtcctgtttccttaagaattccatttattctttccatcgaggcaattaattatctgttaaatgaagaaatcctctaagggcttaagtaaagctaacaatgtgttacctatttcaatggatgacataatgtctacagtgagaataatcaggctaactaaatgatggggagggatttctgagtagcggccagtcttaactctcaccaactcaacagcaggtatattagaatggaaagagtcattgattggacttagagtcggaagagttgtatttgaatgctggctctggtcctcagtttccttacctgtaaactgggaatggtatcatctaccctatatggggctgttgtgaacacatgtacaaaagcacctggtaaagtactacacagatgtcagtgtcatcccatcaaaatcactccgattatttttgttacctttagcctgcctcctcctgaacctcagcaatggctgggctgaatcagcttctatctagggaatctgcacctcagcccctgagctgcatcagtaggaagcagggggtatagtttttctttcaaccactatgccagtttgaggtatggaacttggtgaaacaaatcatgcctggcaaacctactggagaagggcaccacttggtggtcctcttttacatgttctataccctgaaaaggtcaaaaagtctggtccccaggatctccttgtcatgtgcaggaaggtaagtggcaacatctgttttttgccttttactcacaatgggaaagaaatttaaaaccaaggacatcaagcaactaatatgaatttaattcagaaaatattacatgcttcattaatagtttagaaaaagtatattcggttccaatcacactggttgataaacttcttatcaacccggatttcccacccaaactgaagaatacttcacattcaagtagggatcaaggttgtcatttctgtttatttgttcactgtttggttccagctctgctatgcatctgtttactctgttctggcatagacatgagtttctcagtgtgaggtcagtgaaagccacctcatcagagaggccttaccttgctcatattttccatgcctcctgcaaccacaatgctggagtctcctatccctattgactggactgcaaggcacacagcttttaggcctgacccacagatcatctggcagctccatgctggaacagagtagggaattcctgcacccacactggcttgtctaacaggattctgcccacagcctagaaagaggaacacagaggactcttagcaatcaaggagaaagacaaaatgtcacagtgaaagtgtgtggaaaattgccagttgggttacctgccacttctgaaagcctacaggtcaagtaagtgcccactggaggcaaaaaggcctgtatacactctccacctgtcacagtctagcccttgaatatatactgccttgtgctgctctgtaggtatttcatagatataagctttctcctccataaataagtcattaatacattaagaaagaagtgtcatcctcatcttttgatatggcttaaatagttgggcgcggtggctcatgcctgtaatcccagcactttgggaggccaaggagggcagatcacctgaggtcgggagtttgagaccagcctgaccaacatggagaaactctgtctgtactaaaaatacaaaattagctaggcgtggtggcgcatgagtgtaatcctagttactagggaggctgaggcaggagaattgcttgaacctgggaagcggaggttgcggtgagctgagatcacaccattacactccagcctgggcaacaagggcgaaactccgtctcaaaaaaaaaaaagtgcgggggggtgcttaaataagcattatcaaacctatgtctaataaacacaggatataacctaggcattatcagtgtttctaactagggccatttgctcccaagatcatggcttaagacacttgagaagaaaaagggttacttaaaaaggaaaacctttgataataagcagttctgttcttgcttagtattcattacactatgcttaaatggttatataacaaaatatatacaaactcagaattcacaaatacctttttttctcattctgagtactgaaacacaaatatcttttcataattcaactatgggacttcctttagttgggaagaaatacataatttacttaaagtagcacagaagagaatggagttaaaagtttcaaatattctcaatcgccattgtctgttatcagagtcaatggtaaatgtttataaagtggttactctattcccagtttcagatatactcaaacctaccacccttccttggagagtttgtggggaagaactagcaaataagtcgctgataaaaacttagagattatattcatcacaatgttatcaatctgggattaggctggaaactaaaaacgggtaaggttacttgagactgaaaacatatgcaggatcatatacatattaaaaagacaggcccagtgcggtgcctcaggctgtgagcagtggctcacacctgtaatcccagcactttgggaggccgggggggggggcgcattacttgaggtcaggagtttgagaccagcctggacaatatggtgaaaccccccctctctactaaaaatacaaaaattagctgggcatggtggtgcacgcctgtaatcccagctactcaggaggttgaggcaggagaattgcttgaacctgagacagaggttgcagtgagccgagattgtacggctgcactccaccagcctgggcgacagagtgagactccatctcaaaaaaaagaaaaagaagaaatgaggtacagggctgggcatggtggctcatgcctgtaatcccagcactttgggaggccgaggcgggtggataacttgaggtcagaagttcgagaccagcctggccaacatgttgaaaccccatctctactaaaaatacaaaaattagctgggcacagtggcaggcacctgtaatcccagtcacttgggaggctgaggcagaagaatcactggaacccgggaggcagaggttgcagtgagccaagattgcgtcactgcactccagcctgggcaacagagtgggactccatctcaaaaaaagaaaaagaaagaaatgaggtgctaacacaattaataatgctagcatttagcatactacgagcttcatgagaatgagaatttctatctgatatgaacattgcttatctccagctgctaaaatagtgcctggcacaaagtaggtgctcaataaacatttgttacatgattgtagaaggtatctggctcaaggaataggacagatctaagttcaagtgctagctccacttcaaactgtgaccctggtaagtcatttaacctcttaaactctcatttattcatttgtaaaatgaagataataggatataacagacttgtgaggaagattaaatgaggtaatgaaaggaaagcatttagcacagtgctttaaaagccttaaacttagtagacatgcaccggtagtcccagctagctcagaagttcaagggcatggtgcaccatgattgtgcctgtgaacagccattgcactcacgcccaggcaacagacagactccacttctacaaaaaaatttaaaaaattagccaggtgtggtggcctgctcctgtaatcccagctactccagaggctgaggtgggaggataccgtggagcccaggagtttgaggttatagtgggctacgattgattacaccactgcattccagcctggacaacagagtgagaccctgtctctttaaataataataataataattaattaattaattacgagtgttcaaacccaaagaatcagaagatgggggcactctcaggactcagctatattcctctggggagtgatatgccccatttgcaaggggcatgatgtggcacctattttccaagctcagaactgagccctaagagggcagggaacttacctgtattgttggaaccatactcccagcactaagcacagtatggggcacataggaggaactgaatacatttttgttgaatgagtgacactttgaggtagtaaggaggagcaggcatactttcctatgcgtcaggctggccctgctgctgcttcttcttcttctttttaaaaggagtctcactctgttgcccaggctgaatggagtgcagtggcacaatctcagctcactgcaagctccgcctcccgggttcacgccattctcctgtctcagcctcccaagtagctgggaatacaggcgcccgccaccacacccggctaattttttgtatttttagtagaaacggggtttcaccgtgtcagccaggatggtcttgatctcctgacctcatgatccgcccacctcggcctcccagagtgctgggattacaggcgtgagccaccgggcccggccggccctgcttcgtaagaatgaaaaggcagtgggccgcctgtagtcccagctactcgggaggctgaggcaggagaatggcgtgaaaccgggagacggagcttgcagtgagccgagatcacgccactgcactccagcctgggccacagagagagactccgtctcaaaaaaaaaaaaaaaaaaaaaaaaaaaaggaaaagaaaaggcagtgtaggtggtgtaggtcagtggtctaagttcattcacaaaaagcatattaatgaagctaagtctttttgtttgtttagagaaggggtctcactctgtcacccatgacggagtgcagtgacacaatcactgcagtctcaaactcctgggctcaagtgatcctcccacctcagcctctccagtagctgggaggcacaggccatcatacctggctattttattttttgtagagacggggtcttgctttgttgcccaggctagtctcaaacttctggactcaagtgatccttcctcctccgcctcccaaagtgctgggattacaggcgggagccaccctgcctggccaagaagctgagtctcaagctggatagaagctactgacagggctggaagaagggggccaacaggaggaatcataacagagggaactctgagcaaaagcaaggaggcaagaacttgagtgagtgagagagtgtgtgagtgtgtgagagtgtgtgtgtgtgtgtgtgtttatgggctgtttctaataagcctgacttctcctggaatcactgagacttacctgctgccaagacatgtccaaagatgacctcagacacatcttccggagccacagtggccctcttcaagacttctttgatgacagtggagcccaggtcctggacaggaacagcagctaaggcaccattgaaggaacctacaatagaaaggcggagagcgtggacatcacaagcctgcgggtaatacgggaaccacctacgagcaggggagcctcatgaccctgtttggcaaggccacgcgaggaggcagtgccctctcctcccacacgttcctacacctgctggtctgagcaaaggtcaaggtgggtgccacaactcgcagcagccgagggctggacaggcgacctccagaacggcctagggacgccgctgtagcccttctatttccccaaatccgaaggactggatgcgaccccatgcttcccaaacaaaaggaaccggcgggtcaagggcgttgaaaaccatgcggcacgaaggagacgaagtcacgacttctagccattgtgtgacagcccgaccccagcccaaagccgggctcag

SEQ ID NO: 5652 - DNA, 12648 bp, Homo sapiens
tggatgacataatgtctacagtgagaataatcaggctaactaaatgatggggagggatttctgagtagcggccagtcttaactctcaccaactcaacagcaggtatattagaatggaaagagtcattgattggacttagagtcggaagagttgtatttgaatgctggctctggtcctcagtttccttacctgtaaactgggaatggtatcatctaccctatatggggctgttgtgaacacatgtacaaaagcacctggtaaagtactacacagatgtcagtgtcatcccatcaaaatcactccgattatttttgttacctttagcctgcctcctcctgaacctcagcaatggctgggctgaatcagcttctatctagggaatctgcacctcagcccctgagctgcatcagtaggaagcagggggtatagtttttctttcaaccactatgccagtttgaggtatggaacttggtgaaacaaatcatgcctggcaaacctactggagaagggcaccacttggtggtcctcttttacatgttctataccctgaaaaggtcaaaaagtctggtccccaggatctccttgtcatgtgcaggaaggtaagtggcaacatctgttttttgccttttactcacaatgggaaagaaatttaaaaccaaggacatcaagcaactaatatgaatttaattcagaaaatattacatgcttcattaatagtttagaaaaagtatattcggttccaatcacactggttgataaacttcttatcaacccggatttcccacccaaactgaagaatacttcacattcaagtagggatcaaggttgtcatttctgtttatttgttcactgtttggttccagctctgctatgcatctgtttactctgttctggcatagacatgagtttctcagtgtgaggtcagtgaaagccacctcatcagagaggccttaccttgctcatattttccatgcctcctgcaaccacaatgctggagtctcctatccctattgactggactgcaaggcacacagcttttaggcctgacccacagatcatctggcagctccatgctggaacagagtagggaattcctgcacccacactggcttgtctaacaggattctgcccacagcctagaaagaggaacacagaggactcttagcaatcaaggagaaagacaaaatgtcacagtgaaagtgtgtggaaaattgccagttgggttacctgccacttctgaaagcctacaggtcaagtaagtgcccactggaggcaaaaaggcctgtatacactctccacctgtcacagtctagcccttgaatatatactgccttgtgctgctctgtaggtatttcatagatataagctttctcctccataaataagtcattaatacattaagaaagaagtgtcatcctcatcttttgatatggcttaaatagttgggcgcggtggctcatgcctgtaatcccagcactttgggaggccaaggagggcagatcacctgaggtcgggagtttgagaccagcctgaccaacatggagaaactctgtctgtactaaaaatacaaaattagctaggcgtggtggcgcatgagtgtaatcctagttactagggaggctgaggcaggagaattgcttgaacctgggaagcggaggttgcggtgagctgagatcacaccattacactccagcctgggcaacaagggcgaaactccgtctcaaaaaaaaaaaagtgcgggggggtgcttaaataagcattatcaaacctatgtctaataaacacaggatataacctaggcattatcagtgtttctaactagggccatttgctcccaagatcatggcttaagacacttgagaagaaaaagggttacttaaaaaggaaaacctttgataataagcagttctgttcttgcttagtattcattacactatgcttaaatggttatataacaaaatatatacaaactcagaattcacaaatacctttttttctcattctgagtactgaaacacaaatatcttttcataattcaactatgggacttcctttagttgggaagaaatacataatttacttaaagtagcacagaagagaatggagttaaaagtttcaaatattctcaatcgccattgtctgttatcagagtcaatggtaaatgtttataaagtggttactctattcccagtttcagatatactcaaacctaccacccttccttggagagtttgtggggaagaactagcaaataagtcgctgataaaaacttagagattatattcatcacaatgttatcaatctgggattaggctggaaactaaaaacgggtaaggttacttgagactgaaaacatatgcaggatcatatacatattaaaaagacaggcccagtgcggtgcctcaggctgtgagcagtggctcacacctgtaatcccagcactttgggaggccgggggggggggcgcattacttgaggtcaggagtttgagaccagcctggacaatatggtgaaaccccccctctctactaaaaatacaaaaattagctgggcatggtggtgcacgcctgtaatcccagctactcaggaggttgaggcaggagaattgcttgaacctgagacagaggttgcagtgagccgagattgtacggctgcactccaccagcctgggcgacagagtgagactccatctcaaaaaaaagaaaaagaagaaatgaggtacagggctgggcatggtggctcatgcctgtaatcccagcactttgggaggccgaggcgggtggataacttgaggtcagaagttcgagaccagcctggccaacatgttgaaaccccatctctactaaaaatacaaaaattagctgggcacagtggcaggcacctgtaatcccagtcacttgggaggctgaggcagaagaatcactggaacccgggaggcagaggttgcagtgagccaagattgcgtcactgcactccagcctgggcaacagagtgggactccatctcaaaaaaagaaaaagaaagaaatgaggtgctaacacaattaataatgctagcatttagcatactacgagcttcatgagaatgagaatttctatctgatatgaacattgcttatctccagctgctaaaatagtgcctggcacaaagtaggtgctcaataaacatttgttacatgattgtagaaggtatctggctcaaggaataggacagatctaagttcaagtgctagctccacttcaaactgtgaccctggtaagtcatttaacctcttaaactctcatttattcatttgtaaaatgaagataataggatataacagacttgtgaggaagattaaatgaggtaatgaaaggaaagcatttagcacagtgctttaaaagccttaaacttagtagacatgcaccggtagtcccagctagctcagaagttcaagggcatggtgcaccatgattgtgcctgtgaacagccattgcactcacgcccaggcaacagacagactccacttctacaaaaaaatttaaaaaattagccaggtgtggtggcctgctcctgtaatcccagctactccagaggctgaggtgggaggataccgtggagcccaggagtttgaggttatagtgggctacgattgattacaccactgcattccagcctggacaacagagtgagaccctgtctctttaaataataataataataattaattaattaattacgagtgttcaaacccaaagaatcagaagatgggggcactctcaggactcagctatattcctctggggagtgatatgccccatttgcaaggggcatgatgtggcacctattttccaagctcagaactgagccctaagagggcagggaacttacctgtattgttggaaccatactcccagcactaagcacagtatggggcacataggaggaactgaatacatttttgttgaatgagtgacactttgaggtagtaaggaggagcaggcatactttcctatgcgtcaggctggccctgctgctgcttcttcttcttctttttaaaaggagtctcactctgttgcccaggctgaatggagtgcagtggcacaatctcagctcactgcaagctccgcctcccgggttcacgccattctcctgtctcagcctcccaagtagctgggaatacaggcgcccgccaccacacccggctaattttttgtatttttagtagaaacggggtttcaccgtgtcagccaggatggtcttgatctcctgacctcatgatccgcccacctcggcctcccagagtgctgggattacaggcgtgagccaccgggcccggccggccctgcttcgtaagaatgaaaaggcagtgggccgcctgtagtcccagctactcgggaggctgaggcaggagaatggcgtgaaaccgggagacggagcttgcagtgagccgagatcacgccactgcactccagcctgggccacagagagagactccgtctcaaaaaaaaaaaaaaaaaaaaaaaaaaaaggaaaagaaaaggcagtgtaggtggtgtaggtcagtggtctaagttcattcacaaaaagcatattaatgaagctaagtctttttgtttgtttagagaaggggtctcactctgtcacccatgacggagtgcagtgacacaatcactgcagtctcaaactcctgggctcaagtgatcctcccacctcagcctctccagtagctgggaggcacaggccatcatacctggctattttattttttgtagagacggggtcttgctttgttgcccaggctagtctcaaacttctggactcaagtgatccttcctcctccgcctcccaaagtgctgggattacaggcgggagccaccctgcctggccaagaagctgagtctcaagctggatagaagctactgacagggctggaagaagggggccaacaggaggaatcataacagagggaactctgagcaaaagcaaggaggcaagaacttgagtgagtgagagagtgtgtgagtgtgtgagagtgtgtgtgtgtgtgtgtgtttatgggctgtttctaataagcctgacttctcctggaatcactgagacttacctgctgccaagacatgtccaaagatgacctcagacacatcttccggagccacagtggccctcttcaagacttctttgatgacagtggagcccaggtcctggacaggaacagcagctaaggcaccattgaaggaacctacaatagaaaggcggagagcgtggacatcacaagcctgcgggtaatacgggaaccacctacgagcaggggagcctcatgaccctgtttggcaaggccacgcgaggaggcagtgccctctcctcccacacgttcctacacctgctggtctgagcaaaggtcaaggtgggtgccacaactcgcagcagccgagggctggacaggcgacctccagaacggcctagggacgccgctgtagcccttctatttccccaaatccgaaggactggatgcgaccccatgcttcccaaacaaaaggaaccggcgggtcaagggcgttgaaaaccatgcggcacgaaggagacgaagtcacgacttctagccattgtgtgacagcccgaccccagcccaaagccgggctcagaccacctagcagttccgcccctgccgcaggcattaccgatggcgcctcccggagccggccaatcaggggccccggaggagaacacctccctacgccamccaatgggagaggcaggccacgcgatggctctaccccgggagccaatccaagcacgagggacggagtacgcacatcgggagaggagagggtggggctgtagcaccaggtcagggaacgcgggagccgcagggttccagggatcccgcggctcctcgcggcttggcctgaccggcttcctccacatacgcccctctcctacacaagtccggccctcggcgctcctgccgaagcagcaggcgcctcggactctgcgcggctcccgccggccactcacctatgatggtccgcgccgccgagacgatgaccacaggatctgagcctgcattcatcttgcttctcctgccgccgtctgccctgcgctgcctgcaagctaggcaaagctcctcctcgcagcccacaggcctgccgcgggcgggacctgaggtagccccgcccctcgccctccacctccccgcgcaccacctccccgcgcatcccactgtgcgcaggcgcaaggccggagcaggggcgggcggaggcgcgcggggcgcggggcgcggggcgcggggcggaagtgaggccggggcgcggggcgcggggcggaagtgaggccggggtctgggcytgcgggcagaaccgcggacctcggacgcatttacagagcgcctgaaaccccagtgtttctggacaccccaatgttggagttccccgacttgacgtyttgggcttttttttaaaaaatcttagggtttctcgaaacagtaaagactggggggtgacaaagacttatctctcgttcagctcaggactggaatcccacgggcgagaatctcgagtgcgagcccggcccgcrgcgggtctcagcacagctctgatgggtccttttgctctcggcggcttcgggaggtcctatgcgtttctcctggcgccagtcattcgctcgcgtgaggggcttgctaggagcgtctcggtgcgagccccctgccttctaagatcaactctggctgtgaacgggtgaggacgccgggagcgtcttagcgtcacaaaagttcctttggttgacgtttggacagtgaaaggagcatgtaacaagtggggtcagttttgtttaaaaccctttctgacttcccagcctcttactgggcaaagttcataatttttctgagctttctagggtttccaggcaagcttatgaggggccaccgttacagcaacttgttgggaacacctggatagtggaacaagaaagctttgtcacaaagtcatgaaggggaaaactgttgacggacctggagaatcttcctgaagaactttaaagttgattgaaagaatcattaaatcctggaaacctacattaagactttgcagagatatgcggatgggtcagataaatcagagaaggtaaagagtgtaggccccagaggtggggcaatagagaaggaaaaaaattgcataacagtgcaatttcaggagaaatctttagggtctggaatagtggtgaaatcagctgtctactctgctaagaactcagcagcacactgaagtctcttcagttgtcttcaatgtgtttcctgtcccctaacatatctgagtccaaggaattcaaggaatgcctcccgtggcttttgctctattctatcccattttccccttactccctggccacttctgagtctttgtgggcttactctcacatccccttaacatgttccccaaggctcctactttgcaccagctccctgggtaataccagtcattcctacggcatcaatcaccacctgtatactgacaagtctgaaatccttacatctaacctcgtctcctaagctgactgaccctcttcatttaaattcttacaagcacatcaggtcgggcaccttggctcacacctgtaatcccagcactttgggaggccgaggagggcggatcatttgaggtcagcagtttgacaccagcctggccaacatggtgatatcccgtttctaccataaaatagaaaaattagccgggcgtggtgccgtgcgcctgtaatcccagctactggggaggctgacatgggaaaatcgcttgaacctaggaggcagaggtttcagtgagccgagatcacaccactgcactccagcctgagcgacagagagaaactgtctcaaataaataaaatttcctataagcacatcaaatttgacatattgaaaccaaactcttccagcctgtttcttctgtaatctcagtgagcagtgaaactatcttctgttaaccaaaccagaaatttacctctgaaactccccctaaacatcacttcttccagaaaaaccttccaatctcctgcatttggtgcagcatcttacccctaacttcctctttcaacttaccatgtaattcctagtttatctgtctcctctactgactacataagctttccaagatgatcctgttacactgctttatgcacagctcctagcacattataggcagttatgaatgaacaccaatattctttatggccagtgcctagcacatttgaatgagtatgaatatattcttctggagccaagggatatagagtttcctgcctgaaggctctatctagagtaagtttaggagccaatcttgagaaggtaattgcatgcttctgctgagtggccaaacagaatctgtcccctgaggagtcctcattatagctactcatatgattatctactcatatgagacagacagagactaagaataatgaatgaaggaaagaagaggaattttttttttttttttgagacggagctcgctctgtcacccaggctggagtgcagtggcgctatctcggctcaccacaacctccacctcccgggttcaagcgattcttctgcctcagagtcctgagtagctgggattacaggcccgtgccatcatgcccagctaatttttatatttttagtaaagacggggtttcaccatgttagtcaggctgatctcgaactcctgaccttgtgatccgcccacctcggcctcccaaagtgctgggattacaggcgtgagccaccgcgcccggccagctggaagataatttttaaaattatgtcttggccggccgcggtggctcatgcctgtaatcccagcactttgggaggccgaggcgggcagatcacctgaggtcgggagttcaagacctgcctgaccaacatgcagaaactctgtctctactaaaaatacaaaattagctgggcgtggtgccacatgcctgtaaatcccagctactagggaggctgaggcaggagaattgcttgaacctgggaggcggaggttgtggtgggccgagattgcaccattgtactccagcctgggcaacaagagcgaaactccatctcaaaaaaaaaaaaagaaataaaataaaattacatctagatctcaaatcataaactacctggactggtgagcagggtgagtgggcaggaagccacaaaaatctccaagtgcttactcatgaggagccatcattacagcagtgctatggagccagtttatcctgaaggggccttctcagcatcttcccccgctggaagatgcaatcattcttggttaagtttcataaagagttgcaggagtccaagccaggtctttgctacaggctggattcaccaacctaccatgcagcaaattcctccttggtctccatgaggggaacagtgaatcaccaaagtggaattgccataggatgaaggtcagcagtgtactccttaccactaggggctagctcaacactccctcagcacagccaccccatgatgggtccagatcagttaatgacattacctgggattatgaaagtgttcactataaccacagggataggtgaactcccaagacagtgacgtagagcagcaggcaatgatttgagtacagggcataactactcatgaaagagggaacatctgagaaagaaagttgtcagaaggaatggctttacattgttttgcaaaagtgtctcaaaaactggagtagtcagttgtatccaatacacctgaggagccaaggaaactgacatctattgcgctctctgtatgaggactaccaggaaccaaactggggcaccaatcagggggcactgtgatctttagacttcccagcctccaaaaacagtgaggaatgcgcgtgtaaagccacccagtctgtggttttttttttttttcacagcagcccaagctaagacagcagtgagtgctcttacaggggagaaaaacaaaacaaaatatcgagcctcgaggatacatttgcccaaatcagttaagtgtaataccaggattcaaaccaattagatgcagaagccactctatcacctctcttatcacaggcataccagaaaataaagcatccaattccagaaatgagaaatactgactctgtgtaccacagaataagtgctctgagttattcatcaaggcagactcaacagaaacatgaaaatgtcacattaacaggtccatattaaattcagtcataaaattgtatcactggttgaaaaattaatttcctatcacaaactcttgattacattacaccaacaggacagagaaattacatttttgtttaaattggtcaagttgaaggatgtacataacaaaagccaaacacagtatctgatatatcaaacaccaaaatgtttaatcacatgcaaattaaaaatcgtataggattttttactcacttgagcagactgtagaaaaggttaatcaaggttgggcgcggtggctcacacctgtaatcccagcactttgggaggccgaggtgggtggatcacaaggtcaggagttcgagaccagcctggccaacacagtgaaacctcatctcttctaaaaatacaaaaataagccgggcatggtggcgcacgcctgtaatcccagctactcaggagtctgaggcaggagaattacttgaatccgggaggtggaggttgcagtgagccacgatggtgccactgcactccagcctgggtggcagagcgagactctcggcaaaaaaaaaaaagagaaaaagaaaaaaaagaaaaggttaatcaagagacagtgcagtatttaacatactgctgaagaccggatatacctgtatcagctaaacaagcaaaagcagcaattactttcaaataagttgtacctcagttttcgagtattataactccactcccaaggttccttgattgtattacaagttatgtctaaaacaatactttgcttttaacagaaatggaatttcatttcaaccatatatgaaagctacacatttgaaggccattcaatatcatacttttatacttaattacctctgagaaaatggagcaaattttgacattcttccaccttaaaaacattttctcctacctacattctaacaccccttactcatataatattaccagatatgttgttagtaaaaatcagtagtgctggccagcgttttaaaacaaacatcactgactacaaagatactctacttgaaatcaggtcacaaaaaaccaacgctgcttttcaattaaaactcaaaaagggccaggagctgtagctcactcctgcaatcccaacacgttgggaagccaaggcagaaggatcccttggggccaggagtttgaggccagcctgtgcaacatagcgaggccttgtctctactaaaattaaaataaatgtagctgggtgtggtagtatatgcctatagtctcaggtactcggaagcctgaagtgggaggatcacttgagtcgaggactttgaggctgcagtgagccatgactgcaccactgcacttgagcctaagtgacaaagcaagaccctgtctcaattaaaaaaaaaaaaaaaaaaaaaaagcctaagaaatagatgactattttctttatacttttctgtattttaaaatattttgtaacaattataagtcaagaaaaaattttaagtgtagccctaaactccagctccgttttgcaaaataaggcataaattaaaaattgtgtgcaaaatcgtaatcgatgcttggtcttaagtttgactgttgtggtacttgaaggataatgagtagaaattcaatgactcaatgaaaatgacaaatgctaaacatacacccaaaacaaaacaaaaaagctaattaaggagttacaataaaaatctttatttaggtttggtcagtacaggtaagatatactggagtcacagagcaatatgcattaacaggatacaacagttcataaaaactgagtaactatgcacacaaatttcttaaacagtcacctaaagagaaaatgcacagatgtatggtggaaaaaactgtatctaacactgaaactactacaggactccatcaatgagtccaacttttagtgataaaaaactactgtactgggcaaacttggcagtcataaacccacatctactctaacaagtctgaatggtgcataagtacagtaacagcatgagtacgaatgcccttacacagcacagattytaaacagacagatttatacagacatcattgtgttgtattttaaggaaaaatttccatttacaatttcacattaactcatataaaaataacttgaccctacacaaaatgtccttttagcaacattcaaagtaattaactgttacaatttccaaagcggcagaagtattgaagcaaaaaaaaaaaaaaaaaaaaaaaaagaaaagaaaaaaaaaacaaagaaaaaaaacaacaaaaaaaaaccaaaacgtacacccacaaaaaggcaaattgtgacaaaagtatgcattaattttctggacagtatcctctcccaaattaaatgacactgtataaaaatttgctgaaaaaatattacaaaactgaaccctgtacatttacacttgagtccaagccattctgaacgtggcgggaacccacagttcgattacctttcccactcactgctttctcctcttgagggtcatgact

SEQ ID NO: 5653 - DNA, 13575 bp, Homo sapiens
ggcttgagaggaggagggaggatcggccagagaccgaccccaggaggatggccggccaggcagcaggaccacccacccgtgctcctggaagcataggagcctggcacgggctggccctggggtcctggtctgtatcagtcctgaggaccaaccagacggcatccggtgaagtgcagtggctgggccccacagccgggcggggggctgcggaaggaaaaaaccttgttttggattcactcataattacaaatgccccctccagcaaggccggcctctgcctgtccagtcactcacggagaaaacaggcagaaagaaccttctaggacaggcgtggggtgccagtgggggtgggaggcagaggagccggcgagaggcccccacccatccacccaggactagccccatgagcaacgcccgcgtgggcagccacacaggcggaagggacaggctgggcagccatcgcctaaggtctggggttaaatctcaaacgaaggggaggcttcctctgggttgccacacagggctgggcagagcctgcagagaggggatcagaggtctgaggacatcctcccggatggtggcccttggaggtgaagccaaggctctcttcttggggcgttttggccatgctttcctctgctaggctcttgttggtttgaggaatatagtcaggaaggaaaaaccagcctagcagttattgaaacaatatttcaaacagagttcagacagagtgacagaatggctcaggtattttgtagccgtcctcacacctgcagcaccagactgtgttgccgcacgtgggcagctctggggttttccagcccccttggagctggggcttccctgaccacagcccctctctgggagccatgtggcatccagcagccctgttctctaggggtggggatagcacattagatctggaaggtgaaagaactcaacaggtgctcagagagtagcagccgttataaaggcagaggcgatagggatagggggtggggcctcgttccccccctaaacacactgcagctggggaaagaacggtgcgtgatgaaaactcgtggtactctgacactgaccccacaataaagcaatataacaagaatcaatattgcttcggttggatcaacacctttgtgcatgtgaaaggtacgaactgactctgcagggagaacagaggagccccatttgggctgcgtgctccatgtgtgtcctcccggtgacttccccttctctctctcactctatttatttttttagagacaaggtctccctatgttgcccaggctggactcaaactccagggttcaagtgatcctcctgcctgggcttcccaaagtgctgggattacaggtgtgagccaccaagcccagcctctcctttctttttttttttttttttttttcagagacagggagggcaggggtctccctatgttgcccaggctggtctcgaactcctgggttcaagtgatcctcctgcctcggcttcccaaagtgctgggattataggcgtgagccactgtgcccagcttccccttctcttgagctgagagctggtttgagatctgttattgcacccacataaagcttacgtagggccagatatggtggcttgtgcctgtggtctcagctacctgggaggccaaggtgggaggattgcttgaacccaggcaggaggttgaggctgcagtgagctgtggctgtgatcaacagagtgagaccctgtcttaaaaaacaaaaaaaggccaggtgcagtggctcacgcctgtaatctcagcactttgggaggccgaggtgggaggatcacttgaggtcaggagttccagaccagcctggccaacatggcaaaaccctgtctctactaaaaatacaaaaattagctgggagtggtggctcatgcctgttatcccagctactcaggagcctgaggcagaagaatcacttgaacccgggaggcagaggttgcagtgaactgagatcacaccactgcactccagcctgggcaacagagcaagactccatctcaaaaaaaaaaaaaatgcttaacgccactgttatctaggaggaggttttggccaggtgcagtggctcacgcctgtaatcccagcactttgggaggctgagacgggtggatcatgaggtcaggagttcgagaccagcctggccaatatactgaaaccccgtctctactaaaaatacaaaaattagctgggcctggtggcgtgtgcctgtagtcccagctactcgggaggctgaggcagaagaattgcttgaacctgggaggtggaggttgcagtgagccgagatcgcatcactgcactccagcctgggcaacagagcaacactctatctcaaaaaaaaaaaaaaatgcttaacgccgctgttatctagaaggaggtttcagcggggtgcagtggctcacgcctgtaatcccggcactttgggaggccgaggcaggcagatcacgaggtcaggagatcgagaccatcctggctaacacggtgaaaccctgtctctactaaaaatacaaaaattagccaggcatggtggcacgcgcctgtagtcccagctactcaggaggctgagggaggagaattgcatgaacccaggaggcggaggttgcagtgagccaagatatcgccactgcactccagcctgggcgacagagcaagactccgtctcaaaaaaaaaaaaaaagaaggaggtttcagcatcacggagccgcgtctctgtagaatggacacgtgtttcactcatgctgcagcgctaggagacagccaccttagcaatccacaccccatctgcatgagaaagcctgggttcagtgttcccaactctagatgtgcagctggaaccactgattaaattgtcccgtaggcagcaggcaccagtcttcgaggggctactttgatgaattctgctagtatatttcccttgaaatggacccaaattataccctagctcagtatgaaaaggcactactttagaacaacacattatttttcattattcatcgttctttcatcaacttggaactccaagcctgtctctaagctgtcaggccctcttccaagccagcatcagacccctatcactgaaatcagtgcagaatgggcttttgatggacgaaactctagttataagtgacaaaaaacaatgtggcttccaagcctcttctttttttttttttccccagagatgaggtcttgctctgtcacccaggctagagtggtgcagtggtgtgatcacggctcactgcagcctcaacttcctatgtgcgagtgttcctcccacctcagcctccagagtagctgggaccacaggcatgtcacaccattcccgggtaattttttaaattattattttggtagagacagggtcttgctttgttacccaggctggtctcaaactcctggcctcaagtaatactcccaccctgcctctcttatttttattttatttattgatcttttttttttagagtctcgttctgttgcccaggctggagtgcagtggcatgatcctgactcattgcaacctctgccttccgggttcaagcaattctcctgcctcagcctcctgagtagctgggactacaggcacccagcactatgcccagctaatttttttgtatttttagtggaggctgggtttcgccatgttggtcaggctgatcttgaactcctaacctcaaatgatcacccacctcggcttcccaaagtgctgggattacaggcatgagccaccgcaactggccctgcctctcttcttttaaacccatatgtaactacctggatccagtggctggaggaccagcaggcctggcccttgtgatgccagtgggcacagccctctgcgccaggctgatgacaccatctgccacctccactacagggctggggaagcagctggagccgtggctgagtcactgtcggagcagctgagcgtcgcgtatgctacaactgatttcacagcatttgacaaacgtccccccacagaaaatgaacctcactgagtttccctgtccaacaagtcaattcattaactcagggcattaggacactaatcccccctgggagactcaaagccactgttcgagtcaaacccccacattctaagggctctttcatggttggggccatgggttagaaccaggcaccttttcatttttcgtggacagtggtattgtttgtgagatgtggccatgattgggaggcagccaaagagctgggagctctcctccccaagcacaactcccaggcctgtgaggggctcagcacggtgacccagccttccccagcacctgcccagcgagcctggcggcccaacagggttccattctcagggaggcaggcaggcgcctccgaggccacaaggggtttctaagggacaagcttcttcggcagccgtgccttgggcactgcagcacctgcccagcatcctggatggtggctggaaatgatatcctggagaaacaacttcctcaaagggaaatgagttcgtgttttctagagtgaaagttcctccccggacaaagctgagacctgcactggctttgagtgactaaatgtctttctgggaggctttgactcactgggtaacgtggaatgggcagtgccctaggctgcaaggcttctccgacatcatcccggaaccagcctttgcttccttcctcacatcgcagagcgcacctgcagtgcccgttccgttccctccgacctgtgcatcctccccttcccttcctggtcccgctggcagcctgccacctgtgccaggacaaacagctgcacagggatgccctttcctgttgccatccagggcagagctcaccgtcttctcggtactcctgcagacaccagccacacatgtgcagacgtgcatggctatttgctgacctgtcttcccaccgttcagaaaacaaaaacccggggagctcactgcaagagttgttcctgggcttcaattcctggatctggcacctggcgcacagtaggtgcacaagcaaatacctgagtgaatgaatggatgtctcctctttggggatcacgtggaaaccccagaagtcaaggccccagtttggtcccatccagctgaaaacaggtgtaaataatgtaggctaagcccagcggagagaaaatctgcagcttagttagtcctttgctttgttgagctagattcagctgagtcaggaaatccttcgtgatggcaagacgggcttggggcaagctgggccgcacaactcaccctctcaacacagaccttggatgttgaaagtgaatacagtgcactgtcctcacaacggggaaaaggaggagaacggtatgcgggatcccctgtactagccttacaacttcctgtgaattttcatttcaaaataaaaggttacaatgtacagagaggatctatgaaagccttggggaggcaggtgtcagctccatatgacagcctttctgacaaagctgtctgaaaatggaatggggtgctttaaagacagccctcactccctagaatcagacagccgaccatagccaccctcccaagctgacagtgtccttcagcagtgagggcccagctctggagccagattgcctgggttcaaatcccagctctaaaagttacttattcgactatcctggacaagttatttcatttctacaagtcttcatttctgcattaaaaaatggtagctaggtcaggcccagtggctcacgcctataataccaacaagtcggacgctgaagcaggatgatcacttgagcccaggagtttgagaccagcctgggcaacaaagtgagattccatctaaacaaaaaaaaaaatttttcaattagccgggtgtgatggcgtgcgcctgtagtcccagctacttgggaggctaaagtgggaggttcacttgaacgcaagaatttgaggttgcggtgagctgtggtcattccactgcactccagcctgggagggcaaggccttgtctcaaaaaaaaagaaaaagaaaaaaaaagtagataaaaccacatgagactttattggcaattgtgagttactctttccacatggcgacagcctgcaatgggggctccagtttggcttgctggtctcttctgggcagcgggcactgctgtctctactttccaggatggcagttggcccgaggggctctaacctgccattggaacctcacccatagcccagaagcctcattcacaacccttcccagactccactccaacttagagaacctgaaaaatggacatgtrgacatgtatctgaaagaaagtctaggcggttgcrcttagacaagggcctacggctttattaacagatgtcgaggaagctttcaggtgctggyagccatgagggtctggttttaaggatggcctttaaggaaaggccgtggcaggcgggctgagaggggckgctccagctcagccctgcccacagcacaggctcacagaagccgagatccacatcaccgcctggcatgcaaaggagttgaagacaaaaccatttttttccagcttctctacaaagccaattactaagcaacagttattaaagtgaagtatccatttacagactgacacaaatatcaaaaataagcagcttagatgagtacagaggctggagtgcattttctgctaacaaaaaccactgtgatattctcccagtttagagggaaaagtctatctcaggccgactcagatgtggcagaaataagtgggtctgaagtgcattttcagttgtttctgcccggaaggagcccggatgatacaaacaggtctggggttcgtggctctggcaagcgcccagagacaactgcgtctctgccaggacgctcatcctcactgcggctgtctgggcagatggctgttggcaggctagggacgacgatgaaaaactgacaatattttaaaaacccagtagggtccacagcagtgtttgaaatgacaggctttttatttctcaggaacagccgagatgacctccagaggtttccagcgaagctgtaacaatccaccctgcagctctatgacagggaggagggcgaatcaaatccatcatcttacgccagacttcagccctgcgggagctgctgcctccaaagaaagcggggacctgggcggactgcgtctctcccccgtgtggagaacgtgacagatgtgaaggttgggctgacagacacacggcctgcagcagcccagccagtcccccacagcatcgagccaagtcatttaaaaaggatttaggccactgcctttttctgagggaggagcggccagcatgtgccccgcggctcactgggcctgtctaatcacacagcagtggcaaaaggagtatctgccagacgcttcctatcactctattctgtctcctcatccacctgaagttcaccccgtttccccaatgacttagaatggctttgtgcttagttttaattgtagtttgtgctattctgtgaattaacaattcaaacaaaataagaaagccatgttgttaaacagtagaggagccrgggactctgtctccattctctcatcacacacaagtcatgcatctaccaaaaaaaaaaaaacaaaaaaacacaacaacaaaaaaactgtcctctgaggaggcacaggtgtgacagataaggaacctgcagctcagattcaacaggcacctgccaagtccacactcaggactgtgacagcctcaacaacatgaggtccagacacattcactgtggaaggctctgcccacgcgaacaaagctgtcagctctagcaaaagggacactgccttcttcctccctcacttctcacctggtaagcccgggaatcaaaacagcaaaaatgagcccccaaaaaagagagagagagagagaagcagccactgttaccagcagcacccgctgcacaggcagaagcacctctggtgccactttcaagacaaaacaagagcacagttgaaacatctaatttgaaaatgttgatctcctttcctaagacattgctaaggggcccacaggaaggctggtggcaccagggaataaaccctggaagtggtgcagccactctgggaccaggcagctccggccagaggcctcaatccatggcagccagctgctcgatggcacggcgcactttcttcgcagtttcctcaaattctttcttcttattgttggtttcctttgcctggaaataaagaatagacacatgacactgaaaccagagcttcccagtcacatcctgtagataagatgacaaaggaaaaaacaatcagggaacactgagagagcacctaaataaactgggcactgggctaggcagattcccagctacctgggacaaacatcctgattcagctcaactccctctagtttaagctgcctcctaatcatcgaataacaggaaacactgacggagtgcttggtatgcacccagcaccactctacctgcttcctccattaactgatttatgttcacagtgatcctgcgctgggtgctcccatatctctactatacaggtgaggaaaccgaggtccaggctgaaggagccactcaaagtacccagctagtctaggcaccccagctagtctgggcaccccagctagtctaggcaccccagctagtctaggcagagctctgctcttaaccactgccctacctttctcctgaaactcctggaggaaagtccagagccttcctcttcatgtccagttaaacagaccctggcaaacatcaggctcttcctcgaacagaaattcttttgcttccagtccctccctgaatctggcttccaattttttcattctgctaacagagctctctcctaaggggcaaatgacaatcacattagcaaatccagggacccccttccctaccatattttttataaaccctaactcctctactacattaaaaaacaaagacctttattgggttaaatttgtttgctgacagaggttaacttaaaaaaaattactttttttttgagacggactttcgctcttgttgccttggctggtgtgcaaaggcacgatcttggctcaccgcaacctctgcctcccgggttcaagagattctcctgcctcagcctcccgagtagctgggattacaggcatgcgccaccaccccggctaattttgtatttttagtagagatggggtctctccatgttggtcaggttggtctcgaactcatgatctcatgtgatctgcccgccacggcctcccaaagtgctgggattacaggtgtgagccactgtgccagccaaaaaattacttttcaatatgtactttatatatcctaagttttacctcatgtataagtaataaaaatttgtcattttttaatataaatttataatttataaattattaaaagaaaatttaatttaaaaataataaattgataagaaaaaagaaaacagtgcaccgtttggtttttttttttttagagacagggtctcgctctgtcatccaggctggaatgcagtggcaagatcatggcttactgcagctttgacctgcaaggctcaaagtgatcctcccacctcagcctcctgagtagctgagactacaggcacgtgccaccatgcctggctaattttttgtgtattttttgaagagatgaggtctggccacattgcccaggctcgcctcaaaactcctgggctcaatgaatcctcctgccttggcctcccaaagtgctgggattcaggcacaagccactgcacctggcccagcagcgcacttataatggactgtgatggacaactctgcagtcccagggagcctcagctttactgatatggaaagatgaccatggcttttaaaatatatatacacacatggattattcagtttcttctctttcaaaaaagccttaaattagcgaagctcctttgcatacatgctataatttaaccaccccaatgtggaggtcaatatctccattttatacatttttccactaaaggtaggggcgaagcaaacacaactcttgctattgaaagacaaaacaggccgggtgcggtggctcacgcctgtaatcccagcactttgggtttgggtttgtaatcccagcgcctgtagtcccagctacttgggaggctgaggcaggcgaatggagtgaacctgggaggcggagcttgccgtcagccgagatcacgccactgcactccagcctgggcgacagagtgagattccatctcaaaaaagagaaaaaaaaaaatttaaaattagccaggcatggtggcatgcgcctgtagtcccagctactgggaggctgaggcaggaggattgcttgagtccaggaggtcgaggctatagtgagctgtgattgcgccactgtactccagcctgagcaacagagcaagaccctgccaaagaaaacaaacaaaacactcctgccacccaggtctacaactcgcctctccttctagtgcttcgttttgtcctcatcacaagtatttaccaagtaaactcttatgaagaactaagttgttcagtttatttccacattaaatttatttcctgatcgattttcacactggttctaatttatttcattgtttcaaaagctaagcaccgaggcagcagcaggaacaagaatcagcgcccaatgcatcgccctggatggccgggcctcagcttccacagcagcgccctcctggcaccctggcaaggcagcagacaggggcatcctgccatcaaatctgggatcttgggaatccccagcatcaccagcaacagcatccttgtcttcaggatttgtatagcgcaacacacgcacctgtggtcccagctacttgggaagctgaggtgggagaatcatttgagcccagggggtcgaggctgaggtgagccaagatcacaccactgcactcagcctgggtgacagagtaagaccccgtctcaaaaaaacaacaaaaaaaagattatattgtttcaaaattaaagtaataaaaacaaatccataaaagtattctgtattctgaattggggaaaacaaacaaacaaaaaaaacagttcaaaataaaagccaagcagtttttaaatctccctacttttcttgcaggctgtaatgtctcccctctttccagtgtggctgggtctgactatcaggagatagagaccgagaggtctcctgcagggactgaggcctctacttctgcctactgcgccttcagctcacacatcatgaaagcctacttttttttttttttttgagacggagtctcgctctgtcgcccaggctggagtgcagtggcgcgatctcggctcactgcaagctccacctcccaggttcacgccattctcctgcctcagcctcccgagtagctgggactacaggcgcccgccaccacgcccagctaattttttgtatttttagtaaagacggggtttcaccatgttagccaggatggtctcgatctcctgacctcgtgatccacccgcctcggcctcccaaagtgctgggattacaggcgtgagccaccatgcccggccctgaaagtctacttttcttaatcacatcttccaacaggtgagtggactccccctaccagactgcatcttcatccctgtaaccctagagcggagcaccccgcagcgtccaccagcacttcagggctttctggaactggatggtgtcagatttcagttgctctatttgcaagggcaaaaaccctctgtctttctcagcgctctgggacctggtttccagctcacacctccacatccactctgctcctcccctgtgcccatgatggttccaggcacacaagctgctccttgtctaaaacagggcttggcaagcaagggcctgctgggccaaatccatacagcccgtcatggcctttttttgtccagcccacgggctaagaatgctttttatgtttctaaaaggttgtgaaaaacaacaaaagacaatatgcaacagagactctgacccacgagggctaagagatggtctatggcacgctgcagaaaagctggctgacccctgacctggaaaaagatgatccccagcccactttccagttcccacgctgcagctcccacaacctcaaccaggtgacaagctctctcacagcatgcttcacccacaactggcctcttcctgacaaaacacaatctcagtccttagcacttaaaagccactatattgaggccaggtgtggtggttcacacctgtaatcccagcactttgggatgccaaggcgggcagatcacttgaggccaggagttcgagaccagcttagccaacatggcaaaaccctgtctctactaaaaatacaaaagttagctgggcctggtggcacacacctataatctcagctacttgggagcctgaggcacgagaatcgcttgaacctgggaggtggaggtcgcagtgagccaagatcgcaccaccacactccagcctgggcgactgagtgacactctgtctcaaattaaaataaagccacatataaggacagaattattttacgctgatctctacaaaggaatacaattttcaagctgaaaagcaacctgagaaaccatgggatagggggtctaacctctatttagcaaggaaagcatgagcacgactggcttaaactcaaagtctgcaagtggcagagacagaactacaacatctcctgactctccacccagggctttgctacaaggatatggaatcccccagtacttattctgtgtggggctgccagacttagcaaataagaatatatgacgcccaggcctggtgcagtagatcacacctgtaatctcagcgctttgggaggccgaggcaggcagatcacttgaggtcaggagtttgagaccagcctggccaacatgatgaaaccttgtctctaataaaaataccaaaaaaaattagccaggcgtggtggtgggcacctgtagtcccagctactcaggaggctgaggcagaagaatggcgtgaacccgggaggcggagcttgtagtgagctgagatcgtgccactgcactccagcctgggcgacagagcaaggctctgtctcaaaaaaaaaaaaaatcaaaaaattttaaaaagaccacgcatggtggctcatgcctgtaatcccagcactctgggaggctaaagcgggcagatcacaaggtcaggagtttgagaccagcttggccagcatggtgaaaccccgtctactaaaaatacaaaaattagccaggcatggtggtgcgtgcctgtagtcccagctactcgggaggctaaggcaggagaatcgcttgaccccgggaggcagaggttgcagtgagccgagatcgtgccactgcactccagcctgggtgacaaagtgagactcgtctcaaaaaaaaaaattaaaaataaataaataaataaataaataaataaagcccagttacatttcaacttcagataaatgactaagtttctagtaaatactgacacaaaatgtgggatttacttataccggtatatacttataccggccacactccaggagctttaaaatcacacagacatcctaggggctttaaaaatgattcctagctgggcacggtggctcatgcctgtaatctcagcactttgggaggcccag

SEQ ID NO: 5654 - DNA, 203127 bp, Homo sapiens
  misc_feature (1)...(203127): n = A,T,C or G, or insertion/deletion polymorphism (see Tables 1-2)
caccatttccttttgtgagccagtaactatccataaaaaactatctgctgatgattaatttaagtcaccgactgctgatattaccctgttcaaaccccctatcatgaatagtgaggtcaatacctaaattatttgaggaaaacaatggcacagaaatgcagataatgtaaagaagaaagcaaaaatcaactcggggaagtaccccagctctatcatatgctatttgtgtggtttgcggcaaatcacctcatgcttcctcatcaataagatgaggatagtaattcatatcttaaaattctgattagattttgtataatgaatattatatagtatcatatatataacatatacaacacaattatatattgcatgatacatattgtatgcaagtacatttctattgcattatctaaactgcatgataaaatagcttatgtaagctatttatcatgcagcatttatgtaaaggcaatagaaacaaatgtcttatttcttagtacttgagaaatttggtgtagcttgaaagatacatgttagtcttcaaagtaagtttattatgaatttaataactccatattttaaacttctaatttatgaagaattcttacttttggaaaacaaaaaaatttacctttgcagtagcgttcgctctcacttcaggactgctactgatgtccacagtctcatagacatgttcatatacctgtaaaagccaaagttatatctcagaatataccatgcttgagttctctgtgaagttaaaatttcaggcgaagttaaaatttcaggcaaatttatgcatctttataaaatggttttatcagaaattccaaaaatgagagggactggttttaatgttttctaaagtttttcttaagaaatgttgaacccaaatttagagtattatctgacctaattaactcaaatttttgtaaattttaatgatgtttactcacctctctcacagcattgcagaattcactttgaaggactctttgcaaagcctgaagtttctgtggtggtacttctccactcctttgtagtttttccaataattcaattgctctacaaatatctagagttaaacacacacacagataattttctccaagggttttctcaatgcctatgtaacagtggggcagttaggattcattcctcaagggcaaataatatacagacaatcgaggggaaaaaaagcattgaatttgcacatttggtgggaaggagactgtgtgtgtgtacacacatggagggtgagaatgtaaaatgtaagaacactaaattttacagtagataggaaaaactactgagattacagaagcataaaataagaccttggagaaacacaggcaaattgaacacaaaataccaaatgtcatcggaaaggactgtgactcaaatgtgaccgatacatgaacattgtactgcttcagaaaagctagcaatattgtcagaaactagtcaataaaaatttacctaattattattagtaaccaaagcactgaacagtacaaggcactataagctagtaaaatcactggtcattcctcgaaagaaacatgatacataggtagataaccactcgagagcagatgcagttagtggcagggacacatttaaaacaaccataaaaatgcaaaaaacaagcagtacaaatgaaataaactgattttttttcaacttaattaacactgttaattcaaacaagctccaacacttatgtttacaaaaaagaaaaataaaaacaattagctttatcaatctggtctcaataccacctgtgtgaccttgggcaagttacatgatgtccttatgtctcagtttctttcactgtacaatggaaataacagtaccttccatataagggttatgaggaagagttatgagttcagttaacaactgaaccacaaaatacataaaaaagggcttagcaagcaaaagtgttatgttacattggtaccaattaatcataagaaatattggctgggaatagtggcttatgcctgtaatcccagcactttgggaggccgaggcgggtggatcacctgaggtcaagagttcaagaccagcctggccaacatggtgaaaccccaactctactaaaaaaaatacaaaaattagccaggcatggtggcgggtgcctgtaatcccagctacttgggaggccgaggcaggagaagcgcttgatcccaggaggtggaggttgcagtgagctgagattgtgccactgcactccagcctgggtgacaagagtgaaactccatctacaaaaaaccaaacaaaacaaaaacaaacaaacaaacaaaaaaaaccctaagaggttgtatacatttatacaaatgtatgaagcacattagggaattctcactgagaagtgtgaggataagtgttttatgaattgagacattttagaagattcaggaagtcagctataacactgttaactatctctacttttatttttccaaaaactgttttggtatactgtttttgtacccctggtactacaatgcccagtattctattattgctttgcttccttttgacttaagtagaagttcctgatttcgttacactcaaggactggaaatttttctttatagagttagtatggccttcttcgtgtttgcagatagaaaactatgaataaatgtagtaaagaaagatatttatttatttatttgagatggagtctcactctgttgcccaggctggagtgcagtggcgcmatctccactcactgcaacctctgcctcccaggttcaagcaagtctcctgcctcagcctcctgagtagctgggattacaggagtccaccaccatgctcggctaatttttgtatttttagtagagacagggtttcaccctgttggtcaggctggcctcaaactcctgacttcatgatccacccacctcagcttcccaaggtgctgggattacaggcttgggccatcacacctggcagaaagattatttatttatttatttgagatggagtctccctctgttgctgaggctggggtgcagtggtacgatcttggctcactgcaacctctgcctccagggttcaagtgattctcgtgcctcagtctcccgagtagctgggactacaggtacctgccaccaggcccagctaatttttgtatttttagtagagacagggtttcaccatgttggccaggctagtctcaaactcctgacctcaagtgatctgcttgcctcggcctcccaaagtgctgggattacaggcgtgagccactgcgcctggccagaaagcagatttttaaatttgaggtaaagaaagcttaaacttaaaaagttaatcaaatgcaatggaagcaaatagaccttcaccattctgatttcccatcaccagaatgaccgatacatggggactgttggttcatcaattattttgatttataaagttataatatataagccatataaaaatttccagtgaagaaaaaaatggaaaaaagtaaaatgcttttgactaaatctaaaatgtacctactatgtgctcaaatttgtgtttcattaaatcatagtttgatgatttagaaggcactctaaatcatcatatgtgatcaggcactgtattgtaattgtactgtaggattttctactttaggatcgttgggagtgtttgttaatagagtctgttagaattctaaacaagaatcagaggtgatgtaatctgactttcttaccctgctaaatggcaaccactagtacagctgtcttggtaacagtgggggattcattaggaccttcttcagataccacagatatcaagatctgcagatgctcaagtctctgatataaaatgatatagtattggcataaaacctatgcatatcccccctctatactttaaataatctctagattacttacaatatctgacgctacgtaaacagttgttatatcacattgtttagggaataaggacaagaaaaaaatgtctgtacatgttctatacagacacgatttttttctgagtattttcaatctgcagttggttgaaatatggaacccatggatatggagggctgactgtaattcatcctactaaggggtggagtcttctactgaagaacagaaaagaaatctgtaacagcaaaaaacaaagccaagactatcaaaactaaatgccacagaagttccacattttgtgttgcatttaaaaatacaaagaccggccgggtgcagtggctcacgcctgtaatcctagcactttgggaagccgaggcgggcggacttcctaagctcaagagttcgagaccagcctgggcaacacggtgaaaccccgtctctactaaaatacaaaaaacagccgggtttggcggcgttcgcctgcagtcccagctactcgggaggctgaggcaggagaattgcttgaacccgggaggcagaggttgcagtgagccgagatcgcgccactgcactccagcctgggcgacagagcaagactacgtctccaaacagcaacaacaaaaacacaaaagaccaatacgttagaatcttaactagctttcaaagaaaaaacttactcctgttaacaccaaacagatttgctcccatctataaaacacagtgccactgtgctcaagaggaagatgtcagagacttaggcctaactcggcaagtcttcccagagtagctagtcctctaaaatgatgctttaataggcttaacggaaacaatctcatttacagtgaggcttccaaatggtgaacacggtaaagagcaaatcagcaacattaagtgcacatttgtttgtgggaaggcattaggaaagaggtttttctaagtacagtaattctaaaaatgtgttttcttagggaacaatagtaatatttagactaattgcaaatgttaatatgtgcaatataatttcagtctccatcctacatatacatttttttttaccaccagtactcaaaatgtttatttgtacttctcaattcctatcaatgatttctaatgctggtgtatgaaaagcatgcttgaaattgtttgaaataaaggacttagggacagagtggaatgctggaaatctgtaaaaggactggaaacgctggaatgctggaaatcatggtaggcgcatagccagttattttcgtaggcttctctatctctaattactcagcagaggtggttttattttccttgacagtctgctctaggaagcaatcagccaaccagtttgcaattgtagggtttgtaagaaatgaaaaacactgcacctgcaagtgttttagcatctaccactattcggcttacttacgtaacctccttcccaagaccaagtcagtaggattgtttttaaagcaacctctccatttctaggaggggcacaaaagctagcaaataccccaacccgaatacaagcgaggttgtggagaaagtaatgaaggagtttgtgtgcaaacagcggggaaaggaggttctgttgaattgtaccgtgtgtccgttctcgtgctgtacaggcaatgagtgtagtctgtgcgaaccgggtgtgtgacgtttgcttttcgggtgtacgggtctccgaatgctgcttctgctgtgctcaccaagggagcgcgtgtgcggcgtgtgtctgcgaagcgggcaggttgtgtttagttgtgctgtgccttggaacagtccgtgtgaacagaggagggcttacggttaacagacaaaataccgtaagcgcccttcctagagccaggcacagagacaacggcggcctctggcgccggcacaagggacagcgtggcccggatctcagagcctgggtcactcctcctcccctccagcgacacagcactcccccaacccttccgcccacctccgccgagcctcggctgcactcacctctctccagccgcacgggttcccctagcgccgccatcttctcccttaacctacagacccacaggaaatgacgacagaagggctgaggtggsggggcggggcctaggggaagccggaaaagtgagtaccggctagtatcgcgagatcaggaaggtggccgagtgtgtcgccgcggccatcagggtaagggtacctggacttgcggctttttaggtcggcctggctccgctccttccgcggtgacgaggtcccccggcctcctagggttgggaagagctgctttcctgactctcgttccctgcctcaggcttcccttatcccaatcgcttcgaacccttggctcagcgtagaggagtcaagcctggattctagtcccaccttgcccattagcagctctgtgacctgggactgttcacttaccctctctcagcctcagtttccgcatctgtacaacgagaggtcctatctcttaggtccttacaatttttaaactctgggattcggtggcaattaaatgtgtaatgacatgttgtcagttctcaatttgtgacagcattgctttaaatttraaaatccacggcttgaatcttccctccaaatctgttaaggggtggaaagtacaaagagcatgaaacatatctgggtgagggagagaacaaggtgctttggtgcaccacaaagtaacaattttataagcagctgattcttataaaatcttaagtaawtgaaatattgtgaagcaaataatattcttaatgcattacagatttttgagccacttctgaaattttcgcgaaccaagaagaattttagtatttggatttgactaacatttatccaagcccttagtctgtactgatactgtggtaggtgtgtttacatccagcatttcaacacttcatgatgggactgttttaataacctgtttgcccctggtccaccctttccattcacctttagtattttcttctccaaatccatcatggatgccaccactatgctcctttttctccccttgaattctgatttcatcatcacaagttctgttcagaaactttcaatggtttctctcctgtttcctatttctaaagccttgcatactctgaccctaactcatccaactaacttcatttctcattaccactaagtgcaaccaccacttcagtccagatagtatagtttcaaccatatttattcctgattccaagtctttttgtttgttttagagacagagtttctctctgttgtccagactggagtgcagtggtgcaatcacagctcaagagagcctcctgtctcagtcttgccagtagcgaggactacaggcaagcaccaccatgcctggcaaatttttaaatttttagtagagatgggggtcttgctatgttgcccaggctggtctcaaactcctgagctcaagcagtcctcctgctttggcctcccgaagtgctgggattacaggcgtgggccactgtgccaggctccaaatcttcatttgtgttgttcttgtgtggaatgcccttcttcatcccttcctagtctccaaactttgtacacactcagttgaacccatttcgtgggtccctgctgaaggcatgccacttctaccaagccttttctccatattattccccttttttgtcctctgatggcctaaatacgttgcagtaacactcaggtgcttatctcttactcgttgtcatttttttttgctgcaaatgtgttcaagaaatgtttattaaacacctaatatataccaggtgccttgataggaataccaggtagagcaagacaaatgcaaacattgcccttatttcttcaaatattttttctttccattctcttgctcctctcctttggtgtgactattggagtcatgtgcatgtacataatatacatgtatattgaactaactggcattgtctcacagctcagtgacgctctgttcatttttttttcaagattttctttatgtttccttttggataattgctatgttttcatattcattaatcttttttcaatatctaatattgaaatcctgtccagttcattcttcatataaaacattgtagttgttgcctctaccagtttgatttgggtgtgggtgtgtgtcttacatcttttatgtcttaacatgctcaacttttctgcagcttcttaaacacatagactacaattataatgacagttttaatatccttgtctactaattctatgatctatgctatttctggcatagtttctattgattgatttttctcttcattacagttcataatttcctgcttcttgcatgcctggaaatttttttttttttaacaagatgctagactttgtaaaatttacttacttgaaaaacaattttgttcttttgggttttgattttttttaggtggaaccaattcagtcatttatgtagggttaattgtatcccactactaagacagtacccttcaaagttccttaccccatacccaaagtgaattatgtggtttttctactttggtaggaacgggaactattcttaggaactgagtttgtggacttttttttgctcttttcctttccctgtctggtaatttatttcttcttctttcttccttctccttcttcttcttctttcttcttcttcttcagatggagtcttgctctgtcacccaggctggaatgcagtgacgcagtctcggctcactgcagcctctgcctcctgggttcaagtgattctcatgcgtcagccacccgagtagctaggtttacaggcacctgccaccgcaccctgctaatttttgtatttttcgtagagatgggatttcaccatgtttggctagctggcctcaaactcttgtcctcaagtgattcacccaccttgatttcccaaagtgctggattacaggcgtgagccgccacacccgggtggatgtttaacacatgtaatcatcataraatttcagaatcctaggaatagatagaagatcctagaagtttccagagaggataaaaaattatattctaaggattggaaatcagaacaagattgtacttctcctcagcagcactggaagctaagacacagagagcaactaaatttttagaaaaaattatttgcaaactagaattctatatccaactgtattaggtttctagggctgccataacaagatacaacaaactgggtgacttaaaacaatagatagtcactgtctcacacttctggaggcgagaaatcagaagccaagatgtcatgtgctctctgaaagtgtagaggattccttccttgtctcttcctagctttctggtagtttgctggcaggctttggtgttccttggtctgcaactgtattacttcaatctctgttgtcattatcacatggcgtcttcccttgtgttatctgttgtcagctggaaatcatcttacaagaacttcctatttcggtgtgaccttaccctaaattagttgcatcatcagtgacctcatttccatataaagtcacattttgaggttctgggagttagaactttaattttttttttgaagggaagagatacagttcaccccgtaacaccaaccagagtatcaatcaggtgtgaaggaataatgaaaaatattttacacatgtaagttctaaaaattgttaaccttccatacatactttctcaagagctactagaaaatgtgctccatcaatagtaggaagtgagccaagccaagtacagtagctcatacctgtagttcaaacaactcagaaggctgaggtgggagaatcacttgagcccaggagtttgaggctgcagtgagctatgattgtgccactgcactccagcctgggtgacagagtgagatcccatctttaagaaaaaaagttagctggccagggctggtggctcatgcctgtaatcccagcacttcgggaggctgagacatgtttatcacttgaggtcaggagtttgaacccagcctggccaacatygcgaaactccatctctactaaaaatacaaaaattagccaggggtggtaatcccagcccctcgggaggctgaggcaggagaatcacttgaacccgggaggtgcagtgagccaagattgcgccactgcactccagcctgggcaacagtgcaagaatctgtctcaaaaaaaaaaaaaaaaaaagttagccagtaaaggtatgtgtaatccaagaaaaagaggatccaatatagaggagattaaggtgatttcaaaatgattagtgtatcagggtgcctcacagaaacagaaccaatagaatatatttagatatatagaaaggatttattatgatggattggctcaggagactacagaagccaagaaatcccataatttgctgtcttcaagtgggagacccagaaaagatgctttagttccagtccaagcatgaagaaccaaggcctgagaaccagaagagcctctggtgtaagtactagtctgagtccgaaggcctgagaactgagaacactggagtccaagggcaggagaaagatatctgagctcaaacagaaagggcaaatatgccctccctctgtctttttgctctatttgggccctcagtggattggatgatgtctgttcacattagtgagagtgatctttactcagtttgctgattaaaatgctaatctcttctagaaacttcctgacacactcagaaatattgttttaccagctatctgagcatcacttagcccagtcaaattgacacataaaattaatccaccacaattgtgaagggaagcctagggtagcagacatgcagctggcaaagagagcaatccattcacactgaagcagggcagaagtggaggtgaggtgttgccaagaaaaaaatgaaatatgtagttcaccagtgtgggtgagcatactgataacacatttatgcattttagtggagagtttgggaataaattggtgataggcacatagaaaactaagcaaacgggaggaaataaagcaattattaactccaaaaaaacctgaaaagccatgtaataaaggaaatgtttatgagtataaggtggatcagctgcatacaacatattcagcaacttttaatttttttgagtataaaccctgtaatgctgtttgcatttttaaagacattttaataaaaatgaaaattaataaataggaatcacaatactaaagataatatttgatatattttattttgaaatatttaatttgtattggcctcatcttttcaatttgaaatctttgctcttgggaaggggaataagaaaacttaattataagcacaatttgctgaaaaagcacagacttactaggtttaaagtagtgtttaatgattagacaattttcatttaatagatttgtacatctgctttgtttggtatttgaatctcattgtgctgtagtctatggatttgctacccttgatcagatactcacccttggttcaatcaattctatctggtacagtggaagtaatggttcacccaggtccctgataagtctgggggtagaatatcttcccttagaaaaggctagagtacagcaggcaatgtatttggcctgtctaatatagtacattacatatacatttgggaaaaatgttgcaaattccataagagtagcagcctgacattatgggaagagcrcaggactaagtgtcaggagctctggttactaatcatagatgagccaccttgtgatagtgtgatcttgacaatgtcacattctcactctggacctgtttccttatttggcacgaccactgaataagatctgtctgagccagctgcagtgacatccacctgtrtgtagtcccagttcttggaagactgaggcaggaggatggaggccgggagtttgaggctgtatgattgcgcctgtaaatagccacttttcttcagcctgagcatcacagcaacaccccaaatctttaaaaaaaatctgtcagcacattaaaaattactttactctatgtcaataaagtaattaatataaatacagattcccttgaacttcatggacttatcaaatcagaatccttaggagaaggctctgggaatctatattttaaaaaatccctagtgattctgacacagctagcctgacacagggacctgtgttcaggatttaaaagattatttctagggcctttttctactaaaattcagtttccctataaaactgcagagaaaaattattgagaaaatgattttcattataaaagaatatgtagctcttgcataaagggcagcatttctagctaattttaaaatttattttatattattttaggcatagataaggaagaaaaaagttttggaaactacttctgagagggaaaaatatgcctgaaattaaccaacagccagcttgtacttaacatacaaaataaacaaaagaatcaactattgtgtaaggagagaaccccgaaatgttcctcgttaatcgaaattcaagagtattagcgtcgggaaagatctagagagtcaactccctcatattaaagaagagaagatggattgctgtcctacattcaaaggaggccattaggagcatgaaccaagggaagctggttttccttctatgcctctgccaggttattaaatcaccaggcctcctaatcaagaattgctcttcgtgtggaagaactcctcttcacctgttgcttcctcatattatttcctgcctcagagatgtagaggaactgtaaaattagaataggatgtttgggtctagacaaatcccagtgaaagctaaattatggaaatttagtctttgtataacaaatgaaaaccctaagtaggctgccaaggtacaaaagctttcttaacccgagacattgcaaatacaacgtactaagtgaaaaaaggagtgggtggggaacagtgggagtagaaggctgtctaaagggaagctaggaaaatggaaagtaatatggagaagcmacatgctccaagtggagtgttttactatttcattgcctgttgaactgtacacaaataggcactactacataaaatagctatttgaaacagttatgccattgcagggtagaacattactctcaagtaaaggcttctaactgtacaattaaagtctcaatcttctttttttaacagaatttctctgatgtactcagcaaagtaaaattttgaatagattattttatttgaagtgaatgatattgtcaaatgttaaagagtctgcattttaaaataatttaaacaatatataaaaacacttggcctaattaagtaatcataacagtatggaaaaatctcttcaagagcacctttgaagggaaattttatcacagatctcagatcagaacatagaaacccatctgtgagttccagagatctaacataaaccctacttttccttgtaggatgagttgcagattctattaaagtgtaagggttgacttttttaatgtcacttgtttcatcatcactctgtagtacatgtaaaggcacagattgatgtatttttctggcatcttcctgacgcacccttgccctatataaatcggtttgccaggatcttgttgcttaaattagcgattgcaaactcttggtcctgccaacacagccgattgtgccaaggttctcagcatctactggcacatgaactgttgccttttctttggctttctgcatgtacctggggccatcatccttccttcacaaagcagcagtctggcttagttgtccctgagaaagacttcaggattggttggactcaactctggccctcttcaggttgtgcatcctgcacaatgtattttcagccacacaatgtattgttcaggatttgtcgtgcacatacttgcagattggcagagccaactgccagagatgagaaccttttaagttgttgtcaaacgtcataaaatgtgttccgtgattaattttgtgggcacagattggtttttgcacagagtccaaaatttaggatatgtcacagtgactaaatggcaccggcatgctgaatgaatttggaatttgttttgtcaagtgtgggagcaggcacacagatgggctttgatccagtggtgctgcttggaattctcattatagcaatgatgtcmcttgtcacgtggagtaagtgataatgctgccaaattgtggaaaaagcaaggcaaataggaaagtacacagaccaagagaaaggacttaggtagcacagtaagctttcactatcagatgaatggacataaacattgcttttgggctgccaaaaatatgcatagtaaaaatacaggcagaaaggaaaacttccaactgaaagggcccttaaagtagggcccctgtaatccaagaagtcttcacttcttagagaaaatcaagtaaagcaaacatgtccttgatttttatattaggctatgaaagaaatttctgagctgcaatcaagagtctttctgcaatatctaaccaaaccaaagccaaagtattttgctttataaaaaaaacctttgtctatgaagaagatcagcagtcatgctgggaaattgaaaaaaacaaaaaccttatagtggcaaagaagtacagtatactctcaccaagcatgcacatcagaattctctgtagggctttaaaaatatattcttgatgcagctacagcagtgcttagagggaaatttatagctataagtgcctatattaaaaaaaagaaaaatatcaaattaacaacctaaacttctatcttaagacacttaaagcaaaacaaactaaactcaaactaagtagcagaaaggaaacaacaaaagttagggcagaactagaataaaataacgatacagaataggaaaacatagaatataaataaaaacaattgagaaagatgatgaaaccaaaatctggttccttgaaaagatcaacaaaattgacaatgctttaactagactgaccaggaaaaaaagaggaattactaaaatcaggaatgaaacgggacatttctactaaccttacaagaataaaaaagaatattaggaaatactataaaaatctctctctcttgccacacacgcagtatatactatatataactgaatgtatgtcatgtaacttatctaatttgttgaaaaatatatttgtcacacaattcacgtcagagggtcaccatgtaaattttgattcaaaaactcgagtatggcatgaacatttgtattttctgaaaatataaaggtttttgtgagtgacatgtactttttgttgagaaccattgatctaccacatggaaggcataaaaattgtggaattacaattaaatatgcatcaattagaattaggtatagctgcatataaacacaaaaatccaggctgggcatgttggctcatgcctataatcccaactttggcatgatctcagctcactgcaacctccgcctcccgggttcaagcaattctcctgcctcagcctccccattagctggcattacaggcgcctgccacgacgctcagctaattttttgtgtttttagtagagattggatttcatcatgttgaccaggctggtctcgaactcctgacctcaagtgacccacccaccttgaccttccagagtgctgggattacaggtgtgagccaccgcgcccagctattcccagtattctgggaggctaaggcaggaggatcacttgaggccaggagtttgagatcagcttgggcaacatagcaagaccctgtctctacaaaaataaaaaataaaaaaaattagctagtcataatagtgtgtgcttgtagtcctaactacttaggaggctggggygggaagattgctcaggcccagaagttcaaggttgtagtgtaccactacactccagcttcggtggcagagcaagaccctgttttggaaaacaaacaaaaaactattttgaaaaaaaaaaaaaaactcacaaaagtccaaaataatagtgcatttaaagtgaatgaaagaaatccatagataggtaacttggtgcaagtatgacagccccatggtatcaccaggatcccagcttttttcattttgcatcaccatcctaggacatggcttccatagtcaagttcactcataatctgagatggctgcaggaatttcagtcattacatgtgagttgcatgccagaaaaaaagaataaggaattgcagaagggtaaaaatcaccctttccagttgaataagcatctttaaagcacccttttcagatgtccaacataatattttgacctatatcttcttagccagactcagttacatgtctccatcttactgcaaaagaactaggaagtaaaatcttttattttgagtgacaaagagcccagctacaaaatctcaactctgtccccaaggaagaaaggtaaaataaatatggggataagccttcagcaagctttgccatactacaccacaacttctggaaattacctttaaacctagttcctgcagcattcccggtcaatagatttatttcccttcattggaaagttttcaacttaactcaaaaacgtttactagcaggtgctacaggagagaggagaaatgtcagatgtgttcatgtccttgaggaactttcaggcaatttcagcaaacggaaactacaccaatgagacagtaggaatgttatctacctgtatgtactgcaatgctatgttttatggtttggaccactactttatattttaaacctaaaaacccattgtctgcaaactgactcaaactaaattgaaataagccacattactgttttaacccaaactgattctgaaagctagtatttactcaactacaaaccattcagtagtgtgaagattaaacaaacaagcaaacaaaaaaaccctctccagatcctccagatccatgtttccccttccttcctttcctgtctgtctctctctttctttctttctttctttctttctttctttctttctttctttctttctttctttctttctttctttccttctttctttctttctttcttttctttctttccttccttccttcctttctttctttctttctttttctctttccttctttcattctctttctttccttcttccttctttccttctctttctttccttcttccttccttccttctttccttctctttctttccttcttccttccttccttctttccttctttctttcttcctttcttcctttctcgcccaggctgaagtgcagtggtccaatcttggctcactgcaacctctgccttgattctcctgcctcagcctcccgagtagctaggattacaggcacctgtgaccatgccagggtaatttattttttatttttagtagagacgggatatcaccttgttggctaggctggtctcaagctcctgatctcaagtgatttgcctgcctcagcctcccaaaatgctaggattacaggcatgaaccaccattccctgttcttagtgtttcttataacttcccagatatgaacaaaaccttgcaaaagagcatttcaataatctttagcttctcgatcttccaactgatgtggccatcaaatggctagtcagaagacaaatagatgaagacaatagctttattaaagtcaattcaaattatgacctactatggtaagacactgtgctggggtctagaggcaccaggacttcacccttctctcaacagctcacaaacccagtggaaagggtcagacatataagcaaccaacagaaacaaaggagatggcattaaatattattctgctcttgttgctttagttgttgctgcttattgttggtcttgttgttgctttagttataggggtttttaacagagttgcaaagtgttgtggagtaatgagtggggagaaatgatttctcactggaggtaaccagaaaacagattagagagcagtgattctcaaccaggggcaattttcaaacccataggacatttggcaatatttggagatatttttaatggttatgacaatggatagatggatagtcagggtgagggttggtactggcacgtagtgagtagaggtcagagatgctgctaagcatttttcaatgcataagacaactccctacaacaaagacttactcagcataaaatgtcagtagtacctaggttgagaaaccctgcttgaataagatggatacgttgtacaagaaggatcagaattttcacaagtggatgaatggggacaagaatcccagagagagtactaaatgagcaaagccccattggaaaaaaaatataggccctgttcaggaagtaggagggagggcttcagtggggtataggttacacaacggaacctgaggaagctgtaaaaggaaagggggcttagcatttagattgaggctgagtgcaagctgctaaagtttggattttattcttttggccagagtgagctattgaaggatttaaaaaatggaagcaataggattaaaagtgtgttttagaaataaaatcagagggaaaagctttgattctcatagcagattgtaagaaaattcctttaagggagtcacccttattttgggtgttgtctgatgtttattaacctctggttgttggaaaatagcaaaactgcagagaagggagaaattctgcatatttgggcctgggttggatgggcagtgaggggtgaggaaggccaagggaatgagagagtggtgcaatgctgatgtttgtgctgtgagacccttcttcatggcttccagagctttggtaatctttacaaaaattataatatgcttgtgcttggatttcttgtgcaaaatgactatatttgggttgattgtgaagattgggagaggaggttggtgacaatggtgcaatggtagcatagaagtaataatttggatgcttctataatgggcagtttcttctcctacttcttcctttcagatcctgtagtcctgtcccacagaactgctcatgcttctccagtacgccagtctgcatcatacttacatgctcttctttctgcttggcacgctttccttttctaacaaacttctgctcatccttcaagacccacttcaaatgttccattctctgctctgccctgtatacaaaatatcaatattgtattgtgtttgctaaagtgtttattttccccaaccagagagtgagccccttcacggctaagaatggcattgtaatcatcactgactctccagcaggtagcaaagcatattaccgaagctccttgatcatttgctgaatgaaccatgggtaataaaatcagtgagtggcagaaagattgtggctctgggcctacatagcctttgcctggttgctgttagaactacattttcttctctttattaattttatattttaaacttcatccccaagcttaaacatttccttccaatagatgatattctatcaggaagagaaaaaaaaaaaaacccaaagtacaactttaatccttgagtgaatgggcwaaaatcaggtttcaatatgctttttagaatacttccatgtaattaatttaacattgacctgcttattaagagtccattattaaggaaacaattgtaaaagtcattaagggcatttccacagatcttagctactgactcatcttgctagttctcaataaacgtgacctgaaaatctcycattcgcagtatcaggtaaaatgttatttttctaaccattaggaaacatttactcttgggctgatttttatgtgtttttattgttgttgttaatgtgaagaaagtcctatacaggaacagctgcgcatatgggtaaatgcctgggaatggtttaaagatgccttttcaaaacatcttccccacactggtattatkcaatgcctctgtctcaacaattaataagtatttccttttgagttaaaccatgaagtatatagtcacactagctcattttgagatagggcaagactcttctggcatcagaaacccatatttggaatgtggatattttgtcttttctgtttgttatttcatcttatgttttccttcaggatttagtaaaattctttatgaaagtataagctggcttaggttaggggttttcaactctgctagggggcaagtttaatgagggagccattcatcctggatctgaggaagtcgtaaagatgacaccaaagtttcaaagggccccagaaccctggcaargttctggcatgaccctcatccctcgtcccccaacactgacagcctctccaccacaatctgcctaagagacaatccaggacaatctcgccactcccttcatcccatataccaaactataaggtcattcctaatagtctagayctacatcctgtttgtttattccctattctgaccccattgcccatttcccacttccaccccttttctgtgctctgtggcccattatcggctaaagccctcatattctcaaccttttctcttagtgtctcctacacattatttttttaactgaaacctggacctctgagtcctgctttcttgtagcctggttgagtggtgcttattttcttttccacacccctttgagttaaggcaggaagcctgtaattattccaggttcctttaggatagagtatgactcttgtgagaccagaaacatatagcctatatttggaatgtgaatttgaatagaattccggacttagagatggggagatgtctccctggtttttattgctcctattagaccaagttctcttctcccttggtgtgaaatttagacatcattaccagctaccctttcttattgcagttatctgctgactgggttactttccacgttctttgaagatgtaaactcccagcttatccgcacttgtttgtgacaacaatttgtctgtcacaattcctagatgatcatttcaatactctctggcatctgagtcccttgacctcttctcctataatgatttcattctcttccaacctcagccactcatgctcatggaatgagccattcatagcctcccctcaactttgtccttatcaataactcctcatcttccataatctccatctcccatccaagaactaaccaggtccgaccatgcttagcttctgagctcagacaagatcaagcatgttcagggtggtatagccatagatcaaaatctcaatctcaagcattctaccctaggcccaccacctcatatctttccagctcactgtccctcacattctgacttaaaaatccgttgacctaacaatgaatttgtcctaccatcttttcactgtcctttacatcctgtgtatccttacctccttatccatcctagatcttatagtctatcataatcatcactcactttatacaactgtaactccctggagcctctttcatgttttttttccttctttggaaaacccccaatcctagttatttgcagcccttttcttactctgtacctgttttctggttgctgaacttggctggaggaaagtacccaatctactgcttggtatcactttaaactcatgagcccccaaatttaagtgggcccagcaattctaattcattcaaagagtttgtgaactcttgcttcacaaacatgatctcaaaccttctgctctctcctcaaacttttgcgacttcttggttctttattctcagctgatggccttgatttcttttacacggcgaaaatggaaacaatcagaggagaccttccacatgtggttcccatcacttcttccaaacctgcttgcatcttcgcctgtgtcccctcatccattctgtcctctgaggaactgtccatgggtctgtccaaggcacagccctcctgttctacactaggtcccaggatctcacatctactcaaggagatcactctagcaattttactctagccattttggagaggctctctcttcctgtttgtttttttttttaatttttttaatttttatttatttatttatttattttagatggaatcttgctctgtcacccaggctggagtgcagtggcatgatcgtggctcactgcaacctccacctcccgggttcaagaggttttcctgccttagcctcccgagtagctgagattacaggtgtgcaccaccactcctggctaatttttgtatttttagtagagacggggtttcaccatgttggccaggctggtctcaaactcctgacctcaaatgatccacgtgcctcggcctcccaaaatgctgggattacaggcatacrtgatgacgcccagccaaggctctctcttcttcctcctgatcaatttatgtccatcagtatataaatatgctttatttctatattaaaatactttcccttgatctcaagcttccctgcagctacctttgcatttttcttatcttctttataacaaaacttcttcaaagtattgttcatacttgtagtatccatttctgctctcttactctctcttcaataactctaagtagacttttatctacaccactccaccaaaacaaccccgtcagcatctccagtgacttccatgttgtcaaagcgaattgtcagttttcagtccttatctcactcgaaacaattgatcactgcctccttgatacattttcttcatttgatttctgggatatcatcctttcaagtctgagcacttacagtgtggccatctcaaatagagatgtctgagtcttctatcaaaatcttcgctgaccttattgggtactttctcaatctttctaatggtttctcttacttggcttcttaattttggaggaccctgagaattctatccttagacctgttctttgtctacactcactcactagatgacctcatttggtctaataactacatactatctaataactatatactatcagtgctatcccatacaaatataatgcaagccacattgtagataggtgagtcacagatataattttgaattttctaatggccacattaaaaaatgaaaaggaaacaggttagattaatttggtaacatattttattcagcccaacatattaaaaaattaacatttcaacatgtaatcaatgtaaaatgagtaatgagatgtttttcattttttaaaaatattatttgaatttcagtgttcattggcatttatagcacatctcaatttgaactagccacgttttaagtgctcagtagctgcatgtggctagtggctactatattagatagcacagacctatatgctggacattggcttttactgagtgagatagccaatggaaaggttttttatatacaaagttttaaatttaaaaatatatatacagatagggtcttactatgttgaccaggctggtctcaaactcctggcctcatgtgatcctcccatctcagcttcccaaagtgctgggatttacaggcatgagccactgtgcccagcccaaatggaaagtgttggggagggaaatgacatgactactcttttttttttttttttttttgagatggagtttcacttttgttgcccaggctggagtgcaatggcacgatctcggctcactgcaacctctgcctcctgggttcaagcgattcttctgcccagcctcccaagtagctgggattacaggcgtgtgccaccatgcctggctaattttgtatttttttttttttttagtaaagacggggtttcaccatgttgggcaggctggtcttgaactcctgacctcaagcgagtcacccgcctctgcctcccagaattctggcattacaggcatgagccagcatgcccagccatactactcatttttaaaaggccatcctggctgctccgttgaaaataaacaatgtgggagtaagggggcagcagagagaccagctagaaggttagtataggtcaaagatgaaggagagagtgggatagactggaagaaaagtggtatgttgaaggtagaacatgttgaagaataggatttccagatgaattgtacagaaagaaagcagtccagggtgatccctggatttttaatctgaaccactggaggaattggaagaatagagttgcctttaggtgagatggggaggactgagatcaataaattttggagaagcagagatcagtagtttgaattttggatttgttaagtttgagttttccattaaacgaacagacgaaaaccacaaacaacaacaaaaaaatgaagatagcttctgatagcaacatgtgtcatgaagaaaagaaaatagccatagagtgactgaggaggagtttcttagacaagcttgtcagtgaaagcgtctctgaagaaggggcatttgaactgagtcctgaatgatgaaatgaggccagccaaacaaaaatctggaagaaaatcatttttagttagagggtactacaaagataaaagcttggaggcaggaatatctgagagacagaaaagcggccaatgtgtctgaagtgggtaagatggagaagcagatagggaccagtcatacagtgccttgtcagtcacagtgaaggagtttggatgctattttatgcactgaaggaagcctttgggaggttttaagctagacgtagcatgatctgatttatgtattacaaagaaaactctggctcctggatggcgcatggatttgtattatactaattattattgctattattattacaggagacaaaagtagaagcaaggagagcaattagaagcttttacactaactgggcaatacattatggttctttccactacacagctcttcttctcttgcctctaagtcttttcttgatttcaacgaattcctggagtgagagaatgtgtattcttagtctctgtgccctctgacatgcccagcactatgtcctgcccacagcagaaggctcagtacttatttttgagtgaattatatggctcttctcatcaaggctgaggagcacatttttaaaaaatatatatttgtattttttgtacatagcatattgtctgtcccatagttaagactcaatgaatgtctgttggagtggggcaagacctcacttcagataaccagtttactgagagagatccttggataggcagaggcagcaaagagggtttgggccttgctagcatggagggtaggaggaaggcagggaaggtggagcatgttgagagaagagaggtggataaagtcacccagctctgagcaggccaagggtagatttggtctatattttaatttaargctggcctggtttcattgatggtgatatgatccctatgtgtgggaataggtgaaatggtttgatcaccatgggaccataatccattacccaaagccttcattaaggagataattctgttcagcctcacacatagccaggcctacaggaatttgccatccagcaccaatactgatgctacaagtcccagcaaacacaggatggcaggccaaattcaagctttctggcactcctcctcttctggctgagcccaatgtcctcaggcctaatctcaggctggcagagagttaagtgctgggctgagtctgtgctttgctgcatgtgctggacttgcatttgattctgtccaaaagaggtctgtggaccagagggatgacatttggcaccaagaaagtaacccaggtgtctgtctctttttcagtcccaaagccttattcttttccctcaagtctatgcaatcgtttggaatccatcactcatcacctagaggtttcagtgcctttagattagggttctrcacccatagctgatgatccactggactaccacacttggcacctgaacagagccaacaggactggttacaaattcgttgttaattactgtgtgtaattacactagacccaaggttggagggagacaccctactctgttgttgtcttatatacgaattctgtataattttttaaaagcscaccatttttactttctaattaggatatggggatttggggcagcaacctttgttatttaatcatgctttttctggggaggggaggagaggaaaatattttcctttttctatcaacaattgctctcttttccgcattaagagggtggaaacttggttcctccctcatcccctttaggcaaagagtccatggctcagattcataaaggttgttgattttgactttgggttgccctactctgtttttccccacctttcatgctaactaacacaatacataagtcttcctagccagcactccctaagggtggggtagaaacacagcccattaaaaaaattttttttaaagctttgagtaatctcctttttatattcacccaaatgaaccaggttggtggcatattctcctttgtttttacatctgagacgtacttaaagtttaaatagtgccagaatgaatcacattgcttgtgttcttatacccagctgcaaatcatgccaggctcaagcccaggaacacaagattgcatgcacgcagagagggtcactgctgtcttatctactcctgctctgctaaaaaattgcatttatttatttatttgtttttgagatggagtcttgctctgttgcccaggctggagtggcagtggcatgatttcagctcactgcaacctctgcctcctgggttcaagcaattctcctgcctcagtctcccaagtagctgggactacagggggcctgccaccatgcctggctaatttttttgtatttttagtaaagacgggttttcaccatgttggccgggctggtctggaactcctgacctcaagtgatccacctgccccggcctcccaaagtgctgggattacaggcgtgagccaccacagctgaccagaaaattgcatttattatatactgccccgtccccatcttggcattctgatatcattgttgcccatcctttccttcccattgagagagtcaacatttcccctttcccatcctattctcattcctacttctagctttactatctactgtataacctgctgagcctcagtttcctcaggagtaaaatggagataataagaaacacctgccttgccagtgtcacacagctattgaggatcaaatgagataatgggataggaaagtgctttatttctacaaatgcaagctattgtcagtatcatttacttaactattcttcgttagctagctacgtagtctagcttaccttgtcgtgttccaaatgtggaaggcttgctgtttstggtaagttgaggaccatttcaaagcctcaagaaaatgattagaaatgaaccaatgkgagaacattttctttgttgggtagttcatccgattattatgtatgttgtttgtcttcttttmatttggatataggttgccttcagctgccagtactgtgaaataagagacgatattataaatcctttggagattaagcatttccatcctaatagctgctgctcaaaatttgatttccccttgattttcaataaaaggaggataacagaatgttattcattctaattataaagcaacgggaattctaggcattactttacaaatagctgctttcatgtcagaataatgagtgttgagaggaagagctctgagccctttactatattctttgttttcattatttttgtacctgtaaggaagatggacacattgagggacagagactccacagaagttgtctgagttgtgacagcttctcatcttctttttcatttccgcatttaacatattttctacaggctttgtaaagaaaataactcagtctatgtttacaattttcacactggctttaacttattttaacttattttatttttggttggtgttcaccctgggtttctgagggttttaagctgtctgcaaaaagctgctatctttgtctccaaagaatggttaagccacttttgtagaatcagaatgttaggtgaagcccatctttacataggaaaaagcaaaaggaactaatattaattgaatgttcactacatgctgggtctcatgcgaggctctttacacatatcattttacataatcctcatagcagctctatattatataatatgatctacatttttttcacaagtaaaaaaatatttaaagggagcaagttacatcatcagagcttaaagatacctgtgctatacccctatgaaaaatctaattcactatgtgttttggtctatggcatttacatttttgaaacattttatctttcctaaattgtagttacttccccctaccttgacagatagatattgtattgtaaaaatacaatagaacaagtatcttttaaaaaatatgaaaacaaaacatttctagtcaattgttgaacttctttcaaagttctgggttaatatcaggtaggccttttactaatgcattttatttccttctgtctgccaccagctggagctactgtataaaagccaaccattttgagttcaaaatataactctgcaatatgaaggtagactacttttgctcctaaacaatttgagaataaattgcaaggaattaaagattgagaaatgcaatgtcatasatggttaagtaattgctattgatcacttactagttatgcaatttgggcaaattattttgactgtgactcccagtttagttagttatgaaatggttataactaccaatcttgtggggatcactgtagggaaaattaaatgttaagaaattagtaaggagcctaccacatagtatgtactccacatgtgttcattagtatcattggcagttattattattcattttgttatcagtatcacagccccagggatgctcaattcattgtaattacaattcatattattactcattatcgtgtgcctggcaaatggcaagtgccacttgacctcccattgctcagtgtgtgatttttgggtttcagtrtggtggactgtaggatggcacccacacaaagaggcattctgcttggatgtcaaaggaaaggaacctgtgagaggcatttttgaggttgatcgggtcattttgggtcagagcagtatttcccaatatatgttctgtaggattcttgtctcaatggatcaaataagaatgagaaatatmccatatatatcccttttccacttcacggagccacagtgcatgtaagtatatttaaggctctgaaaaatactgtgagaatcaacccttcttctatttatacctaatcataagtgatttctccattttctccatgaaattttaaaaagttgatatgtaatatataaatttagatgaatataggtattcatgatttcatattatagaaaaatatgtttagaaatatggcttttaactcaaattttatgtcttttttccactcaaattttatgagaaagacatcagtgttttcctccttattagcaccacctttggagtcatgtaattttctggagcacttactggctcactggtttgagtcacagcggtttttaaatgtgtatgatttgccacagtagattttatttctagttataagtatccgtttgtataatacctgaattaaaaaattcatcctagtgtatttttataattgttataataaatgatctttaaaaggttttttttttaaaaaaaaaaagcaagtaaaattgtgaggttgtaatttcagaaataattgtgaattttagttaaatttactggccttccatttaatactttttgtcaggtaacctctactaatttgacaccaaaactagcatttatttggttaatatgttcgccctaaataatacgtggttgataaagcaattataagagagcccagtaatacaggagctgctataagaactggaatatatgacaattctttcttttctgagggataatttgaggaaaaaccttgtctcatatctatatttacataacccagtgttgtttgtgtgtgaatgtgtatatgtgtgctgaaatacctstttacgtgctagaaacaccctcgtggtaatggtggcatagtgggtaattgttttcatcaggatttttcttgagaataggctgctagcaagtgctgtatgtgacagaaactttggccaaaaatctgtatttataactatatcaatttcttgtattttcttgttcattttaacttgcttttccctcagaatttaatcaagtcttcaaaaaaaattatggcagagtcactcccatccctgagacacttggtcaggagctttacagaaggttagatactccattaaggttagaatggtggtggattggtggttagaccacagaagaacccccaggggaaggtaaaggcctggggataaagacatggccctttttattctgtcatccttctctccttgtaatctcagyactgatgaaccattagaatctccatggaaggttttaaaaaaacacatgctgtcacctgagaacatttaagtcagaatgtctgggagtggaccccaagcattagtgtctctcaaagtcttcttcaggcttaaaagggttaaaccttctagacaatcatcagtccttttgtgtcttcctcctaaaaatttgaacagtagtgacctattagaagtcaagagttggatctaaactgagaaagcatctgtgcattgtgctctatttcttcgtgtagcttctccccactcccaagtcactcctaatatttccattatagatttagacacagaaaacccagatgaagaagctgcatgctcccgatgggatgggatgatattggtaatgggaagtctcatttctgaattgaatttgagtgctgggaaagcatattggctaatgtttcagtcctttggttgaatttgtgtctttgacaacaaatgcttgtggttgaagttatacaattctcatctctttccatttcccctcactggggcaggcttcctctgtgtatttttttcctctgatgggaaagagcatctgcagctacttttcttctcagccaatagactaccttcttgtgagttataaagaggataatatgtgaatcagaagccaagactagaacccttctcctatggacatggtctattcaggaggcaattttagagataaaaatcaggaacaccagttcaataataataataataccttagaagttaacataccttttaaaacactttcatatttgtcccttttctcttgaacattccaaagagattgacaggacaaataccaatcgcctcattttaagattaagaaacgcagatgctgtgaagataactcagttccccatgataacatggacagggacagaggtcggactaataactggttcttcagtaattactcaccttgagcagctctgaaggtcatagagtagaccagtgagtggttcccaaacttggctgcttactagaatggcatgggaggattataaaataacacaattatgccaacttgcctctggggctctaattcaatacacctgggatggggctcagggaatctgtcatttaaaataatttcttcatagttgttctcaattttgactaaatattagaattacctggcagggaggggctttagaaaatcccactggagaatcacttgagcccaggaggttgaggctgcagtgagctgtgatcatgctgctgcacttcagcctgggtgacagagtgagactctgtttaaaaaacaaacaacagcaacaacaaaaaacatttcccagattgtattccagacaaattaagttagaatttctagtgctgggacccaggcatcagagggtttgtaagtatctccaggtgattccaatgtggaactaaggttgagaaacactgctatagactagagctttacaaactctgtttttcagaatttcagcacagcaagaaggaaaagacaagtgtagaattgtcacatgtctggagtaagaagaccaggattcaagtcctggctctgcctcttgggaatgtcacttcatctctctgagcctcagttttttatttcataaaatgaggaaaatgagcagtacatacctctcagggaggccatgagggttagatgggatattgcaggtggaataaccaagcaccagctattcctgctgttttccaaagaactccattaagattgtgtgtgtgtgtgtgtgcgtgtgtgtgtgtttccccctagatgttccctttgtgttcaaagtttccaccctcaaccttacacagagttagacttgtagggcatgaaacagagctccaaaagtttccactaatgaaataaggtttggaaattaaaggaatgtcgttaaggcttctttttgctgttgctattggcatgttcagccctctgaaccttggagttatgaatctgccagtttgctaaatgyatactcagaagggcaatttcgttttcagaatacaaggacactttagctattactactcaccctccccattgctcctttctagctctttgagctcccctgaatgtgcccccaagcacctcttgtttattcccattcagcaaattaaggaaggttctagtatgcgtttcttatgcagcaaatgctgagttcactggaactcaggcctgctggagaacaaattaacccatactataaacacccactctcttgcctgacaatttgcactggttagaacagaaccttctaatattaggaatggtggtgtgaggatcatttcataaccacaaacacagcaaaagcaatcatgaaattatggatgactcattgtcaaaggaacacttggatcattttgagcaaccccctaggttgatcaaatgaggaaacttctgcaccaaactcacaccgtgccattagtcttctctgtaattgattgttattgccagatttgtctcaaccacatcagacctatttttaaacctctcataattgccttctcactaagtaaaatattgttttttgagcacctttcttttatttcatatgtgtctatttgtttctttcttaaactggacagtgcattgagaacagagattatttcttatttatcctaaataaaatagtacctggtgcacagtaggttctagtacataaatgttaaatgtaccataaattgtacattctttcccaatgaaagaggttgtttctaacaagctaaggaaactaagatttgctttgtataccactttctctagggttccatgaacaaataaattttgccatgatatatacacatatatattttagagaaagaaaggagcggggaggaaaagggaatggagaggaggggaagggaggagagaggaacaaaaggaagggtgagagagagataatactaagttcttgatactatttaaggtgttgggatacaaaaatgaacaaaactgcccaaaatacttgctctcagagtttccactcttgcgtgtgtatgtgtgtgtgtgtgtgtgtgcatgcatgtaatgaggaaacagacaaaaaacaaaaaagtaagtacaatataatagtgttagatcatgatcaatgctgtagagaaaaataagttagagtaagggaatagagagtgctggatggagtgggctattggattttaaaatggagtagacagggaaggcctcgctgtgaagatgaaacttgagcaaagacttgaaggaggtgaggctgagagtcttgaagctatttgggtgaagaatattccaggtgggaggaataggaagtgtaaagtctctgaggtgagacagaaattcaggagtttccaggatgacgcaggcagttggcctggagtggagcagtgcaggttagagtgtaggataagagatcacgggagtggctggacagctgagtggcagtgttgggagagctttggagggacctgtcattgtaaagaccagcctttactctgactgagatgggaaaccattgaagaatttgatttgatttaaggttgaaagggttatttttgctgccaggataaaaatggtgggtgggaaggtaaagagggaaacaagaaaatcagttaggaaattatggtaataagacaggtgtctcagaccatgatgatagaagaggaagtagtgtatgttaaagaatctgaatagatgttgaagatagaactaatagaattaaccctcagattgatcatgaatcatgggaaagagtgaaaaattatcccaagttgtttgatctgaatagctcagtggatggatggagttgccagtaattgagaaagggattcctaaagaagaggttttgaggtaaaggggaagatgatctatctgtctctttctctttctctagctatttatctacttatctatctatgtatctgtctagctgtctacatacttacctgtctgtghctatctatctatctatctatctaatcagatgttttatatatgaggtattaaaactcaagatgttaggtatctggctgaagatctcatagctaacatgggtgatgctgagtttgaagtgaagtattcctgtatagacttcaaaatccctagtttccctrccctaccagacctttttcatatatcattgcttttaatcttcacaacagcttttatccacactttaaaattataaaacctaaagtttagagagtttacacaactggcctaagtcatgcagctagtgagacagcagagattcaaacttggtctctgactccaaaattcatattcttttttttttcacttttattttaggttcaggggtacatgtgcaggtttgttatataggtaaattgcatgtcacagggatttggcgtgcagattattttgtcatcaagcatagcaccaaataggtagttttttattcttacccgcttcccactctctaccctcaagtaggccccagtgtctgttgttgccttttttgtgtctatatatactcaagtgttcagctcccacttagaagtgagaacatgctatttgattttctgttcttgtgttagtttgcttatgataaaggcctccagctccatccatattacactataaaagacaagatattgttctttttatggctacatagtattccatggtatatatgtaccatattttctttatccattctactattgctgggcatttaggtttattccatgtctttgctattgtgaatrgtgccgcaatgaacatatacatgcatgtgtctttatggtagaacaatttacattccttcaggtatataattaataatgggatttgctgggtcaagtggtaattttgttttaagttctttgagaaattgccaaactgctttccatatggctgaactaatttacattcccaccggcagtgtataagcattcccttctctttacaacctcgtcagcatctgttattttttgactttttaatcatagccattctgactgggtgagatggtatctcactgtggttttgaattgcatttctctaatgattagtgatgttgagccttttttcacgtgcttgttgactgcatttatgtcttcttttgaaaagtgtctattcgtgttctttgcccactctgtgggctttttgtttgtggggttgttttttgcttgtaaatttgtttgagttccttatagattctggactttattgtcagatgcatagtttgtaaatattttctcccattctgtaggttgtctgtttactctgttgatagtttcttttgctgtgcagaaagtttttagtttaattaggttccatttgtcaatttttgctttcattgttattgcttttggcattttcatcatgaaatctttgtctgctcctatgtccagaatagtgttgcctaggttatcttccagggtttttatagttttgagttttacatttaagtctttaatccgtcttgagtttttgtgtatggtgtaaggaaggggtctaatttcaaacttctgcatgtgactagccagttatcacagcaccatttactgaatagggagtcctttcctcattacttgtttttgttgattttgtcaaagatcagatagttctaggtgtgtggcatagtttatgggttctctattccgttccatttgtctatatgtctgtttttgtaccagtaccatgctattttggttactgtaggcttgtagtataatttgaagttacgtagtgtgatgcttgttgttttgttctttttgcttaggattgctttggttatttgggctcctttttggttccgtatggattttagaatagtttttctcattctgtgaagaatgtcattggtagtttataggaatagcattgaatctataaattgcttcgggcagcatggccatttttatgatattgattcttcctatccataagcatggaatgtttttccatttatttgaataagctctcatttctttgagcagtgttttgtagttctccttgtagagatctttcacctccctggttagctgtattcctaggtgtttattctttttatgcctgttgtgaatggaactgcattcttcatttggctttcagtttagattttcttggtgtataggaatgctactgatttttgtacattgattttgtatcctgaaactttgctgaagttgtttatcagatctaggagcttttgggcagagactatgaggttttctaggtatagaatcatattgtctgcaaacagaaatagtttgacttcctctctttctatttggatgccttctttctttctttcttttttttttttttaaaagagtttcactcttgttgcccaggctgaagtgcagtggtgcaatctcagctcactgtaacccccacctcccagctacaagcgattctcctgcctcagcctcccaagtagctgagattacaggcatgtaccaccaggcccagctaattttgtaaatttttagtagggattgggtttcaccatgttggtcaggctggtctcgagctcctgacctcaagtgatccacccatctcggcctcccaaagtgttgggattacatttgtgagccactgcgcctgacctggattccttttatttctttctgttgcctgattgttctggttaggacttccactactatgttgaataggagtaatgagagagggcatccttgtcttgttcaaattttcagggggtttgcttccagcttttgcctattcagtatgatattggcttggatttttcatagctgactcttactatttttatgtatgttcctccaatgcttaatttgttgagggattataacatgaagagatgttgaattttattgaaagccttttctgtatttattgagacgatcatgtggtttctgtttttagttctgtttatatagtggatcacatttattgatttgcatatgttgaaccaaccttgcatcccagagataaggcctacttgattgtggtggattagctttttgatgtgttgctgggtttgctttgccagtattttgttgaggatttttgcatctatttccattaaggatattggcctgaagttttcctttttagttgtgtctctgccaggtttgggtatcaggatgatactgacttcacttagagaggagtccctcctcctcaattttttggaatagtttcagtaggaatggtaccagttcttcttcatacatctggtagaatttggctgtgaatctggtcctgggctttttctggttggttggctttctttctacgaaactatcctccctattatttatgccttgcaaaaaggtggtaaagattaaatgtatgtaacatacccagcatatacaacgtctggtgcatagtatatttaaattaaaggatagctattagagattaatatagatctcatttgtgtatattgtgcttctacctaagggaactataaattcattaaaatacgggacttaaaataattatttagtggcctcaaggacatcataaatatttattatttattgagtatgtacaactactatatttccataataattagaaataataactttttaaaaaacaaagatgatagcaaccacaaaaaacatttattgagtgaatcacgttgggtacaaatgagtatattgtaaaaagtataccatcaacacactgacaatctttatcagtatttcctagtagaagaaacatgaaagtcggagcaggtaggactaaagaatgctagtgtacacaggaccatcagatgccttttagtagaagaggtctagagccttgcggaagagcttcccaccctgtacagagaatgtgttgcctgttctttgctttctgaaaactcttgcctattatcactctgtgattaattctgcactaggctgtctagagctttcacatttgggatcattttatccccgtctctcaaataagttcatgggttcattatgtcgcacatatcttatcttacatgcaaatgtaaatctgttgcacccttaactcacaggtctgagtattttttctaccacacaaagttttttgcaaaaattaaaaaaattgataacattaaatggttacctgagaaaagaagaaagtcctcaaacccttcactttaaacaactagaaaaataaaactaaaataaacccaaacaagcagatggaagaatataacaaagacaagagcagagagcaattaaattaaaaccagaaaaacaatagaaaaaaataaataaaaacaaaagctgattttttgacattaatgacattagcaaaactgaccaaaaaaagagataagccataaattattaatatcaagaatgaaagagggggtatcattacagatcccataaacactaaacagataataaaggaatactaagaacaactctatagacatagatttgaaaacctagatgaaattaaattaaaattatattagtgaactgaactttcagttaaaagtttccaaaaaagcaaccttctagctcagatggttacactggcaaattctaccaattatttgtggaaaattaataccaattccatacaatctcttccagaaataagaagagaacactctcaatttatgaggccagcattaccctgatgcaaaagacagcgtaagaaaaaaatcttttaaacacaaccaaatatacctaattaacataaatgtaaaaatcttcagtaaaatattaaccagctgaattcttaaacatataaaaacaataataatacaccatgaccaagtagagattgtagggggaatataagactggctcaatactggaaaatttttcattgtagtacaccatattaacagtctaaagaagaaaaatcacatgatcatatcaattgttgcaggaaaagtatttgacaaaattcaacattcattcgtgataaagactctctgcaaactagaaataaaaactttctcaacctaataaaaggcatacagaaaagctaacattatacttaatggtgaaagatgaatgctttttccctcaatttaggaataaggcaaggatattgatactttttgtctctgtgtccccacctaaatctcaccttgaattgtagttcccataatccccatgtatcatgggagggacccagtgggaggtaatttaatcatggaggtgtttaccctcatgttgttcttgtgatagggagtgagttctcatgagatctgatggttttatatggcgattttttcccttttgctcagcacttctccttcctgcccttgtatgaagaaggatgtgtttgcttccccttgtgccatgattgtaaatttcctgaggcctcctcagccctgcagaactgtgagtcaattaaacttctttcctttataaattacccagtcttgggtatgtttttattagcagcatgagaacagactaatacagatatctactcccatcattcaacaaacattttactgggtgccctatccagttaataaagttaggaaattaaataaaaggcatgcagattttcagatgatatgattgtctatgccaaaaatttcaaggaattcataagcaaattccaagtactaaaaagtgagtttaatgagattacagggtacagggttcaacacacaagaatcaaatgtatttctttatactagcaatgaataattggcaactaaacatttttaaaaaatttacattagctccaaaaaatgaaacacatagrtgtaagtgaaacaaagcatgaacagggtctgtatgctgaaaattacaaaaacttagtgaaataaagcaaaaaagacctaaataaatggagagatacacagttttatggattgaaagaattaacatagaaaaaatgtaactcagctgggcgcagtggctcatgcctgtaatcccagcactttgggaggctgaggcggatggatcacctgagctcgggagttcgagaccaccctgaccaacatagagaaaccctgtctctactaaaaatacaaaattagccaggcatggtggctcatgcctgtaatcccagctacggaggctgaggcaggagaatcacttgaacccgggaggcagaggttgcagtgagctgagactgtgccatttcactccagcctggacaacaagagcgaaactcagtctcaaaaaaaaaaaaagaaagaaaagaaaatatgtaactctgcacaaattgatctatagatttaatgcaattccaagcaaacctcaggagtatttttacagatccagacaagctgattctaaaatttatatggaaagtcaagggaactgtaataaccaaaacaattttgaagcagactagtaaagttggagaaatcacactatcagattttaagatttaatataaagctgtagcaatcaattcagtgtgatattggcaaaaggatagacatagatcagtggaacagagaagccagaagcagacccacacaaatatattctagttatttttcagaaagttgcaaaagcaatttcataaaggaatgatagccattcaacaaatggtgttggaacagccagacaatcatgggcaaaaaaatgaaccttcatcttaatttcaaatcttacataagaattaactaaaagatttacatgtaaaatacaaaattatacaaatttaaaggaaaaaatttaggagaaaaactggcccagagttagacaaagagttattagacatgataccaagagcacaatcatgaaagaaaagatttatgtattggatttcaacaaaatgaaaacttttgctctatcaaagacactgtataagaatgaaaagacaggctacagactgggataaaatatttgcaaatcacatatccaataaaggacttgtatctggaacacaaaaaaactctcataacccaaccataagaaaataaactacccacattaaagaaagtactgcgttcatcaactagaagtctcaatatagtaaagatttagttctcctcaaattgattcatagattcaactcaattcaaatcaaaatcccaacaggactttttgtaggtatataaagctgattctggaatttatatgaaaagaccktatagcatasggacaatagttaaaaatactgtattgtatacttgcaatctgctaagaagatagatcttaaatctcctcactatacacatacacaaatagtaactgtagaggtaatagatgtgttcattatggggaatgtggtcattatttcgcaatgtatacatatatcagaacatcaagttgtataccttaaatatatgctattttttcatgtcagtgatagttcaataaaactgttgaaaagtagaaaataaaaataggttatgtgaaagacaaaggaactaaaatatgacaaacaatttgggcaaaaggaatgcaaataagcaaattaacaaatgttaatttgctattcagaaaatgaaagttaaaaccaccatgaggtaccatggcacatctattagaatagctgaaataaaaaaatattgacaagggctggtagggatgtggagcaactggaacttgtatacattgctggtagcaaaatgaaaaacagccactctggataacagtttggcagtctcttgtaaaactaaacaaacactttccatatgacccagcagtcccatttctaggtacttgccttaaataaatgaaaacatgttcacacaaaaacctgtacatgaatgtttatagcagctctattcataatcacccaaaatggaaatacctaaatgtctttcaacaagtgaatgtataaacaatctctgttacatttatccaacggaatactactcagcaataaaaggaacaaactatttgtttacaaaacaacttggatgattctgaaaggtattatagtagttggaagaagccagtttcatgaggctgcatacgtataattagttccattcatatgccattttctaaaagacagaactgtaatgatagggaaaagatcagtcatttccagggattaggaatagagagaggatatgactacaaaagggataacaagagaatttatcttttggttatatggaactcttctgtatcattattgtggaggtagttacagaaacctatatatgtgttaaactctaaaactggacacaaaaacatcagttacattgtatggtaatctaaaaataaaatatttacttgaacttttggtgctgaagaacttgatttgtgtcttaaaatcagactttccaaattttggtttcatttgctccctgggttgtctgtattcatctatcaccagcagagagacagagagagaaagagggagaaagaaagttgattagtttatatacttatacacactaatgaagttggaaaaactttgggtgaaatataatgattttgtgggatgatttatgcattaaggtatatgtggaatatttctggtagagatatttgttatagatgtatctaaaattcaagtaagggtggggaattttatttagaaagtaagagatgtagatgtagatgaaagagaatacatagggcgagaaaaaaaactgagaatagaactcaaggatactaatatttgagggaaaatgagaaaaggaactcataaaggaactcatgagtgtaggaggagaaacagggcattgaagaaaagaaaaaggccatggaggctataatagttcattctcacactgctatgaagaactacccgagactgggtaaattataaaggaaagaggtttaattgactcacagttccacagggctggggaggcctgtggaaacttacaatcatagcagaaaaggaagcaaacacatccttcttcacatggtagcaggaaggagaagaatgagagccaagcaatgggggatacccttataaaaccatcagatctcctgagaacttactttcaggagaataccatggagaagctgcccctatgactaaattacctccaaccgggcccctcccaccagacgtggggattataggaactataattcaagatgagatttggatggggacacatatcagaggccaagaaagttgagaaagaagaggcagcactctccaatggcatggagaagttgagtaagatgaggtttgaaaagtctcagtgtgtttgtccaatagaacagcagttctcaaycttkttggcaccaaggaccggttttgtggaatataattttttcatggaggtgaggggatgggatggtttggggatgaaactgttctgcctcagatcatcaggcattatttagattctcagaaggaatggacaacctagatctcccacatgcacatttcacaatagagttcacactcctatgagaatctaatgcccagctgatctgacaggaggcagagctcaggcagtaatgctcgctggcccactgctcacctcatgctgtgcatctcaatttttaacaggccatggaccagtatctgtcagtgtcccagtggttggggacccctgctctagaaggtcatcggtaatgttgcaaaagcacttttagggttgatgtgggggcaagaatcttagggacatagctttagaaatacatgagaggtaaggaagtgccctcataaagctttggcttacctgtatttggattcttgaataaagttttggtgggaagattactcttatgtcaaatcattaggccaagctaagtaagaattttagtgaaattttgcatttctggcaaaacttaaagccaagtaatagtggcctggacttaagctttagacataatctttttttttttttggtagtactcaaaattaataagtcagttcaacactagctgagtacctacagtgttgcagatggtgaaaggtatacaaacatgtacaagaaataagaactgaatttatttaacycaaccttctcattttaaagataaagaagctgagacttaggaaggaaataacttggcccaaggacatgcttaatctgcctccctcctctcccattgccatattttgctagttccccaatttttccctttacataagctactctccaccacaaatatagtacacatgcagaagatactcataactacatggctagtccatttctaaatgtattcatgtagtttgttgaatcagattttttttttttttttttgagacagagtcttgctctgtcacccaggctggagtgcagtggtaagatctcagctcactgaaacctctgcttcccgggttcaagtgatccttgtgcctcagcctcctgagtagctgggattacaggcatgcgccaccatgcccagctagtttttgtatttatagtagagactgagtttcaccatgttggcgaggctggtctcgaactcctgacctcaagtgatctgcccacctcagcttcccaaagtgttgggattacaggcatgagccaccgcacctggccttgaatcagatatttatgagaaaagagaaagtacctacctaggcagtagctggcaacaaattcagtgtgcagagggtatgattgcaaatggttgtgtaaaggaagaagaggtattaggaaatagattgccttttgaaaacaaaacaagacctttggcagaaaaatattggggtagataggtacatattaacagatatttgactctctccctacctggggattattcttctagaattctttgctaaaactctaaaggattcttggtttgctctaatgagacaggcagtttctttaccatacttccagttagtgttttgagggaacatggaataggacaatatggctggagtttgcctccaagatgaattggagaggaagagtggatggcctttaaagcaagactaagtttagaagcacagtgaataagcatgttcatgctcaggttcggtgggtggatgtctgcttgagttcattcagttacttatggggtgtgtaaccttaaaaaagtatcttgacctctttaagactcagtttccscctctgtaaaatgggttccttgtgagtacaaaagatatacaatatacctagtgcagtgccagacttattaaacaaaatacttcatattagattttaattttatgattaattagaaatgtggttctattctttaggaaatggccaaagacacggcaagccaacattttcagacagaaatagttcctgtcttttgtaaattgatctttgtgtggcttcagctggcatgactaggcccctcgatgggaattgcagagatatttagagttgaatgcaaagcctgagctcaaatgggataaatgatgaagcactactaaagatataaatggataggcacactacaccagggggctggtgggtgggagtggaggcattatttgtcaagtggcatcaatgtacacagctgactgtgtctgtgtgaggagaggagatggcagttgctgttgcaaaagggacctggaaacagagagcagcatgagcaaactgctgatcaggtttctttaggaggatgaggggattataatgttctgagagattactgaagcttagaaagaggaagtagtagaatcacatcttcctgcccctgggaatttatgctgctggataccatgtttccaatgcttcttattttatccattcctttacaaagttattttaaaataaagatgaaaacataggtgaaaaaatgtctaacttgtttgtttattgtagatttactcttggattccaaagtaaagaggcaatggcacagggggtgctgtttatattcctttcatcaatcattgctgcaacttagatatttagtatatttatgcctatacacagatacatatgggcaaaagatattctataaaattcatttatgaggactcacagttgcacctctcagaaaaatttctcctccagtcattaaaaaaatttttttatgggcttgtaattcagttacctcttccctggaagtaaaattccagggtagaccagaaaactcactaacaaggcccagtggtcttaaaccccggctgcatgcaaaatcagcagtaaacttaaaacaaacaaacaaaaacaaaaacaaaaacaaaaaaagtatgtgcctggcctgggtctcattccagagcatttaagttagactctctagaagtaattgtcttcagtttacgctataaaaatttaagattttaaaaaaccaggccgggcatggtggctcatgcctgtaatcccagcactttgggaggccgaggtgggcagatcactttaggtcaggagttcgagaccagcctggccaacatggtaaaacaccatctctactaaaaatacaaaaatcagccaggcttggtgacgcatgcctgtaatcccagctacttcggagactgaggcatgggaatcacctgaacctgggaagcagaggttgcagtgagctgagatcctaccactgcactccagcctgggtgacagagtgagactccatctcaaaaaataataataaaaataaaattcaagttggcacaacatttttagctcttataacaaaattcttgacttaatgaatcttctgtgaataactttgggagtattaaaactttgtaaactctgacccagcatatccatcctgggtaatagagcaggaggaaatggtcatggatgcatgcaaaaatgtatcaatcttgagtcattacaataatacttttaataataaaaatcagacgcattataaatgtgcaataagaagagatttttctttcaagcatggtacatccatttagaggtctactttctagccattaaaaataatgtaagagaagaatttaatgcatataacatgcatgcaattcataaagagaaaagaaagatattattcaagtatggggagatatacttctttgaaaaaaatccatttgaatagaaaaaagaccaaatgaatatattccaaaatagtaatatgcattataaagaaatagcatgagaaatgtgatgatttttatactcttccttaggcctcatattatttttcagattttctatactaagcatgaattatttttataaagagaaaaatgctattaaattaaaagcagttatagaactctaaagatttatattaaaatactactctgtggagctgcccacttcatatgtttaaagtaactgacaccattttgcatatgctacctgtgtgaatagattccataaataaaataggcttataaaaacactgttgatttttgtgtgaaagtaaccataggtaagtccttcttcaatgtatgactttgatttaggaagtggagtctggaacaactggcttaatttgacaaaggtagaggaagatgaaattttatgctctgtgattggtttttgcagttgttctgaactaataggttgctttcttctttaatgtgttataatgaggaacagctgctatgagctgtgcagttcgtttttttccctcctttcaaacctccatctcctgaagttaaatcaatctctgtaattaaagaattggtgaaataggcaaggaggtgggctggcaaatttatatattctgttttaaaatgtttaatttaagtatcatgtggaagaactggactgttgtgacatggtggaataacatttacattttccaaaaaagtgtctttcaacatgtgttgttagacctggagaacacaataatattaattaattgggcattcgatgtaaaccacaaaagtgagcagactcacttctccttcaagttgatgggagttcagatcaaccaagaagctaaagatgagatgaattcaagactacactgtttgaagatatatcattatcccttgtgaaagagtaggtgaggtgtggttgatcctagtaacttcatggactaaaaggaaaaaaaaaagtctcattccttgagtatatttcctagttgttttggtgttttgataggtttgttcccaaactgaactgaaccagaaagcccctatgacacctctttccaagggaaagatgcacctagaaggagctgggcctctggtgacagctggaggagtcattctgaagcctcacctcccacatcactgtcatctctaatagtggagactggttgaacttcggaaagggaaaaatcgatggctgaagatgagccttggtgattgtattagtcaggattctccagagaaccagaactaattggaggcccagaagatccatgattgtttctttgcaaactggagaaccagaaacgccagtggtgcagtttggtccatgtccaaaggcctgagaaccaggatgaggtggctgatgctagtcctggagtctgaagacctgagaaccaggygctctgatgtcgaagggcaggagaaaatggatatcccagctcaagaagagggcaaattcttcctttctccaccttttagttctatgtgtgccctcaacagattgggaaccttaatgggggtgattattcttatcctgtgaggtaagaattagtgaaagtgattattcttaccctatcaattcaaatgctaatctcttctggaaacactctcacagacacacccagaaataatgttttaccaactatcttggcatcctttagcccaatcaagttaacacataaaattaatcatcacaagttcactaaccccttgtcaagtccgcacttatgcatatctctttaaaccatacttaatctccaagtaaatacaataacaaggtcaaaatcccatgtaacatcatacaactaacctgtgtacaaccaaaaacacactaatcccttccctcaaagaggaggtaaaattcttgagtgatgttttctcttctcctggaatcctgtaacttaaatactatgatgtaaaattaacaccatttaaatatggatgtaaagtcaatatatcttttgttactatgataagggaataggaaagaatacaaagatattttctttacacatacacacatgcacaaatatatttataacagaaggagaatatatgcaggacaattacagttctcatttctgtaactggttacatggttgtaagctgatatttataaggaccttcttctactaccattctgtattctcactgctttcagcaagcacctcagctggttgtggttctttaccacaggataaaggtgacccaaacctttattcttgaagggtctgggccattcatagttttgcctggactgggttgttgtagttcctattgaccttaatcacaggacatggcaatactcagaaactctttaagaaatctgtattccacacatactcttctttacctccattgtttaggagtagttcaattttggtggtttggatcaatcactccagccaacactgtaactcccttctttgcttattgacatrgaggcattrggagcccaacatggttgggtggcagtcttaacttccagttcaatggagtcattgttgtatctcctggtggaagcagtcttccctctagaactatgacctctaggccagtagagcataaagtcatggaaacaagaagcaaaaattttgccagtgtgtctccagggataatagtgaatgttgccacaaccatgttcaccccttgattcctggacctgtgattctggctatgggagaaacagcaccatatattggttgctgattcaaagtatatggagccttatggaggaccatgcccaagcactgcacctagctggagctgtaacgtgagtctcaaaaggccattccaccattttatcaagacagctgcttcaggatggtagggaacaaggtaacaccagtgaattccctgagtgtgggcccattgctgcaattcttttgctgtgatcagaagtaatgcctggtagaataccatgatggtggataaggcattttgtaaatccatggacagtagttttgtgtgcagggaaggaaaatccatatgcactgttgtctattccagtaaggacaaaatgctgctccttccatggtagaagtggtcagtgtaatgaatctgccaccaggtagctggctaattaccctggagaatggtgccatactggaggctctgtgttggtccctgctgctgacacattaggcacttagcactggccataacaaggtcagcctaggtgagtggaagtccatgttgctaagttcattcatgacctccatccctgccaccatggccactttgttcatgagcccactgcgtgatgacaggagtagcaagggaaagaggctgattagtatccacagaacaggtcatcctattcacttgactattaaaataccctttggccgaagtcaccttttggtgagcattcttgtgggctacaaatatcttcatattttttgctcaaagagatctatccatatatctcttccccaaatttcttgtcaccaattttctaattatgtaccttccaagttcctgaccatccagccaaaccattgactatagttcttcaatcagtatataatcacatgtctggacatttttccttttaagcaaagtgcacaaccaagtgcactgcctgaaattctgcccactgggagaatatcccttcaacactgcctttcagagatgtcccagagagatgttatagtgctacagctgtccactcttgggtagtgcctgtatatcacacagaaccatctgtaaaccatagccaagtcttcacttcctctgtcaactgactgtggggaactccccatggagccatgggtgcagctggaagaagagaaggcagtagcaggaatgaggaccatggatcacttgatgtgacttctttgtgtcttcagggcttgcttgggcccaattacatatataccacttccacttgatgatagagtgttgctgtgcatgcccaattttatgatttgatgggtcagataatacccagttcatgataggcagctcaggttgcgtagtaacttgttgactcctggtcaagtattcagtttccactaaagcccagtagcaggcccagagctgtctctcaaaagaagaatcattacctgcagatgatggcatagctttgctctaaaatcctgaaggcttaaactgcaattcacctatgggagcttgccaaaggatctaaacagcatccctgtctgccattgacacctcaagtaccattggatctgctggatcatatggcctaagtggcagagcagcttacgtagtctcctggatctgttgcagagccttttcctgttctgggacctactcaaaactagtagttttttttgagtcagttggtaaatgggccagaataacatgcttaaataagaaatgcattgcctccaaaatccacataggcccgctagccattgtgccttttttttttttggttagaggccaggtgcaacaacttagccttctccttggaagggctatttcaacatgcccacaccatagacccctagaaatttaactgaggtagatagatcacacctaaactttaattggatttatatcccaccctgtaacaygtaaatgattaccaatcaaatctaaagcggttgctactttttgctcactaggtccaatcagcataatgtcatcaacgtaatgaaccagtatgatgtcttgtggaaggggaaggtgatcaagatccctgtgtgcttgacattgtctaaattatgacatataactggagagttaatataaccctgaggtaggaaaatgaaggtgtattgctggccttgccagctgaaagaaaactgcttctggtgggccttattgacagagatggagaagggggcatctgccagatgatagctacataccaggtaccaaggggtgtgttactttgctcaagcagtgaaactaaatctagtacagcagctgcaattgtagtcaccacttggttaagcttaccataatccactgttattctccaagctccatctgtcttctgcatagaccaaataggagtgttgaatgggaatgtgatgggaatcgccacccctgcatctttcaagtccttaacggtagcactaatctctgcagtccctccaggaatgcagtattgctttttatttactattttttgaggtggaagcaattctaggaactgcttctccttggccctcttcatcatagcccccagtccacaagtcaaggaaccaatgtggagattctgccagtggctaagtatgtcattccaattatttcttctggaactgggaaataactacagratggattctgacacctattgtgagatgaacttgagctaaaacttccattgatcacctgacctatataagcccctcctctgaatgagaggctacagtgacattttgggtttcctggaatcagtgtcagttcaaatctagtgttcagtagtcccccaaaggtctgattayatgttttaccctggtgcacagttaccctgctaaaattctgtaggtcctttcggagaaagctgggagaaagattcacagtataaattttcatttgagggcttctgggtctgtaaactggctcaagtctgaaaattgattgaggggctctgactctctaattttatgattcaatttaaactttggttcatttgacctggaacttttctgtttatacagatcaagtaaaaatttaataggctttctatctatttcacttctaggaacaccatgattaactagcccacgccacagatctgtgtgagtcagactattctaattgctgctttgactctgccacccaacacagtaactacgcccacctcgcctttggcagtggaatgctgccacttggcctcaccactctggatccaattactcccattgcatttagattttccaattaagtggctgtggttcccactataaggtctggcctacaaagagtaatcacagagttcttcaagaatactggggcttcctttagtaatttatttcttaaagtattgataaaagtgtgtcttctagatcttctcagtgttggggaatatatcataaattataaatccactctttctaatctccctaagcctgtgaatcccttcctctacattaaacctagggagagccgacatttccaatttgcttacaatgggccatcttttgattgtgtttcagccaaccaatcaaccacattattagagccttaactcccaagctgtaatattaaatgcagaatctctgcttagtgggcccacatcaataaatttgacctgatccaacattatgttccttccttcattatcccacacccttaatatcaattcccagacatgtttcctagatttctgcttgtataaattagaaaggttaggtagttcttttggaatatagcatgcctcctcatgggccacactttgtacttcccctttaagggcctgctagggtcttgagtctagttatttgtctagaagaaaagaggagtgttggaggtagctcttgtggagaatcagcagtgtcttgcatggcagctgcctcagaggaggccattcctcaggcaatgcagggctaatcccttcagatggaggtaaatgactcagaccaatgtgaatgaggagatggctcctactggaggtggggatgctgttgacactgggagtagggggtcatttctgctggtattagggatgccacttttgctgggattagggagaccaactactctgggggtgggacctaagctctactgagggtggggagacttctttcactgccaaaatagataatcacagtttagggactcagtgtccccagcttctttagagtcttcccacatacccccatcccaacttgcaagatcccattttttcacagtgtcctcactttacagtatataccttgtgaggctgagagtttcacttgtgttgtaattcagccaattacaggatgagatcctacatttgattttcagcaattttagccctgcactgcaggagataatgctgtccctcagggcacacctataagctcttaggtcatttatgtagcacttgaggtgggaatttgaatcccttagctcatttttttttttgtaaactactttttccagtgattcagtgtcatattccttagttttccaaaagtgttcaaagctaatatatacagagttactaagctccttgcatcttaraagtgtttgattaggaatatccatattttgtatatatctacagtttgtgccacgaactgtttgcctctttactactggaaaaggaatcattatcatctttaaactgtgtcagattagaaagccaatttcagaaactgcagaatgattttttttttaaaaaaccctcacttttgaaaatctgtttctccagagccaatctcaataccaaaatctgtattagccaacgttctccagagaaacagaaccaatatgtactatgtggtggtggtgtgtgtgtgtgtgtgtgtgtgtgtatgtgtgtgtgtgtagtcatcccttggtatctgtggggtattggtttcaggaccctctagtggataccaaaatctgaagatgctcaagtcctttatgtgaaattatgtagaatctgcatataacccacataatcctcccatatactttaagtcatctctagattactgactatctaatattgtattgcttagggaataatgatgtgacaaaagtctgtatatgttcagtacagatgcaaccatccatttttttctgaatatttttggtttgcaattggttgaatctacagatttggaacccacagatacagagggctgactagagaaccaataaaagccagtggtataattcagttttaagtacagaggcctaagaaccaaagaaccgatgatgtaactcccagtctaagtccaaaggcctgagaactagggtggttggttggggtggtggctgatgttagtcagtcctagagtctgaaggcctgagaacaaggagctgtccaagggcaggagaagatggatgtcccagctaaagaaagagataatttgtcctgattctgcctttttgttttatgtgggccctcaatggaatggataatgcccacccacataggtgagtgtgatcttctttacctmgtctaccaattcagatgctaatctcttctggaaacaccctcagagatacacccataaataatgtgttgccagctatctgggcgtctcttaccccagttaagttgacatataaagttaagaggtcatctgcttacctgtgccatttcccagttgatgaagcttgccacagtttatccaagaatacacggagtgggaaaggtagaatttagtttgcccaggtaatgttctcgcagtgatttccctctgggcctcccaccaacgctgtctcttgtgatgaaactggggagaactgtagggaggaagataatttctgcctctcaaaactcacaggctgatggaaggagatcccataaagcatttattgtagaaaaggaagaagtggcagaggaaaatgctggagaaaagaagatagaagaacaaagcaattgccaagcccaggtgtaaggtgaccaggtctgcctgggatgatggcagcttgaatggtgaggaaagacaaaatgtgagaagaacatgtaagaagatttgaccatgtttgtatagagactatcttccttggttcatccttaaatgaaatgaaaatcctgtagcaccatttctagcatttggtaagtactcaagaaacgtgagcttttactgaccatagactgaacatataggctactaatgagaaaattcctatacttgaagaagcctaacttgctaggccaattttatatttttgctgggctgccatagggttagaattaaaggcacattaaaatatgtattaaaaggccaatagtggtggctcatgcctgtagtcctagcactttaggagggtgagacaggtggaacacttgaggagtttaagaccagtctgggcaacatggtgaaaccctgtctctacaaaaaatacaaaaattagcctggcatagtggtgcatgcctatagtcccagctatttggaggtgagatgattgcttgagcctggaagtcgaggctacagtgagctatgatcatgccactgcactccagcctaggcaacagagtgagaccctgtcccccccaaaaaattgtattaaagatacattataatgtgaatgtgtctgtagtatacattaagtctttatgtctgtaaagacatgccacattctttctttttctctctcagcatatgtacacacatacatacacacttaaatctctgtgtgtgtacgtgtgtgtacatatgtacacaaatggcacattagctttatctagaaatggatacatatgcattaagctactgtaaagtttatgcacacttaaaggcacattaattctatccaggcatatttctctataatgtactgtatatctgtatgtatactaatacattattctatcatccatcataaatttctggcccccccacaggaaatgaccttgtattttatgatcaatgcaaggacaaaagattttgcatccttaaattatattcaatacatactctgtgaataaaaatgccataacttaaaatattgcccttggtatttgcatagtgcctttcattactgttgaacaaaaactaatctatgcattcattctgtggagataagttgtataaatgtgataagtgagatattttcttccttagtccttaaaatgatagtgtaaggaaatggaattcttttgcctggagatgagattacccaagggtataatatttccagaatggatactatgaagttgtaggawgttgctgtatctcattttcagtgaggccacaagagaaaattgttgtagcaagaagttgtggtttaggctttaaaatgcctttgctgtgaggttaacatagaaggaatgggccattaaagaagtttgtatattcttccttttttcgatgtttcaataaagtaaccagttctttgaggttaagtcagtctgttcgacagcctattctaagaagaaatggcgccttcctacccacagtgggtgagtctagggaagtagttttatatcaccacaaccctgatacacctttctttcccccacaacatgtgctgattggaccagggatgggaattgtaatgacgggaaaccaattagaaaactggtcagagacaccatgtagcctgacattaaagaatgaactgcacctatcctgtttactttttcagtaaattactctagagaaaatgtattttaacaatgggagctgaagttgaagggaagccatgaaatagaggggagttgtctctagccatttgcttagaaaagtagcagggacacacacacacacacacacaaaataaaaacaataagacataagacctacttactatttgataacacaacagggtgactatagtcaataatttaattgtacatttataaataactaaaagagtataactgattgtttgtaacacaatggataaatagttgaggggatgggtactccattttccacgatgtgattattacgcattgcatgcccgtatcaaagtatctcatgcaccccataaatatatgcattatataccccataaacctaatatgtacccacaaaaattaaaaataaaaatgaaaaaagtagcaggtaatattaacaagcagaggaaattatgactagaaagcggaggttggatagacgcaggagagagaaaaatgagcaagaatgctcatgtgactaatgagagacctgctttaattcgtgtcttcccagacctcatgccatgcaccctattcccattttttcttaaagaacttgagagtctgtatcagttagatgatttgggctgcaagaaataaaaatagtcatctgaaagcagtgtaaactagggacatttattatctcacataacatgaagtgtggagaccagcacggttttaggctgtctcagtgatgtcatcagggatacagttccgttctatctttcctatgtgctgtactcatcattttggctgactttggtgcattcttgtgaaattgagttgcttctcagctttctccacggagggcttacattcagctcattcagctttcttgggtctgcaagtcagttctacttgtctgtatgcttcctactttgtaaaattttcttggtcttctctcccctcctattttcctcattattacaaatttatgccttaaaggaaataatactattattttagtggtgttttgagaggaaccagtggtaaatacatgtatttaatcatttaatctgatctgccaactttattgtgaagtcccttgcgtctctcttttaagatgaaagacatttacttgagaagttttctcactagacttcccctcccatatcattggccaagatggagctatatgctgtatgcagaagacagagtcataagccaatcactggcaaggggaatgaggtcactttggcttggacaaattgccattcacttttggcaatgagaaggagcaccttcctttgagcacatagctgtatggaggatgaacaactagagaatgatcttcaaaatactgaacaatggatggagcatggaccaaccagtcaaaatgggcatgctacccaaatagagcaaagaaaaccctataaatacccaaatgaaatctggttcaaccaacaaggaagaagatggaaacaaaagtcttggtttctagcacctaaataacaattgcagaaaataaagtacacaactgcttcagaggaaggaccaaatcacctcataaggaccattccagcctgtaaatttttacgcagaagagaattgttccatttaatgaatattttattaaaggagtctacaacctgaactgagtatcactgcagggagccagagtacatgtaaattacagggttgtgggcactttccaattctggcacaacctttatgtaaaaggttaccctagtcctttaagagtgaacttttagagaaaggttctacctcaatggtatttgcaactaattggctttatcttacttgccagctcttgattgatgaagctggctgaagggttggattgaatagaactcggaggttgagttggaatcagctggaaagagcactatgttcatttggcagtgtgtgtgtgtgtgtgtgtgtgtgtgtgtgtgtgtgtgtgtgtttattggcatggggaatggcagcacttgggccatgtattttctctcttctttcaggtcagttttgtatgggctgagactccatggagtcacctaagctggaggcttccaaattacaaactgtacctaagacaaggagacgacctttcttagtgggtgacattcttagtctaggaagaggagcattcctgtggaagagttctcagggatttgggtaacatcagagtcagaaggaaaaggaagttttgttgagtttcatatttgagaagaaagctagaaggcagaagtccaagggtgtgtcagttattttgaaaagtaaaacatgaagaagagaagtataaaatatttccaaagctctgggtttaatgacaccaagtttgctagttttgtttcctggtggtaattagcagtcaaacaacatgtgtgctttgggtcatcaaatattattgtgggtagggagagcagccagtcttgagcaacatgatttcaagggattgagtgagtgatgaaaattattgcaggataggaaagcaagttggatttctggtaactacagtaaagaggaaaagagaatgtgaagaatagactgacagggaagctctaggttgagcgacagaaaggcctgtgtggaggtttccaaatatagtgccttatactactcaaagcccttcctattgtcttgtataattctcttactactctttggattgggtacacttgatatttttagttctgtttttctgaataagttaattttcagagaaggtaaagtaacccaaaagtacacagctagatggaagctgatctaggaccagaaatgagttctttcaacttatagatcagggcctttcctactatcctgcaaggccactgagatctaaaacagaactgtctgatctgcaggatatctagaagtatattaggcacaggtgggggtgtatgggtggggaagacagtattccaagtagaggaaatagcacttgcaagaccctggggaatgagagagaatggtggttcctaagaacacagagcagacccgtagagcaagagcaggaaaagcaatatggacactggtgtaagatgaggctaaacatgtagcaggggccagattctgaagcctttgagggctagcattttacttatttagctaaatctcacactcaccagcagtttcctttctaaataggatcaacatgcatttctttggacctttgctgacaccaaatggtaccagtctttgagcctctcaagtgaggtgggaggtggggaaaggaggacataaaattagcataagtacataaacctagttgcacaccagtcttagtatgagtaaataacatgttctgcattttcatgtgctactactttccaaatgaatatagatgttatgatgaataaaactcaaattcatttcaatgtactcctgaattcctgggagcttttagctgttatgcatataacccttctgcctcttgccttatcggtctgtgacaacaaatacagttacaactccttttgctctacaaattattgtggcttgaaagttgaccccactcaaagtatcatccagctatttctgggtatttccatggggatggaatagatcccttgggctcttcctacctgagtttctccacctcttctcytcttctctgagtttcatgctattgtccatgctctgttctccttgtggttcactgcttttctgtgcctatctttgttcattcccacctcccatgaacccatcactacctttctttattcccgccactcctgaaccccttactatgtttgttcatttccattggtcatgtcagcactgctactgttgggctcaaaggctgagatagtttgttttctacatggaatggaactgtgacagaatctcctgagggttgagggtggctctgtcacttccctgagactggcctcttctccagccatcatctctgcacttctacacccacagctgcagctgatgtaagaggaccagcatatatgcttgtggaaagcccagacttgctcttactacactcttctagcctccccagttgtacaagggctgcttactcccaatgatgaaatttctctgagggtttgatacctaggatttcagtacaaatggcccaacagaaatagaggaattcctttcttcctctagtccggggatcagcaaactaactcaggggccaaatccacttgtttttataaataaaatttcactgaaacccagcaacacctattttatttatatattgtttatgactgctattatactacactggcagagttgaggttatgacagagatggtatgacctacaaagtcaaaaatatttactatctggaattttacagaaaaagattctcagttctttatctcatccataaaatcattcaaggaattgttttaaaatgaaaagtgggtgatatgatcagatttatacttttcaaaggtcactccagttgtagtgacaagagtggactcagggtgggaaaataaaactgtagacagagaccagataagaagctgttccagtaattcagagaagaggtgatggtggcctgaaccgaaggaacaacagtgaaaatgcagagaggtgatggatttgagaactattgaggaggtagaaatgataaaacgtgataatggatcaggtgcttcatgcctcttctctgacactcagccgccaggctctaggtactagaagtctgatcatggatttgcttctttgtttctgtggtctcctgattcctgtctgggtcttcttctaaccccactggagcattagagttctattttcctacttttgcctgattgctagggctctgctgcctcttgactatcctctgtgaggcaattaggggaattcagtattaggatccatgtatcttgtctttgtccaccaatagaagatactgctaacttggacttgcattgccttctgatattataggcagaaacctctgtgagaggttctgtgatttctctgtcaggctgaactttctgctagcagttgtgtattccaggaaatgaatatagctctaaatccaaattctcacagtttgcttggttcttttacagtacttgagatgtgctgggccaattccaaaggtaaagaagagtaggtgggtatcctggggcttcattatattaaaagtgctaattctttgatttttattcacttatctcaactgattaataatttttgatggaatgagaaaagataactctgttttagtcttccctctagggttctgtctttgtttattctatatccctatatgctgataacttcctagtttctgtcctagaatctagcatatatccagcttccactgaattcctccacctggatgttaccaaaacactcaaggttcaatctgtctaaaacctgaaacctttatcttattgctccttttccttttcttcttcccatatcctttgtgctaatgaatggccccaccaatcaatcctgtcacacaagcaaaagatgtggaagtcatcttggagttataaattcttcctatttccttactctacaatctatcaggattctgtctcttaaatacattttaaaaatccttatctcttctacattcttgctgccttagtttagtctttttatgtctcataatgactagtcatttcctggcttgtctctctgcctcttgtcctgttctgatctaatccttcaaggacaggaacaaaatgaccatcattttagtagcctcagaactgaggatgagatgggaacacagaaggtccttgttgaatatgcaccaatctaaataaagaggaaaatcaggatcacatgtgtcttttccttttgatactcctgatctaagattttctcttgtcggtatcttccttctggttcctagaaaattcctcctatgctatggaagacctcaaatgaggtttctaccaagactttgagaagatttgaagcttttttaaaataaaaagtttagctttttcacaggcactgttatggctcactggggaggtgggaaggccttctgctggggtgagaatacaagtcaggctcctaaattttcataacggaatgtcagccttgccacctgacagtctaaaacatatgcccaaagcatatggatctcttttcaatcaacacaacgtcttcacttcctctaaagagctcaatcttggactgactgatattcagccctatccaagaagctcagctaaaaagagtgatatttgagagatatttggagctaatcattcagtctctaagtttggactacaagttaaaaattcgtttggaccacagctctaattccattagaaatgtcatcagtgaataacatttaagtaatgtgctttctgatttttttccctttttttttttgagacggagtctcgcactgtcacccagactggagtgcagtggcgcaatctcggctcactgcaacctcctcctcctaggttcaagtgattctcctgcctcagcgtcccgagtagctgggactataggtgtgcaccaccagggccagctaatttttgtatttttagtagagatggggtttcacaatattggccaggatggtctcaatctcttgacctcgtgatccgcctgcctgggcttcccaaagtgctgggattacaggcgtgagccactggtgcccggcctgtgctttctgattttgtgcaggattgataaaaagatgcctactactgaagaatcacccccaaagtatttttccattatcttaatgtgtctttgagaaaaaaaaaacttctaaagaagtagcatgcttcttatattgggtaatgagaactactatagttctgttcaagacaaagtttcaacatctgagctatccctcttctttggataatagtaactatagataaaataacaaaagagaaaatttaaaatacaataacactttaaggaacaaactaaatatgtctttgactagaaaagaacagaaatgcaaagcagtagggctggagatgagtgtctgctgggctgtagcactgtaggcaggcagagatgattaggagttcagcactcacaaggtgacaggatctaaaagtgccaagcaggtggcaaccagacattggatcattgtttgaaatcagggtctgaggtggagtaccactscataaaaggaagcttaaaaaaaacaaaaacaaaaaactgctgtctaatactaccagaatatcaagaaaggaagtaaaratgaagctacagttttgaagccagagcttctgtgaagctgccttctggctcagtgacgagtgataatgtcacaattatcccaatgaggcaggaacactgatataacaatataagatgtatttctaatttgggatcctaacagggttggctgagggccattgaaaacccaccagaaagggaggaaagagatggaggaagaaaagcctaaataattgacaaagcttccgcctacccaagacaaacctgaaaatctaaattccataattaatgaagaaaaaaatgctaaaaatagctgtgaagataaattattgacatcaattccttctcagatgaagtgaaaataattatacaatctgaaaaatgctttataataagacatttatgatctttcacagataagataaaaaggaaaaacattcataatgaagactaagaaaatataaaacaaaaccatgcaaaaatgatatgataacaggcagatctaaaaatagcttattaaaaattagagaaataacatggcataaacttttgaaaaggcaaaagcaaagagagaattagtaaatcaaaaaaatagacctgagacattatgaaaaagcagttcagagaaagggaaggaggattgaggaggtgaaaggtatagcagaagctccagaagaagagagaaaagagtgaagtagcaacagttgaagagactttggctatgcatttttcagtgttgaagacacaagtctcagatgacaaatgtaatccaggttctaagaaggatgaatgaaaataaatgcatacttagatacatcttagtaaacttgaagataaggagaaaatattataaagttttagttatgcaagatgaataagttctagagatcaggtgtacaacattgtgcctgtagttaacagtactgtgttttgtacataaacatttgttgagagagtagatctcatgctatgttcttaccacaataaaacacaaagcaaaacaaaaaactatttgaaggaaaaatcagattcttaaagaatggccttggccgggcgcggtggctcatgcctgttatcccagcactttgggagcccaaggcgggcggatcacctgagatcgggcgttcgagaccagcctgaccaacatggagaaaccctgtctctactaaaaatacaaaataaaaatacaaaattagccgggcatggtggcacatgcctgtaattccatctactagggaggctgaggcaggagaattgcttgaacctgrgaggaggaggttgtggcgagctgagatggtgccattgcactccagcctgggcaacaagaatgaaacaccgtctcaaaaaaaaaaaaaaaaaaaaaaaaaaagcatggccactagcagacagttgacttccaattagcaactgtccaatagagcaatatctacaaattgctgagggaaagccactgtcaatctagaattatatgcctggcaaaaccacctatgtgtaaaaggttacatcaggccaggtacctaaacataacaaggctttcccgggaaggaaacatcggttctcacaacatcatttccttggatgcttactgagttaacataaatatggaaggccaggcacggtggctcatgtctgtaatccgagcactgtgggaggccgaggcaggtggatcactagaggtcaggagttcgagaccagcctggccaacattgcgaaaccctatctctactaaaaatataaaaatgtgctgggcatggtggcaggcatctatacccagctactcaggagaatcccttgaacctgggaggcagaggttgcagtgagccgagatcacaccattgtactccaacctgggtgacaagagtgaaactacgtctcaagaaaaaaaacccaaaaagataaatatggaatactgcatgctaagagctaatgatctgtcttgtttactctgaaattcctgattagagagagcatatctggactgagattattctatgtgggcatacaagttttgggcctatatgacaggaacaatatataagagaggtgggaaactaaggcagtagcttctctgtgctaagtgaaaccatatatgtgttgaagtcatccccattttctgtacacmtgctgtgtaggtaaggggagataaaggaagctgtgcatacatatacttttaggacctctaagtagtaataaggctgtttttcttgacttctatgcttctataaatctgaataatttaatgatagattaaatcctattgtgttacatgaatttgattccagtcttaacttgtgatcactgctagtaaaataaaacattttttcacatacaaaaattaggagacttttccactcacaaactattatggaatgaactataaaggatgtactttagcaagaagaaaattgaactcaaggaggaagactgagatgcaagaaacaaaaccaagtagagaaacttaaaaattaagtggataactaatggttatctacccaaaggaaaataagtaattatacgaaaaaagatacttgcacacacatgtttatagcagcacagttcacaattgcaaaaatgtaagccaacccaaatgcccaccaatcaatgagtagataaagaaactgtgagatatatatatctagatatatctatatttatatctagtatctagatatatctatatttatatctagtatctagatatatctatatttatatctagtatctagatatatctatatctagtatctagatatatctatatctatatctagtatctagatatatctatatctatatctagtatctagatatatctatatctatatctagtatctagatatatctatatatctagtatctagatatatctatatttatatctagtatctagatatatctatatttacatctagtatctagatatatctatatttacatctagtatctagatatatctatatttacatctagtatctagatatatctatatatctagtatctagatatatctatatttatatctagtatctagatatttctatatttatatctagtatctagatatatctatatttatatctagtatctagatatatctatatttatatctagtatctagatatatctttatatctagtatctagatatatctttatatctagtatctagatatatctttatatctagtatctagatatatctttatatctagtatctagatatatctttatatctagtatctagatatatctttatatctagtatctagatatatctttatatctagtatctagatatatctttatatctagtatctagatatatctttatatctagtatctagatatatctttatatctagtatctagatatatctttatatctagtatctagatatatctttatatctagtatctagatatatctttatatctagtatctagatatatctttatatctagtatctagatatatctttatatctagtatctagatatatctttatatctagtatctagatatatctttatatctagtatctagatatayctatatctagatatagatatatatatggatatatatgtggtaactgtgatatatacatacatatatatataaaatggaatactactcagcccaaaaaggaatgaattaatggcatctgcagcaacctggatgggactggagaccattattggagtaactcaggaatggagaggcaaacatcatatgttctcactcataagtggcagctaagctatgagaatgcaaaggcataagaattgacacaataaaatttggggacctggggaaagggtgagaagggtctgagggataaacgagtacaaattgggttcagtgtatactactctggtgatgggtgcaccaaaatctcacaaatcaccactaaagaacttgctcatgtaaccaaacaccatctgttccccaataacctatggaaatgaaaaaattttttaaaaagttgaatggaaactcaaaaaaaattaagtggataaggttttttttttttcaattaaaaagtgaaacaaattgctaaaccacaataatagaagataaggtgagtcttcactggatacttaatgtgttaacatctttgtcctatttgagaggaagatagagatactatgctgaatgactttatactctccaaaaaaaaacactgaaaaaaggatacagttttaaaattataaagtatatatttttaaaacttatttaaatacatattttatcattttaaaacttaagaataaccattaaaatgagagtaatattctccatagcttctgaattcacagagcaaaaaggagtatagaaaattttatcagtaccccaggaggtagaaaaggaggaaaaaaagaagcaaaaagaaaggaggagaattagataaccaatgagttttcgtttttcctatggctggcaggaagaccagataaaaaatattttccaagtatttcatcctatattcctaatatgattattttcacttttcataagatagtttcatttcttttgccttcattttggatatctatatagtcaagtttaaaaaaagccacaagaaaatcacatggggggttagggcttcaacatatgaattttgggggatataattcagtccataactaccctgaacccctgtcctgcagtaatgccctgccctctctggtggagcctgtgtgtgaaaccctgacttccatctctgccctgcattaacaaggaaacaaaactggtaaattaaacttcatcaaaattacagtattttgctctgtaaaatacctgctacaaagatgaaaaaacaagctgcagactgagagaaaatacttgcaaattacttacctaataaaggacttatatccagaatatataaaggactctctaaattcagtagtaagaaaacaaacaatgcaattagaatatggtcaaaatcttaaacagacacttttctaaagatgacatactggtggcaaatcagtatacgaaaaaatagcctctaggaaaatgcgaattaaagctatatgtgctaccacacctattagaataaccaaaataaaaattactgatagtaccaagtgctgatgaggaatgttaaatggcatagccaatttggaaaatagtttggcagtttcctataaacatacacacaccataggacccagcaatctctttcatcagtgtttatcttagaaaaatgaaaagttatgttcacacaaaaacctgtacatgaatgtttatagcagctttatactgtaccggtcaacactggaaacaacccaaatgtcctacaactgatgaatacaaaaacaaactgtgggccatctatactatagaatactgctcaaaaattaaatggaattaactggttcatgtaacatcttggatggatctcaaaagagttatgcatagtgaaagaggccagtctcaaaaggttgcatattgtatgattccatttatataatattattgatgtggcaaaatcataatgctgcatagatctatgattgccaggagttaggattggggstaggatatgatcattaaggtgtaactcaagggagtttctttgtggtgataaaacagttctgtatactgactggtgatggttacaccaatcatagaacgatatacacatgcacatacccccaaaagaagtccacacaaaatctggtgaaatccaaataatgtattgtactgttgtgatacacattattattgtattgtatgtaacaatgtcagtttcttacttttgacaacgttctatggttatgcaagatattatcattaggaaaggctgaatgaggggtacatgaaaattctctgtactatatatggaattacttttgcatctaaaactatttcaaagtaagagttataattttaaaaaatcagttgtaagaaattttaaaaaatgttctagcctcaagcctgtctgacttcaaagccagtgtgattaaaccactacaccacatggtaaagatcccttagaaaaatgcctatgtcagcaggcacaaataagggacactcctagctattcaaaattatttttgtctccttaaaccctaaaataaaaaagcacaaaacaagaaatggctaactgagataactataacatttgaggtgggatgattttaatagaccttatataccattttaactcttttaggttaaatcccacttcgttgttcagtgatctcaaaatgtgttatgaattctttttggtagattttcacatcagtatttcaaatcaccttactctagatgtttttctcttgggtgttctttttgttaatatttttaacttcacaaagctcttttctatcattttagtcagttaattgaaagcaaagcttaaaggaaaccaacatgtttaaaataaactttttagggttggagactacatgctttttgttatttttcttgctctgatatctcattagtgttattacattcctgaaatacctaaaatggttaaaagcatgaaaagcacaagtattgaaagaccttaggagactgcattttgaagccctcaaaaatgtgaaccgggaaatacataaaacaactttgtttgttggggttaaggtcatgggaaatacatctgtttgcatttgtggagtatactgtcgtagaaaactacgccgcatgaagcaatggagcaaaaagcacagcagcaatatgcggttacatcatctgctaagcatgtatattacaaattacttgaaagcaataatcatgatattctggatcccaccaaaatgttatgatttaaacatccacaacaaaggctgtgcccagaagcctttgttctgagcagggtttatttgaagaaaatggaatgtgattgtaataagaagcctgggctggctgtgtctctccaactcattaggctgcatgaggtggtagggtgaagggagatgggctggggagaggctggtgagttccacacaacaccctggggcttcacaagggaagaggaatgacaggtgcagaggagatatatgaagttctccatcagatagctcctgcagagttggagtcctagccttcagggcagaactctcaggaggtgcactctatcatagtcaaaaattccagtgatacattgttcatgagaaaaatcagacaaggcaattacaggaaagagcaggaagccacctccgtcttccaatcagattttcaatatttaaccatcacttcctaagtacagttgggctctctgaattatgcagcatccacaagactgtcggagaagatttgttcctaataatggatttttgcatcacaaatgaatagagttctttgtctttatattcatctctcttctctgtggttacttcttcctaatttgcgtttttacctgtcactttgcctataagaaatgtgaaaaatatgaagaatcctcttttattatcatggcctatgagtgcccaaactgtttgaccctatatgaattaaatacacttttttggatattttgttctccctgtatgtagggtttcaaatgggtgcaaataatatacagttaaatctaaatgtgctctttccaccagaagaataaagtctgttaccagctgaagatgagaaagtggaaataggcatagctgagataaattwaaaaaaaatgggagccttgggcatttttcataacagccctggagttagtggttggctgggaggagggactgtcctgtgtgtggctttgaagttatgtggaagtcattcacatttagcacattattctcaggctatgggggtaagggtgatgctcatatctcgtagagagagaatgttcacttactgaaagcctgcctggactttgtccttttccaggcaccatttaactrttaggagttctagatcrtacttggcattaaggatgtcataacaaactccactttctaaggtttctgatccttaaatataatcaagagaagtaatggtttattttcatctgcatgcattctcatgcctttgttgagactatgccagggaaaagcaagaacatccatttaatgggaagtgtcatatcttcctccgacccaccctcccttcctttcttcattccttccttcagcagaggttttcaagtgcttgccatgtgccagataggcactgtgctaggctctggggaaatcacaactaacgacatgcagcctgtgtttcagggatgattttacattccagtatggaatacagaaaagtgaacaggcaattgcaactcagtgtaataagtagaatacatctwctgattataattataacaataatagggrtgtatttcttaggtcattctctcaactatcccttgagctaggtagtaattttattcctgttttactgaaaaagcttgaggcttggtcaattttgcaagttcataaacttagcaagtgtaaagctggaatttgaatcctggcctgtggaatttgaatcctgtttgtgcagtcctagaactcaagcacttaactttgacactaattggttgctatgggaaaacatggtggtgggaatgtacatctggcatggtcttggaagtcccagagggtggttacagaaggcttcttagaggaagttacaactaatctgaggattgaagagagaataatagtgaaaagaataaggcatgaagaataagctatatttaggttggaaacctggccattcctacctcttagcttgggtaaaatgtttaacttctcagcctcaactgccttatctatttaaaaaaatgaggctaatattatccctatttcagagttgttagaatgaaatgagatagcatagcatatgtgaaagttttagcataaggcttggcattaggaagacacccagtaaatgtttattttctacacttttccaagcaataatagcgttctgcattttaccgtgtgtaccatggaatgtgtgatctgccttaacccaaaagccatgggataattcagatagtttaaaatgagagtttagattatttattctaatttatattagtactaaccctaatattgccttggttattttgggtatttcacttatctacttgcctaacaactcattcagctattactgggtgtattttagaataaacattcctggaggaaaaagatgtttggctatttctcagaaataacggagcttgaaaggagcatttatcaaaacaactaaaaaaaaatctctgtgactggttgctggattaaaggaagaagacatgaatctacaacataataaattactaattgtttctcaagttcatggccatttgtaacatttaaaaataattatgtacattatgatagaattactttcagatgtaagaaacccctcttctccacaccatttaattaaacattaggtactgttgaaacaaatggatggaattggtttaggataaatggttgtaccactgttactgcaagatgaatactcataagcaagattcataatctttctcattaaatctcttttcctcttatgtgtcatatctcagttcatatctcagttaatattatcactatcctctaaattactcaggctaaaaactttgacttatttttgtcttctctttatatcaaaccagctgttaaatgtggtaggcagaattctaagatggtccccaagattcctgcaacctggkttaacactttctatataatttcttccctttaagcgtaggtgggacctatgaatatgatgatgtcactytagcgattaggttacattatatggcaaaggcaaagggatttcacagatggaattaaggtccctagtcacttgattttgacttaatcaaagkggattatcctaggtgggcctgacctaatcagatgagccctttaaaacagggatttagccttcctgagtccagacatttggagtagcagatgtactcttgctggttctgaagaaataaactgtaatgtgatcagaagaaagagcatgcggtgagaatatgagagtgacctctaggagctaagaggtggtttccagccagtaagtaccaagaaaaatggggaagtcagtcatataactacaaaaaaaaatgaattctgccaacaacccaattaagcttggaagcagattcttccctagtcaaaccttcagataggaatgtaacccaactgaaacctttactgcagccttgtgagacctgagcagacacctagctaagccacacctgaactcaacccacaaactgtgagatagcaaatgtatgttgctttaactgactacacttgcattagcttgctatgcagcatagaaaactaacacattaagttctcttcattctccccttccagtgtctttatctatccccttttctctattactatggccctcatttatgtcttcatgtctctcacctgaactaataactttctaactagtcttgtcattttcaatttttcacttctccaggaaatccactgcccctatatccactgtattctgtcttatagaatgtagttttgattatatctccccctttaaaaattctcattgctcccagttttctccactgtcaagggagtatagctttgtcatttgggctacgagtttttgatttagagagctatggatttgaatttaaattccaacacttaactaactttatgaacatgggcagtgaataaacatctttaagcctcagtttgtaaagcagagattataattttcccttccttatagggttattgtgagaattaaatgagataatgcatgtaaagattatgttacatagtatgtgctcaataaatcatagctattattgtggttattatgtaattaaattcaaactcttattctggtactcaaagttactaatgatcctcaatagctttttcagccacatctcgtacatctttatgcaaatcttgtggatcagccatgacaacctatcaaaaaacttgaagtccttggttgcatattatgcaatactttttttggtctattttcttccctcaaattagagtccctcccaaccctccactctacacttatcaaaattttgttactcttttgaggcctcccctctaactagggctagctttcagctagcacctgtaagtattcctttactgagtacttacaacccaagtgtgttctgctttgttggaggcccattctgatttgtggtgccatataacttgttggtttttctatcaaccctacctacaaccttccttttcttttatcttttgactcagaatttatctttgtgttcctgcagcagttttcttgcccctatgcttagtatgtcaaactatgttttgaactccaacctgctcacatagttgggtacctccccatataaaaaagggatcattttttatattcccagttcgcttggcacataataagtactcaaaaccttgttggatgattaagaattagtttcactgacctccttgtcagtcctaagaatgatggagcaaatttttgtaatggataataactactaatggttgactggctttagaaacatcttatttggcttaaataattaaatattctacataagaatgcatcaaagtaaactatgtgtgctttataaagcacaataaaatccatgaagaatctagatggccaatttatttaaataaacatatctctatctttatatatgcttctttgacggaataatttcagatcttcattgttccaacaaatctttttattccaaacaattgcatttattatcctgcaaaaagtcttgagataccacctagtgtagaggtctggagacctgaatccatgtaaagtaggaactgtgtcttccctttctctctgttaacatacgcctgttgatacatacactctgcctggcttcttcttccatagccagttgaggaccattcttgctggaaaatgtagacctcaaatagaaattatgcagccttgccttcttttcatctggtaattatgcatagatgttcccaagaagtatttgaatgctgaggaaatcattttgtcttgagaaatataatcttttactttctttttctctccccgtctccctccctccctccctgtccccctcctttctcactctctttccttttgaggcagggtctcactctgtcacgcaggctggagtgcagtggtgcgatctcagcttactgcagccttggcctcttgggctcamagcgatccttccacctcagcctccatagtagctgcaactacaggcacacaccaccaagcccagctaatttttatgttatttatagagacagagttttgccatgttacccatgctggtctcgaactcctggactccggtaatacacctgcctcagcctcccaaagtacaggtgtgagccactgtgcccggctcactgtacaggattacaggtgtgagccactgtgcccggccaacctcatttctttctgagcaatagctttttaaaactttattcttagaagataataatagcaatgatatccttttgtgttattagttgtatcctcctttatttcactttatatttattttaaatcggagctaggcagactagtttctttcatgaatttcttacttctttcttagaattttagagtccatgaaatactgtaaataakgtgtgtgtgtgtgtgtgtgtgtgtgtgtgtgtgtgtgtgtctttaaaaatgttcactttttgttaaactcagtgctaggtattttatgtgcattttcttagttaatattcccaacaaacctacatggtatatactattacttccttcatttttccaagtgaaaacaacaagcttaggttaagtgattttcctaggcactttcctttgctttacaaaggaaaactctgagacttaaagaggttaaatatcttgctcaatgtcacacaactggtaagtctcgcacctgggattcaaacttatatgtttcttgagtctatagtctgagcttttaccctctgtgctatagctccttcctttcctttgaagttcttgacatctgctttcttaacatcttcagcacatgccagcctctgccctatattttctttcttattacaaattccaagatgacatggtaaccattcagttcttccttgtaagacagaaattggtccaaaaatagcagtctctttgctgtatctgctatcatttcagagatgatattgtcagtaaggtaagtaaaacagtttttaactactttactttgagctgcaaagacttctagtaaatgttgtgagagtttcccatgaacatatagcttacctctgtgccagttttgtcatagaagcagtccattatatttagtacatgaatgtccccaagactgtgcaggaaatcagatccacacatattgaatcgtagacttaggcattataatggaggactctgtttccagaagaataaagaatccttaattataccacaacttttagaaaagacaaaagttgacaggacatagtggttgacatctgtaatccaagcactttgggaggctgagatgagaggattggttaagcccagaagttcgagaccagcctgatcaatggtaagaccctatctctacaaaaaaaagcaaatgggcatggaggtgcattcctgtagtctcagctacttgggaggctgaggtgggaggattgcttgagcctgggaggttgaagctgcagtgagctatgattgcaccactgcactccagcctggatgacagagtgaaagaaaagataaaataaaagttgatgatgttctactttttaattcaatttctttaatattagtttgttcctttataaccaagcatcagtttggcgtcttgaccccaatgacctcagttgatggcaaaggctctgctatttttgttttcagacaggatttcactctgtcacttatgctggagtgcagtggtatgatcacagctcactgcagscttgacctcctgggttcaagtgatcctcctacctcaccttccagggtaactgggactacaggcatgtgccaccaccccaggctaatttttaattttttgcagaaacagggtctcactatgttgcccaggctgggatgggctacttttgacatacctaatgacctcaatcttggttttaattgtaataagtttaggaaaatatattctttattagtagcattaatatgttcacccttttattccacactcatattttagaaaataactacagagatayaatagatactcataattgcatatacactgtattaaggtcaaaggtggctacattgttaaaactaagctgttttggccaaccaatggccaatttcacccaatgatagcttgaaacatttttcaaaagttcatggatagcttaatacttaggtggtgggttcacaggtgcagtaaaccaccatggcacaagtttacctgtgtaacaaacccacacatcctgcgcatgtatcctggaacttaaattaaaaattttaaaaagttcatggatgaatgtccaaattcaagtattaaagtaaatttaggagtataaatatgtcattatgaaaactcagggctgccagtatattttaaaaatgaattaattatctgtaatttttatttgattgaataggctgtagcattcttctataatgattaactctgtttctctctcactttgtcttaacccaaatggtcttcactatgctcctggtgacaagtttaagaattcccattaagattatatcttatgtatcactgggctttcccccttccttttatatttaatccattcatttccagaagaaattctctttagttgtcatattcttcactggaattataccaaatattaataataactcatttattattgttagcatcaatggtagagttaccatataatttcttacctacatcagaaaatgtgtgagagtgaaagggaacactattaattgttactttcttatattaaaatatcaaattcacccttgttatctgtcttagggtctttatttgcaacaaacataaatccactgaaattaatttaagtaaatgaagaatttattggaagggaatggggatggcttattaaaccctaggataagaaatgaagctgagacttttgaggatctgaacccaccacatggaaagccaagagcttgacgtgttgctctgcttttgaggggtcatagattactaacttagtgattaagtccatgccttttttaggagccataagtaatgaaccattctcagaatgaatagatcaaggatgccatgaggtgtctttccattaccattatatacctatttattgctgtcgtagttcatttttcacgttttcacaaacacccgtaatttgccacgtaagcatgctgccatgtacataatagaagatgagtaaacatttgttgaatgaataagtattataactcacttttagaatgctgtcacattccttcttttacatgaagatgtgacagtgacatttgttcccccattgactgattatgcacatcagtattgccctgggcaggattgatgtgactgatctgacactttatctttgtgttccttgcagactttaattttccacctaacacatgaaaatcttagaagatcaaataacactagtccaggataattatcttcaaaaaccatttgattggttttctttgaaagtcaggcttactgacttgaaaaaaaattttttttaagtaattgagcagtttgaattaattaaaagtctgaattaacaaaatctgccagaatagacttcatttaatttttttttgtagaaattacaaaagtgccaggaatttaattctctgagtgacatccttgtggtgagattaggtcaataaaaagctggagaaaacagccagaagtttcttcgcacaattgttctataccagaccctccctggctcctgtctggggtttttccctccccttattgttcctcatcagaattggtccctgggaccctggtctttggatctgctttcctcccagcgtcttagcaagtcatttctgattcccacccaaactcttctgctcccattaccaacaattccaactggatttctagcatctatctttaaatatctcttgacatccctttgtgaaaacattaattgttgcctctactgcatgatttagctccgcctcccacaccacagactaagactgattaccaattatgcactgctggtaaagatttggttcctaattgtgaggatacattgtttttgtttgttcgtttgtttgtttgttttttgttgttgtggatgttgttgagatggagtctcgctctattgcccaggctggagtgcagcgacacaatctcggctcactgcaacctctgcctcccgggttcaagcgattatcctgcctcagcctcccaagtagctgggactacaggcgcacgccgcaacacctggctartttttgtatttttagtagagatgaggttttgccatgttggccaggctgggcttgaactcccgatctcaggttatctgcccgcctctgcctcccaaagtgctgagattacaggcgtcagccactgcacccggcctcattgttcatcgttaatatatttccaagcatggatctttgtatctgctctaatgaagagatacaactcgtttattattgttagcatcaaaagtagagttaccatataatttcttacctacatcagaaaatatgtaagagtgaaagggaacactattaataattactctggaataacaggtgcacatcaggattgccctgggcaaactgagactattgtcaccctaatcattactgattatctggcttctctaggaaaatattttgtttctgtattgagattcatttatttttcttcatgtgtttaaatctctttttgagtttgctaatttctggaaataagcagttcagtaagtagattagagatcagtcttattgaaatgctctttagtcctttttgtccgacatctcagcgaggctgcggtgtctgctgctgctgtccgagcttcacaatgccacccaaggatgacaagaagaaggatgctggaaagtcggccaagaaagacaaagacccagttaacaaatccgggggcaaggccaaaaagaagaagtggtccaaaggcaaagttcgggacaagctcaataacttagtcttgtttgacaaagctacctatgacaaactctgtaaggaagttcccaattataaacttataaccccagctgtggtctctgagagactgaagattcgaggctccctggccagggcagcccttcaggagctccttagtaaaggacttatcaaactggtttcaaagcacagagctaaagtaatttacaccagaaataccaagggcggagatgctgcagctgctggtgaagatgcatgaataggtccaaccaactgtacatttggaaaaataaaactttattaaaaaaaaaaaaggaaagaaatgctctttaaaagcgaacaaacgccatgccaaaaccttagactttcaaaactaaggaacatttgacattttacaaatacttgacatggacacttttcttttaaaagtaaggaattgattaccttgtcagaagaagttacctacttttttctttattcacaaataagtactagtttatgtacatcaggatggcattaagtctttaggtttttttttttttagaagcccctgtgacgtagaccagtatggaccataattcaaagttctgtaatagaaacatgcatccaaaattgactaagtagttttgcctcttttatgtagcaatttctaaatttttaagttttggataattctttatatatacattatatacatatatatttatagaatatctgaattgataattacctcacaaaccatctaatttggtggttttcccccttggctgcatatctgaatatttggagagctttaaaaaaatactgtcttttctatctccagaaattctaatttaagtggtctgggatggaacccaggcatagacgttaaaaaaaatgcctcaggtgattctcatgagcagtcagggctgaggcgtctctgatttaattcaaccctggtgtttcacatctgagaaaattgaggcccctcttacttagctgttactgtgggttaacaatctaaatatctctgtgaatctctagatgtttttaaaagggctctgcaaatgtgacatcaccttctttatttagaactgatcataatttttatggcttccaacagatgtcttggtttcttgaattatcctttcacgtcatggggcttctaaggcacttgctgccaaaggagccggaaggtatgcctctttttctgttctccaggtagtagagcatattttagctttttatttcttgccagtattcttgcttcactttcttcatttatcttttgtgcactaaagtttgtcttctaacactttagattatgtggattacatgcctgaagatgtcaaacttcaaaaatgcttctcttttgcctttatatttgaatgatagtttagctcagggatcagcaaattatggcccaagggccaaatgcaataagctgcctgtctttataaagttttattagaacacaaccatgccctttgatttatatgttgtccacagctgctttcaggcacaacagcagaattgagtagctgtgacagagattgtacgagctgaaaatatttaccatctggtcctttactttaaaagttttctaactgattagctaattaaactctctggactgcaagaaatttgtaagcattgcgcctctatcttctaaaggtaaataaagctgtagagataccagaggtcaacttgattcccacctacacttccattacctacattaatgacttggtctttttgcatgattaaagggttttttcctttatctctgaaatctcataacttttaggctaatcttagtgtcactcattcttcatcagtttttcttatcacactgtacatttgattcttttttgttatttttgaatgttgttttgaacacctataatccaaggatgccagttatctacattttcatttaactttgatgggcttgtatagttctatctttttgcatatatattcctattgcttacttttttagccccgtattctgtgtatcttatagtattttcagtaatgcctattcatcttttccctggctcttgtatctctgctttaagattgttaaaaattcttaaaatatatgacaatatgcttgatcataattttgtctgcctggtgacaacatttttttttttaaaaaaacaaatgttccttcttcatctgccatttgttttttctgtttccttcctcctttttttcttgcaatatctttacatagtttgtatactggtttctttttaatcactgtttatctttcaatgagataagttctttctgactatttgcaggagataggacagggttatgttttgagctgtaaagaattttctatggttcatagttgtggcataaactactaattgtatctttcaacactcatttytcctttcttctaaaacaatagaaaccaggttctattcattgtcactgtgctcagctatagccctaaaattctcaactttccttgcagggggttatagccatgtgactgatcttcgtccaagaatatgtaaagaaaaagtgttgagttggcttttaggtaagtaccttaaatgtgagagggaaatggagccttcttcctcatctctgcagcctagaatatggatttaatgaccagagctccagaagccatctaaaaccatgaggcgtgcttgaagatggaagccatgtacggagggtaacagagcagaaagttaggrgcctggcttcctgatgacaccatgaagccactatacaaatcttattcctcgaaattttaaaacaaaaaatagcttttttgagatataayttatatatacagttcaccccttgaaagtgtacaatccaatggtttttagtttgttcacagagttgtgcaaccatcaccacaatcaattttagaacatttgaaattcttttaaatgagagaaaaataatcatgttaaagttttttgggtttttttgatacgtagttgaacttcatcttaactgatatggtaataaagctttttataacacagagttgtgttagtgtgagtacgtgggtatgcaagagaatcgctttgcctttattttttcactgcttaccaaaagtgccagcttggagttcaggatcttcctctatcctgcctcatctcaccaataacttgcttcctgttgaaatgtcatgtctgtgcggttctgctttcagtcccagcttccctacttctctaaggtgccaaacaagcaccaaagaagtttcccctctaagcctgcatgttccagcaccattgtttagacaaggaattggtggttgctgtcccacttcttaggagagcacatgctctgcagggttgtctgggctctgcattttccggtgggtcctggctttgtcttcctcatgggccaatttaatgggctcttcccactgggctcttcccagtagactctacattaggcagccccttcctcatagcatgcttcagatttacagtcatttcctagttttctcaaggatggaacttgcattctgttttccttcttctgcttgttgcagtgtgactttggagaagagaaaggagacagatgtttttactccaccattttaaaaccagaagtctccttgcttaattttaaaataactcttttttatttatttagcagaggatatatggtcaccaatcagtggtaactactattaacttttgggagaatatttttccaaattttctctctgtcaatctctctctctctctctctctctctctctctggctctatctatctatattaacctatttaatttctggaaaacatgatatagaattattaaatagtctacaactttgtttttaattggcctttggcatctcagtgtatgaatataccgtgagttattaaccagtcccctagtttgggccacaggccacagggttgaagagcattacctcaactctagtggtgaggttgacatatgagctctaggctctcatatgaactctaggcacaaaaggccacagactttcaaggactgggatacctgctctgctgggggttcccaacatcataagacccaatggccctctctacttcccattgaagtcttttaaaaaatacttttaaaattttaaaccaattttagacttatgaaatagtaaaagtagtacagaattccttatattccttaccccatgttccttaaagttaacatcttacataagcctaataaaatgatcaggaacggggtattaacattggtacaatactggcaactaaacagaagaccttatttgaatttcatcaatgtttccattaatgcctgttttctgtgctaggatgctaacagtgatcccagattgcatttatttatttctccttagtttctttcagtctataagtctataacagttcctcagtctttccttttttttttttttgkgacattcacacttttaataagtaccagtcagttaatttgtagaatgtcattcaatttggaatgttttctcatgattggattgaggctgtgtgtttttggcaagagcactacaaaaatacacctatatctttctcaaggkatcattatccaggagtaatgatcttgatatgtcttattgctggaggactttatcttgatcagttgttttaagtcggtgtctgatcagttaggccaaattaatgttttttagccacacagtggcctatcgagacactatctcccatatttacttaggttagttacccatccatttcagtgtggttatgttattcatttgtgtatgattaggttcatttgttagtgtttctactcggttctgggttctcctttccttgcatcctggttgattttaagtttttgtttattttgaggatatgtgaagggtttgtgaaactgtggttctaagagtcagagctatacaaaaatagtacttggagaagtgtgactccctcctcatccctaaaactctgtttccattcacctcttttcttctctttttccacttgcttccttaggtaaccacactactaagcttctatttatccttcttttagatcttttgcacaaaagagcagacaccttggtattttctatcttcttcttatgtcctagagatactctttcgggccttgcctttttcacttaacagtatgtcctggaaatcatgccatgcctgttcagagaccttcttcattctttttttaccactgcatagtatttcatggtgtggatgtatcatagtttattcaaccactttactatgtatgggcatttgggtcgcttccagtattgtacagctacaaacaaagctgcaatgaataaccttgcatatatgtattaatgcgtagttgaaagtatatctttggggtagattcctagaagtgggattgctgttgaaaggtaaaaatgtatgtagttttgttaggtattgccaaatttatttccagaagggttgtaccatttgtataattggtacataaaacccataaaaatgactttttcctcacagcatcaccaacagaatgtgtcgtcaagtttttaaactttaaccagtctggtgagaaatgatacttactgtgttttaatttgtatttctctaattatgaatgaatttcagcattttcccatatatctgaaggccatttttaatgtccagtttttgtgaattgcccattcatgtcttttcccattttttatattcttaattttaattttttttttttgagacagaatttctctattgcccacgctggaatgccctggtgtgatcatggctcgtggcagcctccaactcctgggttcaagtgatcattttgcctcggcttcyccagtagctggaactatagggacataccaccatgctctattattattattattttggtagtgatgggggtctcactattttgcccaggctggtcctgaattcctgggctcaagtgatcctccttccttggcctcccaaagtgctgggattataggtatgacccaccacgcctgtcctcctatttttttaaattgagttttcagtcttttgtgtctcagttattaagagttcttcatatgttaaaactattagccctttgtctgtggtatatgctgtaaatcttttctctcagttttatcagtcgcttttgactttctttgtggtgcttttgttatataaaatattttttattttcaagtagtaaaatttataaattttgttttttattgcctctgattttttttattttttattgccttgggattttgagtcatccttagaaaacttttccctacactgagattaaaaatgagtttactcatagtttcttctagtacttttacagttttatttttaaatatttagatccctaatttatttgaagtttattaatatggatgatgtgagagatggatctaattttgtctttctccaaatgactacccaggaccatttgtttaagagtgtccatctttactccagtgatttgagcttataaatgagaacatgatattttgttttctgttcctgcattaattctcttggaataatggcctccagccgcatccatgttgctgcaaaggacgtgatttcattccttttatgactgtatagtattctatggtatatatgtactatattttctttatctagttcagtgtggatggacacctagtttgattccatgtctttgcttttgtgaatagtgctgcgatgaacacacaagtgtatatgtctttttggtggaacaaccyattttcttttggatatatacctagtaatggcattgctgagttgattggtggatctgttttaagttttttgaaaaatctcggccaggcaaagtggctgacgcctgtaatcccagcactttgggacactgaaggtaggcggatcacttgaggtcaggagttccagaccagaccagcctggtcaacatggcaaaatcccatctctacaaaaatacaaaaattagctgggtgtggtggcacatgtctgtaatcccagctactcaggaggctgaggcaggagaatcacttgaacccgggaggcggaggttgcagtgagccaagaccatgctactgcactccaccctgggcaaaagagtgagattccatatttaaaaaaaaatatcaaaactgctttccacagtggctgaactaatttacattctcatcaacagtgtataagcattcccttttctccacagccctgccagcatttgttttttgactttttaatgattgccattttgactgctatgacatggtatctcattgtggttttratttgcattatctctgatgattactgatgtggagcattttcccgtttatttgttggccacttatatgtcttctttttagaagtgtccatgtcttttgcccactttttcatgagttttttttttcttgttgagttttttaggtcccttatagattctggatattaggcatttgttggatgcatagtttgtcgtattttctcccattatgtaggttatctctgtactctgttgatagtttcttttgctttgcagaagctctttagtttaattaggtcctacttgtcaacttttgtttttgttgcaattgcttttgaggacttagtcataaattctttcccaacactgatgtccagaatggtgttttctaggttttctcctaggattcttagagtttgaggtcttacatttaaatctttaattcattttaatttttgtaaatggtaaaaggtagcagrctggtttcattcttctgcatatggctagctagctataccaggaccatttattgaacaggaagtcctttctccattgcttatttttgttgattttgttgaagatcagatggctgtaggtgtgcagctttatttctgggttctctattctgtttcattggtctatgtgtctgtttttgtaccagtacaatgctgctttggttaccgtagccttatagtcaggtaatgtacctttgaagtcaggtaatgtgatgcctctggctttattcttttttgcttaggattgctttggctatttgggctcttttctggttccacgtgaattttagaatagtttttttctaatactgtgaaaaatgacattggtagtttgataggaataagtgctgaatctgcagatggctttgagctgtatggccgttttaacaatattaattcttccaatccatgaggttggaatgtttttccatttgtttgtgtaatctttgatttctttcagcagtgagaaaactgacatctttatactgttcacttacctaaaccaagaacattttatttgattttattttagtttttctggagtaatttacaattttttgtggagtcttttggttgatctagaactaggaaaagactgtcctaggccataagtggtcaggaaagaaaaaatacactagaaaatgtatcaaagatctggtaaatatgcttacattgtctcaaagttcttcacaaccactctgtgaagcaggcattgttagctacattttacaaatggttacaatgagccttaagtattaaataaatagaaagtggtcaatagtgaaggcaggatataaatttatgtgcctgtatgtcaccactccatatattatttgcaagagcatgccaggtaatggaacatctagggaaggaagcattgataataaagtttaaaatcttcagaatgaggctagaatggtggttagcttagatccagtattagaacccagtgttgagccttgtatttagttctgcacacttcacttttagagggacatggctaggcttggatagcaacaagatttcaccctcttgttaacactacttgattgatcagagctagagagctgtgctgaaattgattacaagacttcatctgggcatattagtaaagtacatagggatcaatatgcaatgttttccatgagtatgaagatagggaaatggggtgtgtcagctatctgtcagtcaaccttgggctatacaacaagtccaaagggaagtgacaaagatggggtgggaactttataagcatgccatggaatggaaggtttgaaatccaggattgggatggaagaagttttgctagtttttttgttgttgttgttgttgttgttgtttttaacgttcgaaaaaaaagtcatgtcaactttttatgtgtgattcctgtggttagaacaatgatactgtgtagagtgccaactcaggttccatagaaggaagaactcttctaataatcagagttgcctaaatatgggggaaaatggcctggcagcgatcatgcacttgctgacttttcagtgtgacatagacattgagagttcaggctttgggatcataagatcatgggttacttgtgttgaatatattacagaagtcaaatccctccattatatatactcctaaccctctagagcatgatgtgggacttattttacatttatttgtgtgatcctttgcttaaaatacatctttctcagcacatgagtactctaatgatggcagtgactgttttgctcatagtacctggcacagaataaatgctcaataaatgtttgctgaatgaatgaatgaatgaatgtaggtttgtcactctcagttgttccctcctgggagctactatcaagcttgtgcttgagtcacttgctttgatgtgccaaaatatgttaaccaatargggccccaagagacacagaagtcacagaatggtgacactcaggctttgtgtccccgatgccagtttcactcatggatcaagggaggratgaggcaggggaggagggatgttcagaagataagtgagggaggggtggtaatctcccgatagttgttctttcagactttgcacttcccttttagaaacctcatcatacttctattagttgttcaatattgtcttttctatcagatcctccctgttcaatttctaatttttctgttatgcagtatgccccatgagggtagggaccatgttttccttaattatttccgtaacccgagcacctagaacagtgcctggtgtatagtaagtactcaataaatttttgtgagatgaataaatacataaatgaaatgtggtctagaatctgtgtgcccaataaagtagtgtatgagatattaggacatgcaatacacagtctctgttttcaagttgcttgtggcctaggtagatacttagtaatatgcagacaaaactctaatacacaaagaaaaaaggcactgaagcagaaattaagtttgaatctttgcctgcagtgatttgcctgtgaataggatttcagtgaccaataaaaattaccctgctcctttatggtgagttgtcataaagtatatgtgcccctgccttttcttgtatcttctagtagcaaaagaacacaaggctgcagcttaaaagtccagaatgtagtctcttcagtttccctcaactgtgacargttagtggggagcaataattcaaaaggatctttctagaggtaatcttgcaaaattcttagaaaaatctaaattgcaaagtgaatgtacaagggggtaatkgtgcaagcatcttcagcccaagatgcttcaaaaatactgagtcatcaccaaggccagaaaaatagaccttatcttatataaccacacactgaacttaaaatatgtaaagggaaattaaaaattttttgcatattacacaaaacaagtccctgagaagccagagaatgatatcttggctaaaggagtatttgatgttagttgaactgtaaatttttaggaatttaatattgattacagttatatgcaaagaggacatgaggaatgtgatgggctgccatcagccaggagagactgttgtacttggaaccataagaaacatgtgtgagtggtcagggtgctgaaagaataggactgaaatgggctgtcaagaatgcatgaatgattaatgtgtaagtgcagtgatgtggattggaatatattgcaaatttgattgagtgggaaaagtgggaggggagacttagtgcctctaaatgtatgtgggattgttttaatatcatgcattaatagatactagccagatccattaagaggttgtcaccaagactcatcaatttttcttaccttatatttcttgtattcactcttcatttcctctgccttttctctagtttggaccacacatttcatgtcttggctatttcaatagttttccagttaatcaacatgactagtattccccaaattgggttaacaacatctaaaaccaccaggtcagtatttctaaaacaacacttttctatcttaatccttcattgtccttctccccaaccccccaatattacccagaatagtgggtttcaaactgtgtcctacgatcatacatagaatgctccagaaagagagattatgtttgtttttactcaacgaatatctttctatcacttagyacaatgtggaggcagaaatattcaatgaatatttgttgaatgagtgaacgaggtggctcattggttgctgggaaatggaattagagaaagacaagaaattggattctggggctcctacttcctatcaaatcagcagctccattattatctgcttattatgtaggtgttttgagtaagttttgtctgaaaaagagtcctgttgctctaagtatttgaaagccaattaactaaaaatattttaactcgtacacctaacatacaaatcctaaattaatctttcaaaggaacctgctagtactccccaaaatacagagaatataatgtggtttgttgttgttgttgttgttgcttctgctgttttttttttgttaaatgtttttttgtccagcaatcctctccaaaaccccatgggtctatggggctgccatatttgttagtatatgatcccattcctgagaaataggttttgacccaggcctggcctgttataatgtcttgacatccaggcctgaatttgtttgtgggtagatacctgaccccagctgggccatttgttatcctttcctgggattttaaacagtttttatcagaaaccaagcaataacaatctgatcatttctgtggctaacgtttttcccccggtggctaacattaagagaaactcttcatgatcagatttcccagtgtttggagaagcaaactagagtggaagagtcagaagcaaagatccagaaagatggagatatgagagacagagagagcatcctactggtatttgagttcatttccaaggctgtcgaaggttgggttttactgaaacagtccctgtgatagaatttgtggtgtaggatatttattagggaccagcacttatgggaaggaggaagagaaagcaagattgggaagaggaagaaactgaactcaatgcaagtctgacaactccacagagaattattgagcataataagtccattgagcataaatggcccattgaaattgtgctgcatgagctgagatgttctggcctttatacttccacagtgattagtcactggatatgggctacccagggaagggcaagctcttggacaaggcaactctcagcakctgaggcaaaccctgaagtagatgatagatgaaggctgtctactgaccacatggccagcatctgggaaaacatattgttctgtgaaagggtatctgagcggcacttctccatgtccaccatgtaggcccacctttaccctgccttcaacatgtttgatcttcaacttcttttaatgatgtgagatattccaatatgcttccaatacatttcctttttttttgttttttcgcattctttttttattatgattatacttaagttctgggatacatgtgcagaatgtgcaggtttgttacatagctatacatgtgccatggaggtttgctgcacccatcaacccatcatctatattaggtatttctcctaatgttatccctcccctagccccccacccccctcataggccatagtgtgtgatgttccccttcctgtgcccgtgtgttctcattgttcaactcccacttatgagtgagagcatgtggtgtctggttttctgttcctgtgttagtttgctgagaatgatggtttccagcttcatccatgtccctacaaaggacatgaactcatccttttttatggctgcatagtattgcatggtgtatatgcgccacattttctttatccaatctatcattgatgggcatttggattggttccaagtctttgctattgtgaacagtgctgtwataaacatacgtgtgcatgtgtctttatagtagaatgatttataatcctttgggtatgtacccagtaatgagattgctgggtcaaatggtatttctggttctagatgcttgaggaatygccacactgtcttccacaatggttgaactaatttacactcccaccaacagtgtaaaagcattcctatttctgtacttcctctccagcatccgttgtttcctaaatttttaatgatcacccttctaactggtgtgagatggtatctcattgtggttttgatttgcatttttctaatgaccagtgatgatgagctttttttcatgtttgttggccgcataaatgtcttcttttgagaagtgtctgttcatatccttcaccgactttttgatggggttgtttgtttttttcttgtaaatttgtttatgytccttatagattctgtatattagcccttcatcatatggatagtttgcaaaaattttctcccattctgtaggttgcctgttcactctgatgatagtttcttttgttgtgccraagctctttagtttaattagatctcatttgtcaattttgrcttttgttgccgttgcttttggtgttttagtcatgaagtctttgcctatgcctatgtcctggatggtatacatttccattttttaaaaatcaaggtcaagttagattgttgtcacttgctatgaacatcctgactgatatccttcagccagccagattgccctccagaatactcttctatccttttggttttgaaatacgtgtgtgtgtgtgtgtgtgtgtgtgtgtgtgtgtgtgtgtgtgttattctctactgctaaggtctgaatgttggtgccttctccaaattcatatgttggaactggaaaaccagtgtgatagtattaagaggtgcagccttggccaggtgcagtggctcaagcctgtaatcccagcactttgagaggctgaggcaggtggatcacgaggtcaggagtttgagaccagcttgaccaacatggtgaaaccccatctctactaaaaatacaaaaattagcgggacatggtggtgggcgcctgtaatcccagcttcttaggaggctgaggcaggagaattgcttgaagccagaaggcggaggttgcagtgagctgagatcatgccactgcactccagcctgggcaacaagagcgagactccacctcaggaaaaaaaaaaaaaaaggtggggggaggtggagcctttgggaagtgaataaataaatcatgcagtttccaccctcatggatgagattagcactcttataaaacagccttcaatggactcccttgttccttctgccacatgaggacacaggtagaaggcgtagttcatgaagcagacgttgaatctgctgcaccatgaacttggacttcccaggctccagaactgtgagaaataaatttctgttgtttataaactgcccagtctaaggtgttttgttacagcatcctgaatggactaggacatctatacagtcattcgtgcgacaaatacttccagtgtacccaccatggatcaggcaagaatctaaaccctccctttcctaaagcttcagcccactgcctttcttcgcacatgactccttatgaagtctgctctcctttgaatgacaatagcactcacattcctcatcacctctaccattcgtccagcactactttgtcttccactggatggctggcctctggcagaactgttttttgtgacactgttttatgaaataatgggtctcaratgaaggatggggtgagaaaaattccatgggactttgtcccaacctctaaggatgttgttcactacattgcagtgttctttctacaagaccctcaggagatatttcttttctatctcaatatcaataccacatgtgcttctgaataactgcttggtttttatctcactaccttgtgaactgtgcaactggctaaatttctcttttcacattggctgctggataactcaagccaaacttgcacacccttagcaaatgtgtaacatactatgtcagatgccagtaactgttrcctccaggtcattgagactgaggacgtgattgtttgtttaagtgtgttgatatggtttggctgtgtccccaccaaaatctcaccttgagttgtaataatcctcacatgtcaagcatggagccgggggggataactgaatcatgggggcactttcccccatactgttctcatggtagtaagtaagtctcagaagatctgacggttttatagaggggcattcccctgcacaagctcttttgcctgctgccatgtaagatgtccctttgctctctgactttgtcttctaccatgattgtctggcctccccagccatgtagaactgtgagtccattaaacctctttcctttataagttacccagttttggttatgtctttattagcagcatgagaacagaccaacacatggggtttcttaaaaatttaacctgggccaggcacagtggctcacgcctgtaatcccaggactttgggaggccgaggtgggtggatcacgaggtcaggagatcragaccatcctggccaacatggtgaacccccatctctactaaaactacaaaaaaattagccaggcatggagacatatgactgtagtcccagctattctggaggctgaggcaggagaattgcttgaacccaggagctggaggttgctgtgagccaagattgcaccactgcactccagcctgggcgacagagtgagactccgtctcaaaaagaaaataaataaataaataaaataaattaacctgaatgcattgaggttgggcatagagtcttggttgcctcaaacatactcaccccctgttgtaaacatcacttgtcacttcatatatgtatgcacacgctggcccccttgaagttctttgattttattattcttcctctatagcttgcattaaaaaaatttttaagaataatatttttaatttaacccaccgtattcaaaatgttatcatatcaacttgcaatcaatgcagaaaaaaagtattaatgagatatttttcatttttttgtactaaacctttagagtccaatctgttttttattgttgtaaaacatatataacataaaattgaccttttaaccatttttaagtatacagtttactgaaattaagtacattcgcattgttgtgcaaccatcaccactatctaccagcagaactttttcatctttccaagagaaaactccataccattaaacaataactcctcatactcccctctccccagcccatggcaaccaccattctattttctgtctctatgaatttgacttctccaaatacctcatgtaagaggaattgtacaccatttgtccttttgcgtctagcttattttactcagcataatgtcctcaagattcgtcagcgttgtggcatgtgtaagaacctccttccttttaaggctgaataatatttgatttatatatattccatattccacgttttgtttatctattcatctacggtttccatttttatattagccaattttatgttgttgcccttgttttctctgtaaactgcctttaattattttatgagcagtgtgcagcttaaatacattcatagttttcatcttcaataagacaataagctccttaaaggtagtgtccaacacatgttttgcacaaaggggatgtttgacacgtgtgttcattggcacaagtaacactctgttctaacctataggtgaggtgaatgcagtggggagtcaggggatgcctgcaccttggcttggggtgatgtagaacacagaacatttgtgtccctgtgtccaagcctttggtaatcttatctatctgttctatgctcctgcatttacttttcttccccaatatctttttaatgatcattttagtaacagtactgtcaacatatattacactgaaaatgctgaaaggagtccctttggraggaggcacacaggctgaaaaattgctcttcttattttcctctccttgctattccagcctcaactgctcttcttggtggagacaaccactatgggaccagagtagattaaaatataaggctgctttaatggtaaaaagtttcccagtattcaaattcagtgaaaaatgcccttaagctttaaaatatagagatataattcagtgatttttggggaaaacctttaaacagcaatctaaaaagaaaagtttggaaagaacctataatcagagcctggttgtcccaggaggtaaggttatatgggcatggtggcttcttctatggtataactaaagaacatgaaagtccttctgaacttacacccagcagaccaggagaattttcccttgtgtagtgacacttgattggcattcatgccaaagggctcttgtgaaatggttgcctgagcagagtgaggtggcgctatagtagcacatcaacactgattccccatgtgctccctgcactgtcagtccctaacaggcaggcataaagcctctgctggagccactgcagggatgggagctcaagaccactcatgcctaccctcacctgagtagcccactgtggtttgggacagccttgttgttagaaaaatctttgttttattgagaccaaaactttctctataaacatcacctttggcttaaaatttgccttaatcacatctaatcttttttttttttttttttttttaaagacagggtcttgcttcattgcccaagcaagcaagagtgcagtggtgcaatcatagctcactgcagcctcaaacacctgggctcaagtgatcctcccacctcagcctcccaagtagctggaactacagccatgggctaccatgcttcctggctaatttttaaattttttgtagagatgggaggtctcactgtgttgcccaggctggtcttgaactcctggccccaagtgatcctcccacctcagcctcccagttccataaaaaggagaactcaccaggagttgctgcacagttcatgttcacaggatgcacgttctttcctattcagcactaagaaagccattggctttaccactgaggtgaggcctgtgaacgagttagggtacagcccaatatatggcttccttttattttcttgttttaaaatggccatctgtagagtcttctggaagccaccatatgtctcctgtgttcttgacaacaaccatgaaaggtggggtaggctggctcctgttctgcagatggtgagatggcacatggggagatggtgttgtacagtgggaaatgcaggctgaagccaaacagacctgggttgaatgcaaggtccaccaagcatctgggtccacactccctgtctggccttggcctagtcatttaaactctccgagcccaggttcctcatctattaagtgggggaaaataatagtagctacagaacagggttgtaataacaatgaatgtataaagttgtacagccctaagcttaaagcttggcttgtgttattgttgttaataaactattctccacccactccctttcatttgagtaaatctgcagcccaagctttactcaaaagaaaatattttgcattatgggaaaaggggaatttttaaaaaatcccttctctatgatacctggagtctgttttatgaacctagaaactaaatattcttatcaacttggcaggtaaatgaaaacaaaattatgtcacaccaaactgaaaaggcgaatgcatctttttgcatctgactttaaaagctgtcaggtctaagccacctagatttcattctaatgaggattcagggccagcttgtgaatcgtgagtcatgtgcaggctctgaacccaacagttggtaagctgggcttcaacaaagaacttaattaaggagaaccaccctcttcccaccccccacttattaccaccctcaatccccacccacaaaccacaaagggatatgcaccttgcactaggtttttgaccttattatgcacagtgtaacatttattacttcactcagcactgctggatgaaaacagtcctctttcaatttacaaaaacgcactttacaggaaatgtaggagaaaggccagagtacagattaatgaatgctatcaaatacatccacctgaaagtgtcaccaattttgctgtgacacagttcctggaattgcctcagagatttaaacttgtggatacaccagtattgtatccccaaagactttgaaagaagtgcaaaaattatgtactgttcataatgcatcgtcatgcttatttgcatgtgtgtctggtctgttctattcctaggccctccatgaactttgccccacctgcctctcccatctctttctgtccctctctgcttcagccaacctggccttcttgttcactgaaccagcaaagctagccttgcctcaggatatttgcacttgctgttacttctgcttagaatatcctttgcttggctggctctttccaccatacaggtctcagccaaaataccacctccttagagaagcattttctcatcactactatgaagtagcagccctcagcttttctctagaacatacttttttttttttttttgccttcattgtacagtcttcccttggtatctgtaagagatttgtcccagtacccctggaggatactaaaatcytaggatgctcaagtcctttatgtaaaatagcatagtatttgcatataacatacacacatcctcctgtatacttgacatcatctctagattacttataatacctaatacaatgcttacacatcatttcatttgcttgaattaaacatagcacttggcatgtgrcaaattcaagttttgctttttggaactttgtggaacttttttttcccgaacatttttgacccgcaggcagttgaatccatgaatgcagaacccacgaatgtggagggccaagtgtatttaccactatgtctcagtgattttagttaatggaggtgacaacatggagaggtcaatgccattggaacaagacttattacttacatttcccaagagaaggggatatacgacaccacgcagggccacagagaaagcaccaggttttggtaggaggcagaagccagaaaggggagagtctaggccacggtctttatcagagattccatgggaaagtcaagacagggcagaataaatactttaggactggctagttttgataatttctgtgggctttgggctataaaggtggtctctaattgcctcatacgtggttccaggataatttagggcagggaaaatattagcttggtgtgtgagrgttagataaagggggtagttggggatatagactctggataggttggttggcatgtgaaaggaatgcctttcataagagctcaatcctgagcttttaactatctctaagaattggctagtgttgcaggaaaagtctctttccagacaacaagatttttcaggtgtcaaaatgtcataagatatacaaaataaaaaaatatgattaatacaaactatatgaaataatctcatttatttttgtctgtctactttaacagaaggtaagccccatgaaggtagggaccgtgtccttattgttcatgaccatatggccagcacaaagtaggtgttcaataaatatttgttgcatgaataaggaaatacgagctcctagagtctgggactgtgtggtcttcacagttgtatctccctgttccaactccatccttattctttctctagcacagtgcagaatacatagtaactgtcatttaaaaagggttgttgaattaatttgaactgagaagggtaatataccattttaatttgtgtagtttaaaatagttttagcaaatgtattcatttgtcacagataaagtggatggcacaaaaaatcatacattttagtaagaagaaataagatcaaacagattcaaaacatatgctccttttaatcagggattagcaatagcatattcaaatatcaaggacaacacatcatggattatagtgacccgatctctgcataaaatagatatttaaattcacctttaaaaacaggagcacagccagacagggttgtatacagctgtagtccaagcttcttgagaggctgaggtgggaggattgcttgagcccaggagtttgagtcttgcctgggcaacacagcaagactctgcctctaaaataataaaaataaataagtaaataggaatgtaatataccaagatgttaaaagcattaatctctagacagcaggagaagtatctttttagttttccacattttccttattttttacaatgaatgtacatgacttttaaaataagaaaaaaaatcattcaaaagaaattagcactttggttatattttattctgacttcctcattagagtatgccagcagattaatagaactaacaaaggagcctaaattctgcaacatttttttctagctccttttttatttatttatgcctcagaagcaatgtgaattctcaaattatcctttattaaatctaatcagagttttgatggactccaacaaacgagagcacagcatgttagttaccatgtcatgcaagaacagaaaataacctggtagattctccatgtcccgctaccaatgtcagccctgccaacgatccttactgacgttcccaaaactgacattcccctttcattgatgtcactgaatcaggaagccgaaaagctgttgcaaaatgactgtttctattgcaaaggtttaaaactttagagattgaaaggttaaagttaaaaatatgtattttaatttgaacaacagatggccttggagtgactacaaggctgaattaactctcaagtctctatggctgtttgtggaaagaaaaaataaaaaagacaaccaaaacccttaaaaagcccacactggaacacacagctcaagtgctggtgacatcagcagaatctctctgttgaattagagtcccgaatttggcttcagagccatctgttagcctccagatagaataatcttctatgaaattatactgcatagtttcactaatgaacatttccaattgtcagggcctcagtctcatagctgtcccacctcttggagcctccatggctccctragcccctgtgatacacggagggatcctacttgctaaagttcacaatggatctgtcctttgaaaagatgtgtcttatcttagattgagttctatgaaaacagtctttgagatggagagctgcatgcagaaggtttattagaaagtgctcttgggaaatacagctataaggaaatgaggaaggctgcattgtgcaaagggaaaagctgacctacaaggcagttctaactcaggccttgctgtcctgtggcgagctctgttgctgggaagggccgtcagagttgtcccagattgaatcacagaatcttgggtctttgcatcttcatatcagctgtcattggatatcrgctgctccctgagaaaatatttagtaaatgattgctttattattattactattgtttgctctagactgaatgtttgtgtcccctcaaaattaatatgtcgaaacctaacccccaaggtgatggtattaggaggtggagctgtggggaactggttaggtcatgaacatagggccctcatgatggaattagtgcccttataaggtgctaataactctggtcaccctttcaccatgtgagaacacagcaaggtggcactgttgatgagccagaaggcaggccctcaccagacaccaccaaatctgccttgatcttggacagcccggcytccagagctgtgtgaaataaatttctgttgcttataaggtacccagtttataatattttgttatgagggtcaaatgggctaagatattattaatcccaaagtgagtggatccttctgctcaacaccaggcaccagttggggagctttggggccatttgtatgggtgatgaggaaggataaagggctgagtagaacacaagtcagatgtgcagtgctggaattaacagaaaggcaatgtcaccctggcatgcctatgcacatgtacggaatatcaaaatgtggggagaaggcagccaccctacccagcagcgatgaagtcctagagtctactggcttgggcatcttgctgctctaaccagaaagctccgcgtctgggctgctgccagagtgggtataagtagtccctttttaggcagaacattatctagattggattacatgcttgtaaactgatcagtgcatcttcatatgctgtcaagcatctgagttcaaacaattgaactattttaataagattagcaacttggccctttcctatagtttttctctctacaggattccattcagaatcctctggagaagagtgtcttagggaagtagtaggatttcaggatgccctgcatctgccttcctgaggcagatacagctaaaaaagaccttcatgtccactagaaccacctgtacaccccaaaatgtgccagagaaatgtgcccaaagtcaagggagtggtattgtggacaggaggtttaataggattaatatgtattcttggttggtaaaccttgcaatgagtgtgcttataactcacccatggattgagagccaatctctgcctccaaaggctagagtgtaaaaaatggccagatggccaataatgaggcagaatttcataataatataatgattaagggtttgaaataaaggttatggaattgcacagatctgcttttcaaatttcagttcctccacttactaattttgaaaacttgatgaagtgatttaacatctctaaatcttactagtttcctcctctttaaagtgggataacaatgcctacttgtggcaaatggacctaagccagtttgctcattcacaaatactagatccttcgaggattatgattgggttctttttrgtagatggtaggtagatggtagatgttataatcgttgcaggtagaaggctttcagtttcctcctcaaaatttctctaccaggtgctacttgctacatgaaagcaagtctcaggccagattctcaaattcttccagataggtaggcacaaaaacagtcatctaactcattctgtaagtgtgacaaaatcccagctctctctgtaattctctattggttaataggacaatttttagaggtagaattcaacttaaatttctagtagattctaggtaacaccagcctctcttcagaatcctaaatctagggattcttttttgaagcaattgggctattttagtaaagggggtgtgtctgtatgatacttatagacagtgcagtgcctggaacacttttatttatttcaccaatgagaaatgatttctaacatttttatgctaatgaataaamctttggtgttgaccagaaatcatgatagctaaagaataaagtagttctgtgggaactctttctggaatactgtattctaatatagtctcacaaaagctagtcatttttggagagtgttttcctgattagaattctttgaatattaattgaccaccctaaggtggttttaattagggcaattaactagggtaattaactactttaagatgtggattaaaatacgtatgcaaacactctctcacagacaaactactgtctatgctgatrtattttaaagttaaagaccacatagaatgtctcatagaattaaatgacataatcaagtggtaactgacagcctgccctgatttatgggaatgaatgatacttctttggtggccaccagaaatacattgacggtgggggagtttttgcaaggrattggaattcttgagtcaacagctaaggggtgggtgtagagagctttagatgttaatgttaatgtgatattgatagatatcactagagggtaaactccataaggacaggaacatttcccctttatttccctgctgtatttcartgtttagaacagtacctggtatattgtagttgctcaatagatagttgttgaatgaaggaatgaataaattttaaaaatctgatctgattcttttgaggatgttcaggagttagtgcagtgctaggcatagagtaaatgcctaatgaatgtttactaattagtatgaatgaatgaatgaatgaataagcaattgartgaacaagtaaaagaatttcctaaaggatattgtcaaactagatcaatataatgctgcacagaaatttaatttatgctgtgtttatagcaactctagcgatgatattttagataagatggcctgagcatagtggcattataaccaaatgaatgtctctatctgaagaatacaggttaagagacccatattgaactgaagaaagggctctatagtagtcrttggaaggctcccttctaagctcatcagagtctccatgtagagattgccattttccacgttgtatattttgctttttatgaacagctcttaattttaattttcaaatctatcaacctttccctttttggtttgcacattttataccttgtttaagaaattctcttctagatcaaggttaaaaatatatacttctttattttttattaaagttttgaaaactttgtctctctcrgaggtcatcaaaccatcaagaattgatattttgcatatagtataaggtaggaaaatacaatttcattttcccttatatggttggtcattatttaaatataattttatttagtccaataactacattttatcatttccatctaaatcttgactagaggcttttttgggaagtggaaagggcaggttgtacaagtcatgttaattttatcctcccaacttgtgtaaatgggagcctgtgcttagggatttggtgagaggagagatccttcctcccatactccctcctttccagctccaactgtctcaagtctgagacaggccatgactttcttctcattgcaagttcattaatcatctaaggaggatgtcaacctttgggttgtgggaaactttattctagaatctctgctttaccttctcattctgctttattccctcacatctcatgtctgccccaataaaaccaaggctttttgctaccaggagtaaggaattttagtactagattatttctccttattgttgattctggcctcaagggctttgggaattccctttaatctcctgaaagctcattcatgcattaatttttttttaatttaattcaaatttgtagatgttctgaaccatgaggaagtctgcaaaaacctagtctttcacgttttcacgttgctgaaatagaagtctatggtatcttttttgtttatttatttattttttgttttgggggttggtttgtttatttcatcagtgcctttggagactaatgttttttacactcacatctttgatccatacagacttaattttgatatagtaaagggtatggtagggaatcctgctttattttttcaaagtcatccagtaaacacaaaacaacactatttattgaataattcacagaatggaagttttagaatgtaaatactcaatatgtgatagggaaaagaacactaatacaaagtataaaatcttccaaagcaaggccaacccctattattactgtcttaccagtctgcactggatgtggtcagcttcttgaatcaccagggctgtccatgctagagatacttccatctcttttagctcaaaatatttacagaaatacatatactgttgggaatataatggaggatatataatcaactttttcatgttcattgttttgttactatacatagtagatgagtttcagaaaagttgtattacattaaaatcatatttttagttcccctggcaagtgttctctttaaagggattttactttgaattatttttgaaaatcatcttaaagggtaaataatgactccctaatttttctatgatgcaaataagagtttttatttactaagtttctcaatgcaagatatacttgcataatgcagattcttttctaatacaggagaaaaaaatgaggaggctaaattttaaaagcaaatcaatgtgtattttaaaaaatgcgattgttggaatacagacttaaagacatttcttaaggatcatttacatgaatccaatttgcttgcctctatatgagaggcaacattttgggtgattttttttttcaaaatctaatttttaagctttgtagggtaggtgccaaatggtattttaaaaacacacatttaaaaaaggaagaacgtgcagttttgcctggagtacagatggagcctgtgtcaattgaaggcattttgcctaaggacacagagaaaatcacttcttcataaagaccataaactccactcatgtttctgttcattttaatttgtagaaagtgggaagaaatcaaataggggggcatacaggttcatttgtttaaataatctcatcactcaaattttatatcagttatgctctaaaaattatttgacccccaaatcagtaacgtaatttttatatgaaaaaatatggtcatttctggttatttcttgttgcttctcttactgatttttttttctgtcatgtactgtgtattgtgtagatagggcccaattctattccatctccatacctcatacatatcttttatatctcctcactttggtcccctgcagcataccttatattagtaatttaaaaaatgatgatagtaacccttattccctgtgccaggcattgtgctcaggactgtacaggtaacttttcatttaagctgcaaaacagaaatgaggaaccacagagtatttgagagacaagaggcagagccagtatctgagcatgcgctttggcttttaaaaccccttccctttaccactctgccgatattctttataaagacataaatgtgaaactgctggtaagaagataatataaatcttcattgattgacatggaaatgtgtctattataaattgctatgtaaaaaactcagattgtaatacagggtaggcatcaggatcccattcttttaaaaataaatttgcatatgtacaaaaatggctggaaagatagattcctaaatgttaatagcaattcccagtggtttaaaatattcttctttaaatttttggatttcacttttcagggagcgtttttcagtcatggttctttattgcaagcaacaactctgggggaaaaaaaaagcagcagcacatggccagacgtgagatctttggttttaataccatgtgctgctgtatcatttatagatgataatctttttcattttatttcttccttctacttttgattattaagccaattctcatattatcaaatatttgggacaaagttaatcctgcctggcaataatttctcatcggttttctatttttaaagattaactcattttaatctgttctccctgtgtcattaatattgtagtggcatcaagctacagcacaaactgacctgtatgaaaaagggaaatgtattgagttataactggagcacagaggttgagtcagagattctcagtgtcatcagggtattgaaacaacttctctgtgattcctttccctctactctccccgctttgataggctcattcgcattctgcttcctcatccttgtataaaaagctgcagctattacagtctccacatccttaccttcctctcttcagctggagaaagaccatcgcccctgataggtcctgggaaaccatgaagaaacttctttcctagagaaacctcagcaaatgtctgtttcttatttgcccaaatagggtcacctgtaaattcctgaaccaatttctaaatatctaactactaaataccaaattcattactcaatactaattaccatgaagctgagttgggtgggtaggtctccaaagggaaatttggctgctgttagtaggggaagaggaaaatgaaggctgggaagccactcattctcactggcttttatatccaccccccagtacccccaccctcccaactgccactcttaactcttccttacttcatttttgtgacagttttattccacctacctactgaattattttcctcattaaggttttatgaccactttaagaatctaacataacttgcttttggccacaacatcaaacccaaactctcatatccatttaaatttttccctccccaaccattcaccaccacttgatctattatcctaaaacagctctcactttgccccttctttactgaaagttgtctgagtcctggctgcataacaggtgatgttcattcaccctatcctgtcatttgaaaattttgacaatctggcctcatctacaatttaactttttctcttgtccttccccttactatttctagaaaacaccatattctttcttacctccacaactttgaaaacactgtctctttccatctggaaatctttcttttcatagatttggataactaagtaacattctataccatatatttctgcatacttatgtctttttctgtgaattataactgttcataaaaacacaaactagcaatatttatatgaaggcatgtttcattcattagtttatacactgatcgtggtctataaggttctgcatgagcagatgtccacctacctcccagtcttgtgtcacattctcctttttcttgcttgctatgccttaccacacaacaaatgcctaatgctgtttcctgttttagaaattccatacacatatcctccacccaaaatgctctttctccacttcttcacctgaataaactctactcctcttttaggtgtctccttgaatgtcatttctttagaaagacctctgactctcaaaagctttggtcctcctgttatgtgcttttatgggaccctttacttttcctttgtaatatttatttcagttgtaattaattatccattctattatctcttgaatgcttattactcttaacatactctaaacacctaacacgataattagtactggtggatgctccattctttttttgaataaataatggtggatactttttctccacagcagtgctttttttcattaatcttcactggctaacaggtgctgcataatctaacattgcttttatttttggataaagcattgcattcaaatcatttcattagatttagaagtcttcctggaaatagacgtgaactaccaactctagagctttggaggtgactttacttccagctcttctgctgtcttctcctcccgtccttgatcatctcacttgcctaacaagtgagtcattcacataacatttaagaagaaactcccatttgctactttgtgtcctgtttgatgtcttcttttccttaaggacaagacacaggataaaagataagtattacacgaacatgtcttcatcatgcctggccttttccaatcagtattccaaatatatacatgcatataatgcactctgttcatttcaaatgagatctaattaaatgctattttataccaaatatcaaaaatccaattagctattcaagtagactccagaattttttctgtttggccattcttactgaatatttcaagatttattgagtcaaaattttatactatttaaactgaggctacagagtttcagaatgagttttagagaaactaattccaggtgtattcttactgatcctatgatatctttctgtgagaaatataggacaaatacttctcttctgacttcaaaaaatgaagaaatagggattatgtcaatagcccacttctctttggagcaatgaaaatgttctaaatcttggctgttcaatatggtagcactagcgacatgtgattattgaacacttgaaatgtgattagtgcactgagaacctgaattttaaatttaatttaattaacttaaggttacatagtcgcatgtagctaatgattagtgtatatcacagcacasctttatatgctcaaagtgatggataaatgggcttctggatttgtaaaagaagagagtcaagaagggactgttagccaagcgcagtggctcatgcttgtaattccagcacattgggaggctgaggtggaagaattgcttgaggccaagagtttgagaccagcctggacaacatagtgagattccatcgctacaagaaaaaaaaaagattgattgttaattctggttctctcctcatttctcattcaggtgaggggacaattcacaagcagacacttgtttctaataggatgtcctgactatgtgagacattccatgccctaaaactacacatcacctcatcggaaacactgaaagacagacttctgccaaaataatttgctaagcttgtttaaacagacaggctgggtttcttctctctcataagactcagatatagaaatgtttaaagggttccgaatcataccaataatatgagcacgtattatggctgagtgtttgtggaaatattgcacatccacccaactcatcacctgttaagtcacatctttgtttaattttcaaaaatgaaatgattcatagtcatttcattcatgggaattggtgccagtttatttctgggagttcaattgccagcttctggaattgagacacaaatatcttaatataaacaggctatatgcaggagctttcaatcttctttccccttggaaaagcaccagtaatttcatatttggtctaataaatcagtttccggaagaatgtttgctgacgtcattttttatatccctcatggattttatatggaaaaacagcctggtcatgttcaaagcaatagattagttctggtagtgtctttcggcctgtgggagccctcattcctctgcaatcacggtttgggagtggttctatatcctgatacaagagaaatgcttttgtgaaaggcagmtttggaggtatgttgagcagagaagctggaaactgatctccttaaaacattgatttcatcatgtctgtgtttaagttgtggctgcagtttgctattttcggagacaaggccaatgtcagcctgtattcaaagctctctgtagtaaagcaatttatacttactaggtgaaccacactgcaaaggcccttctacctcacatttaaaattttatctatgtgaattttgatgaagattaacagtaaaggaaggcttgaagccaaagagatgagaagattccaccaaaaaaaaaaaaaaaaaaaaaagcaacatgcagcataaacatacttaaaaagaagagaggttttctgtctggagcccacactgctgtgattgtatgtttaggagaacagggtgattttcattcatcctgtagctgttttccatgctccaattctagtaattcataatacacctattaagcacctactgtgtgcatagaactgggctcagtggtacaagagaatctgttttcagcctcattggctattttaagccatgcattttaaatgaatctttatttaaaacaatttcaaacacaggaagattgagagactaatacaatgatcctttatgtagtcatcacccagctttaacaattagcaagcattcatcatgtttgcatcacttattcttttctgttgtagttattgttgctaaatatttttaagcaaatcccacatttgatgtgacttcccaacacatttgtgcatatctctaaaaaatattagcattttctcccataactacagtgccatgatcacacccaagaaaattgagaatatttccctgtaccctccaataaccagtccatattcaaattttcctacttattaaaaaaatgcctttttaaaaattagttcgttcaaatcaggaactaaacaaggcctaacattacattacattaacatagccattaccataactgtaaacattacattaatccaatccaaattttcttttatatataatatacttttatataaaaatatttttattatatttatagaataaacacacacaaacacacatatatttgacatgttgaagaaatttggtcagttgtcctgcagtccctgcactccaaaattctaaatttttctgtttacttctttgtggcatcatttatcttaatcctttatccctccattttcttttctcatttttttttcttttctgagatagagtcttgctctgttgcccaggctggagtgcaatggcgtgatctcagctcactgcagcctccacctcccaggctcaagtgattctcatgtctcagyctcccaagtagctgggattacaggcatgagccaccatgcccagctaatttttatatttttagtagagacagggtttcaccatgttggctaggctgctcttgaactcctggcccaagtgatcagcctggcttggcctcccaaagttctgggattatagacatgagtcactactcctggaccctccattttcaataaacttgaaagtttatgttcaatttttcttttggcaagcatgcagtacttcaaaagyggtgctatgtgctgcacattgtatcacatcaggaggcacacaatgttgttcataccactctctaagcatcctccatcttcccctacgaagtttaagagaaccttggggaaatcatttaaccttgcagakcctcagctttctcatagagacaatggggataatagtagtacacccttgcaaagtttagtgtaaagattacactatgtaatctttgtaaagaccataacatggtgcatagtacactgaaaaatataagagaccttaacttattatgaataaggcatgcaaagtagttagtacagtacactggtctaggagagtgttaataatgttagctattattgcctttataaattattttggctgaacaggccaggtaaatttcattgagtagacagtatttgaaggatgaaatgaaaaggcatagaccgcaacacactaagcctcagagaaacctctctgataagtttctttgtaggactagattataaacttcaagatggcaggaatgtattaattatttatccataatatgtagttcaatgcatggccctcaataatatatgagtaaaaaatcctacacaaactcaactttagactggctggtgtcttattgtgaagtcccctgcccccatccctatgatacccacataacatccccttattcccagctctggacacttgcctctgccatttccactgcttagaagacctaggcccagccaggcacagtggctcatgcctgtagtcccagcactttgggaggccaaggagggcagatcacctgatgtcaggagttcaagagcaccctggccaacgtggtgaaaccccatctctactaaaaatacgaaaattagccaggcgtagttgcgggcgcctgtaatcccagctacttgggaggcgaggcaggagaatcacttgaacccgggaggcagaggttgcagtgagccaagattgtgccattgcactccagcctgggcagcaagagtgaaactgtctcaaaaaaaaaaagaaaaaaaaaaaaaaaagacctaagccctctgattctaccaatgtaagttggaccagttcttccatgtctttctcttacctgtgtcctttgggaggacttttctgagactgttccaccctatatcccactttttcttttctcaatacctacatcatactctttgttcacaaagtttgatgcttatactttacagatttgtaggttgtcttgctttctaataactccctacacttccatcttatttcctctaaataaattgtaaactctttaatgggtgatgtgttagtcagtttttgctttgttacaaagagatatctgaagctgtgtgctttatgaaggaaagaggtttaattggctcacggttctgcagactgtacatgaagcatggtgccrgtttctgcttctggaaagggcttcaggaagcttacagtcatgatgagggggaaggggagccaacatgtcacatggtgagagggagtaagagagaggagggggaggttccacacccttttaagtaaccagatcttgtgtaaactaacagaacgagaactcactcatcaccaaggggatgacactaagccattcatgaaggatccactcccctcatccaatacctttcactaggccccacctctaacactggggattacatttcaatgtgaggtttagaggagacaaacatcccaaccatatcagctgagttggtgttttctgcctttccatcttctattctcctcttacccaatactcattcccaaccgaaacacctggcacaggagtagacacagtagaacttcatataagtactacctgctaatttagcatctccttattacacctttttcaatgtacttgggaactcaaggacatggtcatcaatacactgcctggatgagagtggcatatccctactaccactgcattatgattgtctgcttatgtgcctgtgtccctatcaaactgatagagtcctggaaacagagattatggatttttacttctgttgccctaggaacttgcacagggattggcacatmacagataatcaatcaatgatgaatttaagaaattgtgggccaaccaatttgatgaaattcacttttgcctaaaaaaaaaatttgactgactatttagactagttcagtcaacaaagtaagatgtttcaaccatttacacatatgggcccagccctcatgagaatatgaaacatatttttaggagtcagataaaattagaactaaaattgaaatggaagaaaaatattaaagacggccattgactactaatggctttattgttctactcaggagcatcatggagctttcaaggttttaaacttaaagaaaaactcttaacagtagaatttaaagcaggagagagagctagcttgaggcctcttggtactgcttaattcacactcaagagatatctctcttctctcttctggaagctatactattgttcctccttccccacccagcgaccaaaaaacaaagcagcttcaagtcctggaaagtacagaagaaaaatcttctctgctcatgttgtaggtgtgtttcttccactacttggggtggaattcatcaaccaggttggggcatgtccaggctgtgttccacacatcttctcctgaatcctcagcccaagcagaaatcagacacctccatgctgtcctttaagagaaaagctggcatttcagtgttttaaacattggcatattctggttcaatggcccagctagatgtaaggaaggtgtgttacccaatttttttcatgctttgaaccaaaaagatgttcttccttatgttttactccacctgaccattgcctggcttgaagaaaaaaagagaacacttttcaggagctgagaaaattggcattgatttaacataatttagttaaaagttagttctcccctgccatgagccacagctgattatttagagaattattaccattcattgttcattgagttttatctttctaaattttcactgattagcatgatttgttactaggaaaaatattatgattttaattgcattttggcatcttaaaagaatgtttcacactgcttaacatctgcagtcaacagatgtttaaacacaactccctcaatgactaaaatttggcaaaatgtataatagttggaacagcttaaaattctaaatatacttctaggaacatgatacaggcagatgaaatactacttgtgtgtgttttatattaaatattaaaatattacatataccatccctctcggagatgacaggtttcagggaaaaaaacaacagccaagagatgtttcaaccctaccataccagakatattctatctataagcagggctatgtcttatggtcactgtcaactgcagtggggacccttttttaagtgctatttattgtggttaactctagaggctggcagaggcaaagctgtgagacagacacgtttgtcccttttgcttccccttttggcatccttcttttctctgactcagatcctcaggagctttcatgaagatatattctaagattaatatgtcagacttgagtttaagttaattggtcagccttcagttaattggggcaaagattcattcatatcagagtgtgtgtgtgtgcgtgtgtgtgtgtgtgtgtgtgtgtgcacgtgtgtgagtgtggtgtctgtctgctgtctgtttctcaaggcaggggttcagagaggagagaggatgacccaattagcatttcatcaactatttgaccaaccatttaagccgttatgtttagcatggcttaaagaaatccagagaaaaatcatgaatttcatttcgatcacaacttttaacagtctgctcctatgggcactttatgacagttgatgactcggggcttagcagagagttgcttcctgtccccttgttgaactcatccccaatgaaaacgccatttctacatcaagaatcctagaggctgtagcagcaagaatgagaaatccacattttctgtccctggatggttaagttcacagtcacaggaactgtgcagatataaagactttcaatcaatgtatctctgcctaagcttatgaggtcattctgttctctgttactgatttaagtcagtaaattttgagtacagccgattacttaatatattatgggtgggtctactccaatcaattgaaggccttaggagcaaagactaaggtttcctgaagaaaaaagaaattggcctcaaaactgcagcatagaaaccctactagaatttccagcctggcctgacctgcagattgtggactcaacactgactgaaacatcaactcatctgaattttcagaccaccagcttgccctacagattttggactggctggyccccacaactgaataagccaattccctaaaatctcctctctctctcctctccctctcgactagtacacatgtgtatatgtaacatctggattcagagaaagtgactatagccaggaggaagtagaatcatggagagataaataggactaggctatgagaagtgcaatgcaggtggtccatcaggaaggggaagcagcttgtacaaagaccaggagatgggggtctgtgcttttgagggggagaatggagggagagagcctgagagtctgagtctggagactgtgttagagagcagtgagtactaagactggatggattggtaggacccaagaactgatgtgtagaaaagagcctcttcttttttttccacgcagggggcttagaattattgcattttttaaacactgagtcatcttttctgtagtactctacaacagagtccacttcagactgtgcagctgtccccagctatcaccatatcctctgtctttcatatctatcctaaaaggcatttgctcttcctaaaagggatgccctccaaagaaattttaaaagaatcttatcaaggggccctggagaagaaagggatgtgagggtcaagtcacaactttgaggggaaatagaaagagggctcctttctgagaaagaagaatttcaaagagtccaagagaaccaaaaattcaggacccaggagggtaagcattcctgtttttgcaagcttcacagaccatttgagtgagtgggtttttcaggtgacatttaaatgaacaaataatatccatgtctcagggtcagaaatggtactttgcaactgattctgtccctcttgagaggcttctgcaagactgagagggtgggatgacttaatgaacattaaaaacaatgttattaggctggatatggtggcacatgcctgtaattctagcactttgggaggctgaggtgggcaggcccaggagttcaagaccagtctgggcaacatggtgagaccctgtatctaataaaaatacaaaaatttagccaggcatggtggcacacacctggagtcccagctactcaggagactgaggtgggaagatcacctgagctcaggaagtcgaggctgcagtgagccaagattgcactactgcactctagcctacatggataggagtgagacctgtttgaaaaacaaaaaacaatcaaaaacaaaaaaaaacaacccacacaatgttatttttaaaatactgaggggagagaagttggggaaaaaaagggaaaacctaaaactctccataatcctaccatcagaaaattacactaatgtgataagtgactttctcccctctgaatctccaattccattacttgtagtaaatatgaatcttattccacaaactcagacatgcaaaaaaaaaataccactttactttttacataaaattaattctaagcctatagcaactctctttatcatattaggtaattaggaatttggtctcagatattattgtcaccctcagggatggacaagggtctcagggttttgtgtagcaccaaaccctaataagatctcttcagccattgaacttactctacaatattaactgctgaggtgtccatggtctcagactacaaggtgtcttccggttctggcttctctgctgccgcttttcaaatcaggagaatctttggtgaggctttggaattcccagctccctagcccagcctccctagggtcttcctcctcatcagagtgctccagaattcagactaggattccattcacactccaaacaccttcccttctctctccagttcctccaggacaccaagcataatctcctcaatgggtttaggttttacaaaattcagtaccagaatcggaagtgtcttgcagacaactttggcttctggccctatgacaaacatctcccttgtggcaggaggccacaaaaagccctgaccatctgcttacaagggaggaggggaagaaacactgggaggacaaacacaagttaatattccaaaaattataccactacaaactgttgaccgttttctaagtctctttccagaatrttcttgtgcttataaagcaaaaatctctctacacataagcttttcttttttaagcaaaaaggggattgtactatatatatgcagttacagcttgctttttttttcacatagtatagtgtggacactatactatgtgaaataataaggacacttcctagagtgtccttattttatttgtgacattgggtactgctccactgatgggtactcaggtggtttctattgttttgctctttcacacagtgctgtattgtgcacgtacttgtacgtctctgtgttctttttctatcatcactttctagaagtgaactgactaggttgaccaagtggctagtgaatcaatacagaagtttatttgcaaacaggagcatagttatctgtttctctgcactgcgagccctggccaactctggtgggttggttagcatatgctggttttagagaaagagcctgaaaatgcatttctcaagatcgtagtcttcatgcatttgataaagttggtggagttggtgcaaagattattctaaaagtctctctaattagccttggtgaataggactctcattattagtgtataggaaacaataatctgggctttacaactaactagctaagagaccctggacaaaccatgtccacctcgaggtctcaggtagatcatgtaaaatggagatgggacacagataatctcctaaagacttcctgaagtgatatcatacatattgttatacatactctgcattcctaaacatacactgtcctgggcaggtaacaagtatctgtctgtggattgatgacagactttgggctatattgactttgctatgcctcttcagtttcctactttatatttttggaacggtataatacatttgtgttagcttgtgttcctccaaaagctgacccagggacaagggttcaagtttaagaggtttatatttggaaagtgcaggaaagatcaggaagggaggtggctgatataaggtatgttatcaagccagctgtcaccgggcttaatcccaaagggcaatgctgagaaacagcgttaaaacccatgcttcagagttatctgcctttagatcaagggtgctcgggtgtttatacatgaaatcccatcagcacaccgtaatgtgctaatgtgctaattaccagcacatctagcctgccatgcaaaggctgaacagcctgccttggtttaaggaaaagccttcaggtcaagagtgcaaaaagagttttctggaacacagctaagggatgcgggcatggccacagtgtctactgtgtaactctcacagttcccctcacaccagtgttgctttactcttttgtgtctttgctcatgttgtattcactcctttccctttctgatcaatttcaaatcctcagacttcctatgtttgtgtcctgcctctgctacttcctagctgagtgactttgggcatgttacttaagctctctgtgcctcagtttcctcatctggaaataggcatagtgataattctcatctcattaaacagttgttaggatcaaatggtaatggtggaaagcacttatggcagtgcctaccacttaataagtcttcagtaaatgtcatcatatttattatccttcaatagctacttcaagtggtagtgccttgaagaaagcatccctgagacttcaggcagggttaagggctcaggccccttcttaacacattatgatgacactttccatatgcaagtttatcttctcctatggacagtgagtccaggaaggcgtcactgtggcttactcaggtctgcgtcctctgcaattcttgcaggacctaacctgccattctgttaatgagtaatagacagagactttgctttcattcactcataaataaacctttgctttaagattgaccctgagtaaaacgtaaatttcatcaaactgtagtaacaatacactttctttatcctaacacatacattgccaacactgctcccttaaaamacacacacacacacacacacacacacacacacacgcacacacaaaaccactgcttagtatttctgaaatcaggttgtcagtctaaatactgagatttgtttttcattttatctgcctttctttcacaaagtaggctattattaaataaatgctagactctagtattaaaattgacaaatgtatggtttagacctcaaagtgaaggataacttggaaatagttctcggttgctcttcaagaagaaaacaggttacctggggtgcctcgccatgtggtggatctcacactcccgtcattctgctaacacaatcccaggagctgattctgttgcgtactcgcagggtatnnnnnnnnnnnnnnnnnnnnnnnnnnnnnnnnnnnnnnnnnnnnnnnnnnnnnnnnnnnnnnnnnnnnnnnnnnnnnnnnnnnnnnnnnnnnnnnnnnnnnnnnnnnnnnnnnnnnnnnnnnnnnnnnnnnnnnnnnnnnnnnnnnnnnnnnnnnnnnnnnnnnnnnnnnnnnnnnnnnnnnnnnnnnnnnnnnnnnnnnnnnnnnnnnnnnnnnnnnnnnnnnnnnnnnnnnnnnnnnnnnnnnnnnnnnnnnnnnnnnnnnnnnnnnnnnnnnnnnnnnnnnnnnnnnnnnnnnnnnnnnnnnnnnnnnnnnnnnnnnnnnnnnnnnnnnnnnnnnnnnnnnnnnnnnnnnnnnnnnnnnnnnnnnnnnnnnnnnnnnnnnnnnnnnnnnnnnnnnnnnnnnnnnnnnnnnnnnnnnnnnnnnnnnnnnnnnnnnnnnnnnnnnnnnnnnnnnnnnnnnnnnnnnnnnnnnnnnnnnnnnnnnnnnnnnnnnnnnnnnnnnnnnnnnnnnnnnnnnnnnnnnnnnnnnnnnnnnnnnnnnnnnnnnnnnnnnnnnnnnnnnnnnnnnnnnnnnnnnnnnnnnnnnnnnnnnnnnnnnnnnnnnnnnnnnnnnnnnnnnnnnnnnnnnnnnnnnnnnnnnnnnnnnnnnnnnnnnnnnnnnnnnnnnnnnnnnnnnataaaaaagaaaaacaagagcaaatccagatttgaatccagtctacttgagttaacagctggatgaatttgggcaaacaatttggacaagcgagttctctgcatttaacttttcatcatgaaatacacataatattcctgggctgttgtgaggaattattaagataagaagataatgacagcaatggtctactgaatacttaatatttgcaggcacagtaccaagggttttcccatacttggtcttattttctaaaattagcctacaaggtaagtaccatagattcttattttatagctgcaaattgagtttcagtgtgattaagtaacttgtgccatgtctcgctaaagaatatatataaatcatcacacatagaatacagtaggtgtttaacacatgtgagttttctcctttcactctgcttgcaatgctagccatagaagattttaaaattgtctgatttttgaagaaaaaacccttggaagagcactccctctctgctggactagagtttaactatcatcatgttctttgtgaatttgatagccttttaatccaccgargccatgaccttcttgtaatgtgttgacttcctctaccgccagtgtttctctcgagggacctccatctgcatttgtttgtggctgtccctctcagtgacatttcctcctttacctgattctcaagataatttgtttttcatttgagcttcagcagcctgagagatgatgtcaaaatcaatcaatcctcctacaagctttgtaaatacaatcccttggctttgcagaaagggtatctctattgcccagttcttcctggagcagtggggccacccaaaggagaatcaggaggttagaacacatcctagaacatgaaatctcatgcatgaggggatgtcagcctcatagcatctgagtcctagtgtgggaagatgggagctgaggaggtgtcatcccctgggacttctgggagctgcaggtggaaccttagagcccttggtccaatgtggataataaggagccctgttagagagccatagaaaccatccctgagtcatgtcttcctttctccttcaatatgaccttctctgggagtcttcttgyggggaggcagcaatgccttggaaagtttgagctggtttctgatgagaggttgaggcagggatctcatggttatctccttcctcaaaatggagccagaagatgcaagccagctgtcatggactgattgaagcctgttatggatttgccttttaatgtgtttgttaaaaatttgaatcaggtgcaacatttaaaatgggagacttcacatgaaactccagatttctggcttcccttgaaaaatcacacctgataatcctgggctagcatttctatgggcaagagtaggctggatctagggaagcctcttcaggtggggcaggtgcagtcctgtgtgccccagtccccacctgaccccatgctcccttaggttacctgtcttgttccctgggcatttgagttttgaaagaaggaacgggaaggaaaataacaatagagttacaagacttacaacctaacacagttaataacaggaaaagtaaaaggcgcttcaggtaactatttcctttacatatcacgcaaaacatccagttttgcagaaagataaattggagaccagagaagtgaattaagctgcttaaagtgttggtaaatggtacaaccaaaatttgaggtttggtctctttgactccaagtcatgtgaccacaaaatcccactttgctacagtggcctcccccagaatctgcttccctttgattaacaggatgccctcacgcttctgcatatccagggcacctgatgccctgtcagatatcaaagagttaatgttataccagtcatcattcttgataccaagaaaattcaagaggagtcttgtttttctctgatgctggctggcatcctctctgctccctgagtctctaatgagaatgtgtacagtggtattcaaatagggtaggagaaacttctttgtgtatcactgaggtcaccatttgcattaagggaaaagaggttcgatgactctcagttcggcaattcagcagccatctgtacttcacatcactggcctgaattttcagcctcattaaattctttcaggtcgtctggtcccaatctttgtggttacccaagtgtatatttatgtctcwtgagttattgccatttctaacctgtgcttaactgctcccacctcccactacccttaattgatcttgcagtacttctggtattttttttaaagtcttccctttcccaattatttccaagagcccacaggggttactgcatgtgtatcagacactgtgtcctctgggtttctacatggcttctaccttgttctgtcaaagctccctgtgatctatttttgctgggtaccaccatctcccactggacaccgccgccaagaggtgtttaaggtcatttggggttgcatgcactggtgggtagaatgaatgtttctttctcatggtctgtgtttcacatggctaccaaactgctggtagtgccatgtcttagggagcttagcttggttggtttttgtcacaacatccctctgcctccatacatacctttgcattgctccacaggattcagaggagatgccgtggggaactgggctgagagatataatactgagctagggtttgctccttccctttgatgactaaggctttatttttgcaccaagactatctgcctagtaccctcttcccttaggctgagttttctcccaggtggctctttactcccctgtgcaacccttgctatcttgcctgtattgggcatgactgggtctaagtgatggatatgtcttggtggctcgcagtcaaattggaacccctgaaatctgtttttttgttttctgtttttttgttttgttttttttttgttttgacaaggtctcactctctcacctactccagagtgaagtggcacactcttggctcactgcagcctcaatctcctgggcccaagtgatcctcccaccttagcttcctgagtagctggcactacagacacatgccaccatgtgtggctcattttgtgtatattttgtagaggtggggttttgccatgttgcccaggctggtcttgaactctgggctcaagcgatccacctgccttggcctcagaaagtgctgagattacagacaggggccaccatacctggccggaacccctgaaatcttaggtggcagtattttatataattttgtgtccttaaagcccaaatcacctgaaatagttttatcatacagcctcaacccagacacagattggcttaagtgttcctctaagtgcttgggtatgcagcttcattgtcttctttcctaaagaaacaagcctgtaactcaaagattttgaaatttggattcttgcttgatgtaagctgagtagcacggttataaggctacagacaccactgcaataggtgggactccttgagccagcttaagccacaaggaggaaatggaagtggaacccaaggaaaggattatggctaggtcttgggaagaagggattgaggcagtgaacttcctcttgttcctgccttcctctgtatctttatgcagactgtctacctttgactcccagttcacaaggtggcatatgaccatcccattcttttcaggtttacatataatagttccagaaatatgcaagacttttctagtcccaatttaaaattcccaagaggaagaacctgattgtttctgtttaggtcagtgttcatctctgattcaatcaactgtgttccattcaccaagtctgtgtctaaggatcaaagatagaccagagaggttacagtgagctgacagccacatacacatccattctacttgaccatttttttttttcccattttctcacatttacttgtacctttctggaaasgcactgagtagaggggcaatactcaagataagcaatgaaagttaaccataatgttttctttcttttcttttyttttttctgtgacagggtctcactctgtcacccaggctggagtgcagtagtgtgatctcagctcactgcaacctctgcttcctgggttcaagtgattcttatgcctcagcctcctgagcatctgggattacaggcgcacacgaccacaccagctaatttctgtatttttaatagaaacggggttttgccatgttggccaggctggtctcgaactgttagcctcaagtgatccccccacatcagcttcccaaagtgctgggattacaagcatgagccactgcactcaaccctaacaaagaatcctagtagctaatgtttactaggcatttcgtatgtaacagatactgtattgagtgcatcacaggaattatctcacctattacatacaagaagatcttatcattgattattattattttcatgtgcgtccctgtgaagagaccaccaaacaggctttgtgtgagcaataaagcttttaatcacctgggtgcaggtgggctgagtccgaaaagagagtcagcaaagggagataggggtggggccatttataggatttgggtaggtaagggaaaattacagtcaaaggggggttgttctctggcgggcaggagtggggctcgcaatgtgctcagtgggggtgctttttgagccaggatgagccaggaaaaggactttcacaaggtaatgtcatcacttaaggcaaggaccggccatttacacttcttttgtggtggaatgtcatcagttaaggtggggcagggcatattcacttcttttgtgattcttcagttacttcaggccatctgggcgtatatgtgcaagtcacaggggatgtgatggctgggcttgggctcagaggcctgacattcctgccttcttctattaataagaaaaataaaacaaaatagtattgaagtgttggggcggcaaaaatttttggggggtggtttggagagagaatgggtgatgtttctcagggctacttcaagcaggattaggggcagcgtgggaacctagagtgggagagattaagctgaagggaggtcttgtggtaaggggtgatattgtggggatgttagaagaaacatttgttgtatagaatgattggtgatggcctagatacggttttggatgaattgagaaactaaatggaataacagaaggagaaaaacaggtataaaaggtctragaattgggacgactcaggatatctgattagagagtgcctaaggagatacagcatagtcctgccagcaaagattatttatttacttcaagagttaacagtggcagtttggggatagcaccaggagatatcagctgtgatggcttggaaaaacagtgtaaacyggcagtgtaaacaagagcagggtatgagtagttgagaacggtgaataggagtatgactagacagaagatagtagggatgacaagatttttggggcacagtctaagttggtctggtgtctggaatgagacyggggcctaataaaaaggagcatctatacaggagcttaaatgggctgtaccctgtagcattccgaggacaggcctgaattctgagaagggaaagtggtaaaagtattgtccagtcctttttaagttggtggctgagcttggtgaggtgtgtttttaaaagacctttagtccattctacttttcttgaagacggaggaccgtaagggatataaaggtttcactgaatactaagagcctgaaaaactgcttggctgattttactaataaaggctcgtctgttatcagactgtatagaggtgggaaggctaaactgaggaattatgtctgacagaacggaagaaatgactgcagtggccttctcagaccctgtaggaaaggcctctacctatccagtgaaagaatctacctagactaagaggtattttagttatctgactcaggccatgttgagtaaagctaatttgccagtcctgggtggggcaaatcctcgagcttgatgtgtagggaagggagggggcctgaataatccctgaggagtagtagaatagcagatggaacactgagaagttatttcctcgaggatagatttccacgatggaaaggaaatgagaggttctaagaggcgggctagtggcttgtactatagtataacctgcctttgctggtgtgtggcgattaggcctggtggaactgccgtcaataaatcaagcgtgatcagggtgaggaacaggaaagaaggaaatttggggaaatggggtgaatgtcaggtggatcagagagatagtcatgggggtcaggtgtggtatcaggaataatgtgggaggccggattgaagtctgggccgggaacaacggtaattgtgggagactcaacaaagagtgagtacagctgaaggagccggggagcagaaagtatatgcgtcaggtatggggaagaaaatagattttggaagttatgagaactgtagagagtgagttgagcatagcttgtgattttgagggcctctaaaagtattaaagcagcggcagccgctgcacrcagacatgagggctaggctaaaacagtaaggtcaagttgtttggacagaaaggctacagggtgtggtcctggctcttgtgtaagaattctgaccatgctagccatgcctaggaaggaaaggagttgttgttttgtagaagstgcttgggtttgagagatcagtcggacacgattggcagggagagcacgtgtgtttttatgagaattatgccgagataggtaacagatgaggaagaaatttgggcttgattgaagtaatgggggctgtctgtgaagctttgcagcagtacagcctaggtaatttgctgagcttgatgggtgtcagggtcagtccaagtgaaagcgaagagaggctgggattaagggtgcaaaggaatagtaaagaaagcatgtttgagatctaggacagaataatgggttrtagagacaggtattgaggataggagagtatatgggtttggcatcacagggtggataggcaaaacaatttggttgataaggcrcagatcctgaactaacttgtaaggcttgtctggttttaggacaggtaaaatgggggaattgtaaggagagtttataggctttaaaaggccatgctatagcaggcgagtgataacaggctttaatctttttaaagcgtgctgccggatgggatattggcgttgagtggggtaagggtgattaggttttaatgagatggtaaggggtgcatgatcggtcgccaaggagggagtagaggtatcttatacttgtgggttaaggtggggggatacaagaggaggacgcaaaggaggctttggattgggaagaagggtggcaatgagatatagctgtagtccagggatagtcagggaagcagataatttagttaaagtgtctcagyctaataagggaactgggcaggtggggataactaaaaaggagtgcttaaaagagtattttctaagttggcaccagagttggggagttttaagaggtttagaggcctggccgtcaatacccacaacagttatggaggcaagggaaacaggcccttgaaaagaaggtaatgtggagtgggtagcctccgtattgattaagaaggggacaggcttgccttccactgtgagagttacccgaagctctgcgtctgtgatggtctagggggcttccgaggccatcrggcagtgtcagtcttcagctgcgaagccgagaagatctgggaaggagtcagtcagagagccttgggccagagttccagggcctctgggagtggctgccaggtgagttgaacagtcygattttcagtggggtcccacacagatgggacacggcttaggaggaatcctgggctgcaggcattccttggcctggtggtcagatttctggcacttgtggcaagctcctgggggaggaggttctggaggaacgcctggccgctgagtttcaggcatttggaagttcttgtgtgctggagatgtggctggggtttgtctcacagtggaggcaaggaattgcaacttttttctattattgtacaccttgaaggtgaggttaattaaatcctgttgtggggtttgagggccggaatttaatttttggagttttatttaatgtcaggagcagattgacattattttgagaataagacggccttttgaccttttagggtctagggctgtaaagtgtctcagggttgctgccaaacaagtcatgaactgagctggattattatatttgatgaaaaagagcctaaacgctatctgatttgggataaagaaaaaggagcattaaccttgactatgcctttagctccagccacctttttaagagtaaattgccgggcaggagggggaaggctactcacggaacgaaactgtaagctggaccaggtgtgaggagaggaggtgataaaaagattatagggtggaggagcagaggctgaggaagaattgggacctagctcggcctggcgaggagcagcctggggaggaagggagaggtcagatgggtctgtagaaaaggaagattagaaagactcagcgacgcttggtgttgggactgaggggacaggcgggagggaaagaaggaagatttgggaygagttgcactgggcacagagactgggaagggactgatgtgtaaaagaatgcctggatgtcaggcacctcagaccatttgcctattttatgacaagaattatttagatcttgyaggatggaaaaagtcaaagtgccattttctggctatttggaactgctgttgagtttgtattggggtcaggcggcattgcagaagaaaataaggcatttaggttttatgtcaggtgtgagttgaagaggttttaagtttttgagaacacaggccaagggagtagaaggaggaatggagggtggaaggttgcctatagtgaaggaagcaagcctagagaagagagtagagaaacagagggaagaggtttgggggttcttaccttccagaaaagtgggaaaaggggttggggcacagagataaggggttggggcacggaaataagggatggggcacagaaataagggatggggcatggaaataagggatgaggcgtggaaataaggggtaggggcacagaaataaggggtyggggcacagaaataagggattggggtgcagagatacgaggttggggtacttgcccctcctctagaaaagtgggacttgccactaagagtgaaggagaaggggttgaagggtacttgcccctcccccagaaaagcgggacttgccgctaagggtgaaggagaaggggttgaggggtacttgcccctcccccagaaaagcagagaaggggtagagacaaggagagaaggggttggggtacttgcccctttcccagaaaagcgggacctgccgctaagggtgaaggaccaaggcaggcatccctgcatggtctgacacctttgaaacgtgggtgaataatcaggcgtccctgcaatgattaaacaccaagggaaggctgccttcccagtccgtgaccggtgctggagttttggatccacagataaaacgtgtctcctttgtctctcccagaaaatgaaaggaattgaaattaagagaagggagagattgaagagtggaaaggagaaagtggttgagggacagtgagagaggttggagaagagagtaagaagaggccgcttacctgatttaaaattggtgagatgttcgttgggctggtcggtctgaggacctgaggtmgyaggtggatctttctcacggagcaaagaacaggaggacaggggattgatctcccaagggaggacccccgatccgagtcacggcaccaaatttcatgtgtgtccgtgtgaagagaccaccaaacaggctttgtgtgagcaataaagcttttaatcacctgggtgcaggtgggctgagtcygaaaagagagtcagcaaagggagataggggtggggcmatttataggatttgggtaggtaagggaaaattacagtcaaaggggggttgttctctggcaggcaggagtgggggtcgcaaggtgctcagtgggggtgctttttgagccaggatgagccaggaaaaggactttcacaaggtaatgtcatcacttaaggcaaggactggccatttacacttcttttgtggtggaatgtcatcagttaaggtggggcagggcatattcacttcttttgtgattcttcagttacttcaggccatctgggcgtatatgtgcaagtcacaggggatgtgatggcttggcttgggctcagaggcctggcaattattagcctcatttcacatgaggacaccagggttagggggcgggctggaccaagatctatgtggagagcagagttcaacccaaaatgcatgctttttatcactatatttagagatagacacacctggtttcaatccttgaggttgccactagctatgtgatttttgaataatcattctgaatcttagtttccacatctgtaaatgaagataaaaatacctttccaattaaaaatgattttaaactaggcaacttaggcaaattattcttttccttcatgtacctgggctttcccgcctcatctaagcacacttkttctttctaatgctccctgactgtaaccaaaacctccagagcccttcatccatcctctgattgccatgaattgccaacatcagataaatagtttaaaaagtggcaagaaagtaggatttcragtcagaagacttggatttgaatcttgcttcagctttgtattaattgttatcattctgaatcatagtttccccatctgaaaaataagatgtggagttgttattattggtggtggtctgttctaagcattaaatgaagaaatgcatgtcaaaccttctgaaaactcagacaccaaacacttggaaaggagtctgttacagtctcaccaatgcaccacaatgtagcagtctctccttgtgaggtatcacccaagaccaagagaattaaggagtatggacccaaagggtgaggtcggagtgaaagtttaataagtgaatgaagaaagctctctgttgcagaarggggacctggaagaggattgctgtttttcacagttgaatgcaaaggcttttataggaaactgatgagggctgggcattttgtttgcataaggcatgtttttctggtagctccaccccatcctcctaaggtgcatgtgggcccttagcttgagttacccatattgctttgttgcccttattatgcatgtgtcaggggatgaaattttccactgctggcatgtctgggcaagtcacctgtgtagcctttcttatctgtgcagctgtgggcatgtcttaggcaagtmccccagtgyaagttcccttatctgtgcctgcaggctgttcttttgtttctaaaaattcaatccagggcccatcctaactgcctgcctgaccggtttctttctttttcctctctcaattcttattaaggcagaaaaattctagaatgactttttgtcctatagccttgttcccagaatgctttggaaatgtaacagccaatttatcaagacaggggaattgcaatagagaaagagtacttaatgcagagcaaagagaaaaaagataaagttcttttaaatatatatagcttggatattcatgtttaattaagcaaattttaaccatagagctcttttgtttaaagaaaatctcttttaaatctcttattaccagactctagtcaggacagccaatatttctggcctttgaattctaccccaggtaaccgcccacatgaaattagtaagttttaattaaggttataacttaaccatggatacaaaaggtgttttaaagagatggtaagcagctttttttttttaaaaacaagatttagaatatccccaaaggtagtacagtgaaaggaaaattcaagacaggaaatcagaagctatctatggggtgaaaaaaaaaaaacctcaataaatggcaaagttccacaaataacaaaccagaaaggaatcattctgtaagccaagaattgaacctgggccaccattgtcaagagataaaaaccttagctactgagctacacagcattgagcagtttctactgctctcccccgaagaagtctacagcagctgatctgaagcttgcaaaggcttttaagtgctcaagataattcttagggctgtgatatgaacccccaaattcctgtcctctggatggtggagaccaggatgaagtacctctacatggtcacaaagttaagctcttaaagacacaaaacaagacagaaatttcatctggtattggtttcagggacccacaacaaagtttataactgaccagcctgccgggttggcttgaaaagcaggattacaggggtcctaaactcatgttctatcctgtgacacccttctctccattacggaaggacaaattcttagtacaaagtgcaccagatttgccacagcctaagactagtctcacaaatccttttttactattcatcaaacctttgcagagacacacagtgacatttattgcttaccaytgcccccctccaacacacacacacacacamtcacacagacacacaatgcagagagacagagagaaagagagagagagaggccagacacttttctggtaagaattcttgccctttgtgccagcatatcaggtttctgggtcccctttctctgcagcttctagaagaatggagcagcatttgatggccctgttcaccgtgccatagacgtgaggggaccaagccccattacaaaagaaaatgatccttttctgttttatggaaccataggcaaaagcttctcaatgttgcaagatgctgcctgatgggctacatggggaaccaaattaacattttccattccagtggaagcaaaatacacataacgctacagacattggtcaccttgttcagcacccaacatcgacctggcaagactcgaactttttcccgttggtccctgttgtctttgatctacacaaagtggggaatggtgacctccatctgggaattcaatgggtgatctctgggcaagatgaagagcagtcacaaacccgatccagggctgttaaacttctttcaggactcactgaatgtgaccagatagataaggagagttctctgagttaggcctgctagacttccatcagcaattccttcagagatctcctccacatatacaaatacacacatatagacaagacagacagaaggctttccaaatcaagattcctaaccaagaattccagagtatctcttccaaactatcctcctattctctgtttgagaaatctccctgaaatcttcttgattgaggagaagtctcccgaaccaagactctttttactagttaggcagagccaaccgagaccccccaggagccaaaccaagacagacaccccatgttgtagctacagacacctcacaatggagctacagaactagttgcgaaaaggaaggagacattggcagcacctaggatactcaccaacccagacaccctacaatggggctatagacagacaccctgtgatagggctacagttatgggacgtctccccaggactrtttctctattaaatccatgcccattgggtcgggagtgccctgtcagtagagagagtaccagagtcaactcccagtccaagtgaactaggtggctgcttgggctggcccctggatccattgctggagggggctactgaaccacgggcaggtagccacaagggcaatcctggatgagcctcgaaatttgtaaccacccaatggattcaccttgcccactgcttagacagagctgatttattaagacaggggaattgcaatagagaaagagtaattcagccagagccagctgtgcaggagactggagttttattattactcaaatcagtctccccaaaaactcggggatcagagttttcaaggataatttggtgggtagggggccagtgaatcaggagtgctgattggttggctcagggatgaaataacagggagtcaaagctcttctcttatgctgagtcagttcctgggtggagaccacagaactggttggcaggtccaggtggggccgtccagttggtagaaatacagaaacctgaaaagacatctcaaaaggctgatgttacctttaagagtaactggggaagttgcaaatcttatgacctccggaataatggctggtaatatctagaattccagcccctctcattctaacttggtggctggtggcctttccttcattttataagaacagtttagttttggggaagggctattatttaaactataaactaaattccttcccaaggttagttcagcctacgcccaggaatggacaaggacagtttagaggttggaagcaagatggagttggttatgtctgatatctttcactgtcataatttccttagttatcattttgcaaaagcggtttcgggaaggccattgtttgcacagtattttcatactcttaatttgtagctgcatatgtttgcatgtcttactttttaagtggcaggagttttgagtctagggtgtgtctttcaagtttctttacagaacttagaaataatggatgtttaataaacgctagatgtacagataacattcaagctttctatgcatctgtctttcatgtttttgttgggatgtttttcaacagtctggagacctcttaacaatggagtgaaaggctttgaaaaatctctaaaagcctgtataaatgcaaaagtattttaaatttacaggaggtgctgttactactaatactgtgcaaatttatgagtagttgtggaaataataactctatgagcaaaaatgcttctatttctgttttgttctttgcattgtgcaaatatagcctatataaatcaaatttctacatttctgcatcctgtgtgccttaagacatatgttgagatatcaaaagaagaaaaaaacatataacaacctggaatcacaaaaggctgaagcttaaagatcattatgttcagccctgccattgtacagacgaggagactacgtctaacggacacaaaatgactggcctaaggtcacacagcaaaatagtaatcttttttctgtcattattcgttctctgaaatatgtgggtgtgtttagtattgttgacatttccttggaaaaagaacaatttttaaaatgaaatcttttctttccagggctagagcaatgtatcttaggctcacttaaggaagctgtagagatgagcccaaggagggaaaccagaagagccccccaggctcaccagttgtttgttggctccctacaaacatgtcattcaagtggctaatcttacaacagcacaaattcatctaaccaggtgagtttcttcgagtcacttcaaataattatttcttgagcatctacttcatgccaatggtgtgctagattctataagaaaataaatgtgaattactcacagataaaaataaataacaatcaggctgcgtacagtggctcatgcctgtaatcccagcactttgagaggccgagtggggtgtatcactggaggtcgggagttcaagaccagcttgaccaacatggtgaaaccccatcgctactgaaaatgcaaaaattaagtgggcatggtggcacacacttgcaatcccagctactcaggaggctaaggcatgagaaacgcttgaatccgggaggcagaggttgcaatgagccaagatcgcaccattgcactccagcctgggcaacagagtgagactccatctcaataaatgaataaataaataacaatcaagagaatagaatcaatatagcccagtggacaagaccatggattatggagccagactagctacttactagcagaatgattaattttgagcaagacccttaagctctttgggagtcaggttcttcatgtataaagtgtggcttacttaatagtttctgtgaagttgtgaatttaacaaatatcaacctccttgccaaagctaactaatttgctaatcactgattttgcaaagcgtgttgtggagatgtggctggacaggtttgccatcagagtcgatataccgttgtattaaaaacaagataaaaaagctgccaagttctttcgtgagtggttggttagtctgaaatctttgcaagatgctgatgctcaagctgttgacctactcattgcctactttaacaactgtcagagaaacatgatgtggggtaaggaggtgctttttaaaaatcattcatagacttctgtaaaatgcaagataaagttattttaacagtggaaaaaaaacaaatatcaggtgctttcagggtccaacatataataagtgctatagttaacagttattttacatttattatctccctgggtctcaccctaagcctatgaagtaggtagcattcaccttttatagaggagtaaactgaagttaagaggtcaagtagcctgcttaggtcaccctgcaaccagcaacagagccaaaagtcaagcccaggtctgtctgacagccaggcctggcctcataaacactgttctgtgtgctgtcctcagacacaaaccttgctctccagaaagtcatattctagaagccttattgcagggctgaaaacactaagtgccactagagagatagaaataatgtggatggggatttcacaacagggcctgtgggaaattgtttccagcttagaaaatcagagggagttttaaggaagaaatggaatttgagtcttgaatgatttatttgtgcagaagcaggagtgagaaaggacaaacaaaaaaccagggatgagaggggtgaggtatagtttggaaacaggcaatagatggttcaataaaagtggaccctgggatatrtgcaggagagcagggaaaggtgaggcctgcaaccctccctaggtgaagtcagatcacaaggggcctcaagtaccaagctaaagagtgtgcatctaaaattgaaggtccttaaatagctttttaaaagacaaatggggggcgaaaagaccaaatgggaaaaaggaaaaaataagacctaagactttgagacatggtgattatttgtcagtaagaattggcggaatatgggcttattaacctagttagttctcttctgaaaaagccacataggttttacagaaaaaaaagttgattttgcaaacaacatacttgttcatttgaagagttgaagcattttttctgaaatgtgatataatttttatatttaagttaaaatgcaattataggtatttttccttgattggataaaatagatccagaatttaaattttatttgtgaattgttcccctccttccctccccctctcccttccttccgtccgcttgcatttgtgtttggttcactcctctctcttagacaaaaggtattttctcatttcttaatcccaatttctccttcatgttttgagtgctgttttatgtttcaatttcatatttattgtaatatgaaccctcagccactaggacatccaacatccctagaatggcagagttgaaatgaacagtagagatgatctattctaacattcatcttacagctgagacaatgaaggctcagagaaagaacatgactttttcaaaaacacagagtgagttcaaggcagaagtgggacttggacttgttttctggctcctttctagtgctcatttcagtgcatcatctgagcacatgtgtaggcagggctctgggcctttaccttcttgagaatggtttagggagtctcaatagacttctcatgtactgctgcaggacttagaatctatgaagtatttagagctggagggaaccttaagatcctcaaattctgcatcgtcctggctatggtctaaatggtccctccaaaattcatgtgttgaaaagaattccccgtgcaacagtgttgggaggtggggcctttttgggagatgtttaggtaaacagattaatgccactataaaagggcttgatgagagtttggcccattttcactctcccatcccttcttcgatgtgagaacacagtgtcctcccatctgaaaaatgcagcatcaaggtgccatcttgtaaacagagagcagccctcaccagacagctgaacctgctggtgccatgatcttggacctcccagcctccagaacagtcagaaataaatttccattctttataaattacccagtctcagcaattctgttaaaacaatacaaatgggtgaagaaactccttttgcagaggagaagaccaaagctgaaagaagtgaggggagacctgcttagcttatgtggctagagacgtacagagcaaggtcagggatttcaatctgctgactcgaggcccatgttttcactctgtacatgctcatccttattttcaaagtctccagttcaaaaattcatctctttgcagtcacatatactgaagggaattctgcttcacaatgcctggaggagcttcaagtggaatgtgtccaaaccaggaggaaacaattcccttggttctcctctggatgtcagtgcaggttggtgtgcagtgaaggtaggggtgtggaaagctggccaattccactttacaagttctttattctctcatacccgggaagtaccacagctactgaattcttggtgaaaccagaacctaaaacagtaaaagtggagttgggaacctggggaagcaatactcaaccaagccaaaactaagattgcatatttacatagaatggctgtagccatgttgttcttcacactcacaaagtgaacacacagctcaaggctcagtggccagactatgtggtgggggtgggatgtggcaagatgtgcatgcatgtgaaagaacagtgtaaactctaaaacatctacaacagggaaaagcaaaaagaaatccgtatttctccctctgattatcttggtctctctcttctgtcatggattagacccagagaagaatactagtccaaatctccagcaactgttcatcatttttaacctttcctgcctggtaaaataacctgggagctttgaaaataatattgatgcctgagcttcactcccagagattctgatttacctgatgcaggatggggtctacaattcataatttttttaaaactccccagatgcctaatgtgcaactagggtggagaattactcaattaaactatcaagttgctttccctgactgctgggatcccttccttggctgctgcaaacaatgttgtagccacttagggctaaatacacttataatgtggccttacactgcattcattcaatttaatagacacttgttgactgctttccggtacatggctaggtgaactgcagtgggtacacaggtgaatgaaaatgtccacygctctagaagagtttatacaaataactgcagcttagtaagggagcaattattttacccaagaaaatgctaaaggcttcatgcaattgaacctttaacatatagaaacattttttatattcatagaaaattcatttgttaagagaaacctgcctaatcgaaaatttgctttgataagtctaccatggtatacaaacaagccgtggactagtgcctaggtttgaaaagtgaaagcttctctgcataatagagtgagagcaggtgatcagcactaaatgctgtgtagggaaatggtcaaaaggacacttaatgacttttagagatgggatctcaatctgtcacccaggctggagtgtaatggcatgatcttagctcactgcagcctcaaactcgtgggctcaagtgaccctctcgcttcagcctcctgagtaactgggactacaggcacatgccaccacacccagctatatatatatatttttaatttttttgtagagacagggtctcgctatgttgcccaggctgttctcaaacttcaggtctcaagcaatcattttgcttcagcctgccaacgtgttgagattacaggcctgagcctccatgcccagccataaggccatttttaataagaactgttaaaaataaaatgtcaattatggaatgtaaacttcattttcacatttattaagaagtcttccataaaatacacattgctcattattcagtgagagtgaattgtgtatgaaaaattcgaagaagtgctaaatcccaccttgagatggcagaagaaaaccagagggtatacatggggcaactgcctgatgtgtgggtttgctagattttacaattaaaattgcaggacacccagtgaaatttgaatttaaattaatacaaatcattttttactataaatatgttccatagagtatttgcacacacttatattaaacaattattcatttggtttgatgttttttctggcagccctattatgggttatggttgggtagggattttataatcagagagggagacagggaatggacaaagatgcagaggaggtagagtgtaaggtacatttagggaatagggagaagtagggttggagtgcactgtcaagtgtgttggaagttgtctggacattaaagtaggaaaataaagctacatcctataaggccataatgccaatatcaccaatttgttactctgtcagcaatggatagccctttgatatattaaagggagggaaatcatatgctctattcatccattcatctatccatccatccatccatccatccacattaatgtatctgtatcaatatggcacacttgaaaagcatatgtcctctgaatttatattctagttctgctatatgctcactgagtgatcttctgcaaattactgcctctctcagcctcagttacctgaaaaataggcawaattagatctacatcttacatctctcatcaggtttatcacagtgacatacaattgccaagcaggcaagtccaccttgaatgcctttttgactcgtttgagggttccaatactgtgtgtgccaacttagaccattatttcccagaaacattcctcttagtctatcgatttcattcccttgcaatgcactggcctttacacctgcatagtcaacagtgaktaaagacagcatttctgtctctcctgccacatcggtacatttgtgtataggtaggtgttgctatttgtgtaacgtattacgaagtgttttcatgttcattattgtcattgaaccttcagagagatcattctgctatcatgggaggatgttggaagtgggttgggktagagagattgggggtagagagatgggttggaaggctgctgtgatagcccaggcgagatgcaatgaagacctgaaccagagtagtggaaaggtgagctgaaagtgaaaggaatggatgaaaacaaacggcacagaaataaaaacaaagggaagttctgacaccygcgttttggtctccttgacattgcttccatttcctctagggacatgtcctggataagggtgaaactggatgctccttggcagtttcagatgtcaccacccctaactttccattggataaaagaaggcccaaaatagcctctggtcccataggctagtgattactgggactcagattcctgtcctgaaaacacggggaagaagccaggcatttgcccacttaccctctcaccagctgacccagggcattagcaccctggtgcctgctgacgcagagcatctgccaaattcgattagccccgtggcctggctaagctgggcatgtcctgcactgcttctaaaacaagccctccaggaaggggctgcgagactcggagatgttttttcctactgtcaagcaggaatcactgcttggcagtttgaggtagggatggggaggagataaaaatattagaagatgcagaagataaaaccaaatactaatctaacagtcacttctgaaaacagagaaaacactccaaacagtcaacatggattgtttttttttctctttgcttcaacttagtaaagccctttggagtccagcagaatgagccaagcagtgtgaaatgtgtggaaacatgttgttggctcagagcaggttgcttggaggcgggacaggtgacgacctgcctgtgagaagcccatagagctctcttctcctcaccactgggtcagttgatcctcatctgtagatgagagatcctcatctgtagactcagccctcctgcagccattagtgcctctcctgtttctaatcacagggaatctaaagaaatttaaggascctcgttcaggagctcagtgttagattgagctttctggtgggtccattctgactctgaatgttgattttactatctaaaatcattattcttgtttctatggctagggtcctacttgtattcaatttcctatagaactagcgtcctgtcttgttaattcccagtcattagaatcccacacccaagtttgggaccaggttagggctctgagtcccatgggcagaaatctctgatacctctgactcctgtttacctagaggaagaagaatctggagcagcagttctaccctggctggtcaacaaaaccactggaaagatctttaagaaatacagatgccgggcgcggtggctcacgcctgtaatcccagcactttgggaggccgaggtgggtggatcatgaggtcaggagatcgagaccatcctggctaacaaggtgaaaccccgtctctactaaaaatacaaaaaattagccgggcgcggtggcgggcgcctgtagtcccagctactcgggaggctgaggcaggagaatggcgtgaacccgggaagcggagcttgcagtgagccgagattgcgccactgcagtccgcagtccggcctgggcgacagagcgagactccgtctcaaaaaaaaaaaaaaaaaaaaaagaaatacagatgcctgggccccacccccagagattctgatttacctcgtctgggtatagatatattttttaaattccctatgtgattcaaatgtacaggtcaggattgagagccaccagtctggtggttaaaattcgagaccttgggattatatagatgtggcttcaaatctgactatatcatttattaactgtatgaccttgggcaagttatttaggctactgtgttgtcagttttcttgtctctcaaattacatctatctcatgattattttagatagcatggaaagcatttagcatggcatctggtacaaaatagggatgtaacagtattgcctattgccaaacacttgtccttgtgttcaaccaattgctagggtaatcttaccctttacttgatttacatatgattctttgcatatggatcgtctgtctgaaacccatcgatagaactctttatactcattatagaacattcttcaccctttcgcatctaacttctgctgaactcaagggacacatcagtcctcagcaccttgactttactacctgatctaccccatcaccaatgggatctgttcttaagaaagtgggaaagccaagatagcaaactgagttcatcttttggttcaattcaattcagttggcagtggagcatgaccttgacatgacttgtgaggctgaggtgcagcaaagacttacaagtgatgtcagccatacatggaagaatgggggagagaaggctggcgctggtggccagggctattgcagacccagcaggcctgagtcattatcctttctcttctccaccaatcccaaacacaaaataactgtaaagtattgacctagggaggattgggcactcctgggtcttgcaagtggttccacaacactctgcctatctgcccaatcccagcaattcacaggaagctcatcagattgtccatgaggttaaaggggtgacaactgccccatatccaagtattggaaatagctgacatgaagctctagaaaccctacattcaggtttttcagcacagagtagggttgtatccacttttggaaaggcctccatgcaatgaaagactgtttgcatgttaaccttaaaagaycaatccaggactcttctgaaagctaaaaattctaagcaccactggtggtctccctttttgaaggaagccaaatcccttggacatgtaactagctattccacccccctccccacaaccacggccttttttttttttttccttctgtatgttctcaatgccctttgcacttttaaatttttcagtggtttaagagtggctccagatccaggctgccctgctactcacaagtgttgcagcctttgccaacttaattgaattctctgtgccttagtttttttcatctctaaaatgggagtactaaaactaccacctagtttatggattgttgtgcagtgagaaaatctgcataagatgccttgaacactgcctgcttatagtaagtactagtcactataattgtgcaatgggttaaatgtatgtcaaggacatggggcagaagttgaggtaggattttcctgatgtgccatgtctatttttagaaatgtgactgtggccccttgtttctttcagactatgtgagttcatccatttcaccctggcttcagtcattgccattcagctgggatagacacttaggaataatgggcttcatttggaatgtacagtctagaaaaacaccctttattgtagtatatctcttccatttgcttgagtgtatgtagtggccacagtttaactgccaagcagtattattgctagtgggtaaacaagagttatctctctgagtcttccagaaaagacaaagtgaccctggatgctaatggcacagatgagatgggatctcttccaggagtctgaataygagaaaagagtctctgaagtgtgtactagatgagcccagcttattaccagtcagcagagtgacttccaagagtttgtaaacattttctgaggctttctcatgggtctgtaactttcctaagtgctttatatgtattacctcatttaattgtcacaaaatcccatgaggtaagtgggaatatttttacctgtcctttgcaggtgaggaactgaggcacagagaagttaagtgacttgcctacagtcacacagctcttgtagcagagttgggattcagactccactctttactatattatgtgccccctgagtggtgagatgttggatcccagaggaagcagagctctgaggtcatcaggaaggaaagcagggcatgaagtgggagcagaggtggattgaacaaaaacatagatttctcagagattcaggcacaaaggactcagggccaggaataaaccaaagttggattgctgaaatgaggagtttcaaacactggcatgccagtgaggtttgtctcctaagctagccaaagctccactcagaatgacctctttaccattctgaaatatctgctgtttctctgaggaaatctgctgctgaatgtggtgttgctgtgatttgttatgagatacttttgttctcaaggccatcctctcaggaggaggaactatccagagtactcgggaggtggtggtgaaacagattgggaaccgtacatccttggtgaatttataaagccccaaagaacagagatgcaaacccatttcattcaaagagctctgttaacagtgactctacaggatgctaatccagcagtttcatgcagagtttcctgaccctgcaacttggcaaaacacaaggaatctctccttgccaggcaccatgtaatacagtaagaatgagtgacataaaacaaaggtaaatacattgcctggctttgaaagtaaggttagaccctggtagaaaatttgcatcttgaggaatatatgggcaccttccccaaggtattttctgcctgcttgtcagacagttggtaatatttttatagttgcatatgaagtagaaaccttcctttggtcacatcctccccaaccgccacactaacccaaggtgcctcctgcttttaatcttgtggcaagtaccatgatataaggacaccagctatggagggaggcaggagatgcacagtgaattatctcagaatgcttcccagcctttaagtgcttcagaaacctctttaatctctttttatggcaaataatgaagtaggaagaatgaaattgtaatattaaaactgaaatttacctccaagaccatcctcttgggagatcccccaagttcagcctcttcctctgacagttgagggcatggaggttcagataccggaaagggttggccaacctgatgattgaactaccaagatacctggctcccaaggtaggcttgttagaattcaggcttctgtattgcctaatggatgggtaatacatttggacaccctcccctccatcctagaaatagaaaaatcttctaatgcaatttgccttgtaaaatgtgcaggagtgtgcacacacacatacacatacacacrgagatgggaatagctatgttcaggtcctcatttccagaaaccagttcctacaatatagaaaagctttgccacaaagtctgaggaagccctttgtatttatagtctggtcattctagaggtgtgaacctagatttcctcagctggatgttaatagctgattaattcaggatgctgatttaatttgtgacctataaaacgctatttcacagagaatgggctgtgttggcatgtgcagagaccagctccccagatggaataatcttttccttattaatttgctgcatgttgcttctcatttctcacagtcgttccaaatgtgttacaaacgactacgtgctctgggtcctgaatccactactgctgttgctttgaaagaaaaaaaaattgttgactatgaagggcactgagctttcctggctcacatttgcatgctcactttcaaaccatcagtgcactcttctcttacaacactaagccttgctccacctgcgagcacccatcacttttgtgttgtttaggaaatgcaaacatagatagtttgatgttttcagggccaagcaaataggtagtgacatgattgggatcagatctacagtttcaaattcttgggttgtgctatcttcctattatctagaacatgtgaaaggctgtttaatccccttagtccaatgatcctcaaatttgagtgggcacagaatcacctagaggggttgttaaaactcagactgttgtactctacccccagagcttcttatttagtaagtctaggatgggaactgagagtctgcatttgtaaaaagttcccagagatgcagatgctggttgcagaacacactttgagatcattccatgagtctaactggaggagagtatgggtactgttatctccaagtaaacactgcttggtatctgttggagcaggtctctgctgggtaaggtttctattttatgtctttttcctctttccttcctgatatgcaccaaatcccagttgagcaactattttttaaatgttagggctcaatggagaatgcagcttcactaaataaatttaaatgtgtactgcagtacttgacatggattttttcaaattgtgagcacttaagccagacaaaaatatttcccctgggttcagccattctatgcagaccagcccctggtttctaaggaaccatttgaaatagagtacagtaccaaagtgcagagctgcagaagcatctttatgtcctttctaaatgtagaacatacacctcaagctcaggatttcaactaacactttttggtcatttacaggcttgagacaagtcctgtcattaactacaacattatgtgtgaggcttttttcaggacagataagcttatttttctaaaggaaaggacttttgtttttccagatataaaatagcagctcacacttaaatgcaaaggtcttgtttattgtttgtgtggtgaggtttaattggaaggcctgctttttacaattccatgctactgacattaccaagcacacaggattgttgttagaaaagcaaatgccaggctggggagctcctaatctggtggtctgtgccttgtaaataattagggtgtgggggtgaggtaaaggcctatggaaatcctacagagtgccacagaaatgggtcttctcaattatgataatgtgtaagatcacagtgctttttctgttaatatttaaacatagtcttcaagtaatttactgcaaataatcacatattaaaaagcaaggagtttgcttttttttccctacaaataattcaaatggtggccagaattgagagaatggatgatcatactcacaagattggggatagacatgcaggcagtgtgtttattagaaggaatgtccataaacatgggctggtttggagtggcttcacctactctagttgctaagtttagctattaggtggggagttcaccaaccaccagttagttcaatgtaaccaacaaaagtcagattcccaaccattacccccgcttgtcaccaaaccaagcagccaaccaacctttaaaaccacagtttaaaaacccacagctaaaaggatggcctatgttccataaaatactaattttgctggtcaacattctgaggttggatcaaatctgtgaatggctttttgcaagctaaatgcttcatcttcctaaatttatgtacacgtatattgtttcttatcccaattaacagtctttatttaacaatggcttatcaaaatatgcagccatttctactttaacttgtagaccaggcttgatgttagaacatgatggagacaagtatgttttacaataaccttaaaccttaacactattgggagtgctggctgaactgaggcaatgcctgaagccatttgttgcagttcaaaaagtgtttgacattttatccagatctagaagtcacttaaatgaatgaggaacaatttaacactgacccattctaagacttagttcagattctcatttcgaactgtcttattattcactgaattagtacagctcataaaaagatttcatagacacagctaatgaccacagaggcttatcagtatggtgaaaaacaacagatcaaagcaatgatctgagttatttcctggcatcttagtaattaaacaagtttaactgcttactcaatgaatgcagtacacattggttactcctattaactccaagtaggataatttagtagatgtctctattttgtttttttctccaacctcatcttctaatgaaaactttcagtcatgtttaccaaactcgtttaacttcaagtaatttggatgtcatgtttaatttttactttttttactcaaccatttaaaaaatattttagtcctctgactatgaaaattggtcaagcctgaagtttatcaaagttctaagtccatggctgggctgtcatgactggcagtcaagggcttctcttagagtacttttcaagttcactggacagattaggatagagtaattcatctcattcgatctgtttttccatatacacaacacaagtcaatgtttgttatgactttcctgatccttatttataagacaatacaagaggaaaccatgtgtgtatgtttagaaatagaaatgatacattgcacagatatagttcaccacgttatgggatgggttgtcagtgttcaaatggggaggctgaagagtaagaacagatgctttttttccttaatggcccyttctctgatttaaaatccttccatttatttccctaagatttagtgataactttaaacactttaactaaattacccagcggcttggcagccatcacggaggcaaatccttttagaaatcctagcaatctgttagattgtgggtactatgatataaaatctgtgtgctccacgtacaaaaattaaatcagtgctatggatacaaatacatactgcaaatggcaccacttccaaaccgaggatatgtgacctgtctccaaatattgaatttctttttttacttttttccccagtacttgactttctaaatttgggccaatttattctcattatccctaagtaaacctactttgattttttttaacagttattttatagtcaaatagagccagccagccagccgtgattcgtggatcctgatgttgctaggatacatggtttggtatctgatgaaagtatatcacttcaaaggggtaaaactttcaagtgtccgagaaaatgacactcccatcttccaccatggaagacagatccaatcctacaacttctcagaagctcacagactgcaggattggcctcccaggctttcaaataagtatcctctctggagggctgtttaattactaaaactagtcagattagtcttaaagcaaggaacacacgtatttataataaaacacgttttcatgtttgttttacagtaaagagaaaaaaacccagaacccccagattttatgtactttgaaaatatatttaaaaacattaaaaattctatatttaaaacatatattatatgttaattagtacacttaaatagaacttgtatttacaataggcttctgatgcggttaagttttaatgccaatttttttcaataacataattatataaatatactaaaatacaataaatattgttttttgttttacatggkgaataatatctttaccatagagagaacaaggccacagacatttacttacattttcaatgggaatcgccataaaaaagcaacaggcctgctgccatgcatgaaacacttctgccacaaagagaccacagcaagactttaaaaaacaaaacaaaacagaacaagaacgaacacaacagagagagattttaacaaaataaatcttaggtcaacataaaccatcaagcatgtgactgtgatgtatcttattgggtaaaagagccactgaccacacaattgctggatgtgtctcctatgaaaccacttaacagatctggcccttgcaatcctttaagtttgtgatggggggttgtttgttttaaatttgtccctcaaaaggaagctgcataaagttgacatayagcagatattccaagcattccttacatattaaaaataattacaaakataatattttcaaacaacacaaaacaaatctacactacgtaaagtcttccttctttcaaagaggtattcagatggtactgtgaaagactagctctaaatgaaagactgaacaaattgaaattctttgctgatggtatcttcattcctgggttatggtgaacatcctcttttgcttatccctcaccctactaagatgcagcaattgcttggggctttctgatacttaaggatgctggtccaagtggtgatcactaacattttcaggtgtgaaatgggctgaatgggcttagagctctagttttcactggggatccatttttccaagaaccactatttcaggctcccaacttgacttctcctaacccaaaatggcagaggtgaggcagggaccctctccatgaacagacaggatgggcagaaggttgctgtggccttcactggggagcaaaattttgtcagctctgtcctggcctcttccattgagcaaggcaccttcaagtcttggtgttctgaatgtccagacaccttcccgaagtcttgtctctggacaagatttcctatgggtccccttgatcattcggcctgagtttggggtttcttttcctgttcccttttcccttaccaaaagttctcaaaagataaaccctggtttcctcaagtctagtttcaaagcaataagtgttcaggtagcaaacatcttctatctcattgcatcaatctcatgatcacaaatgccacatttggctcccaacctgctccaggctaatccaattttatgcaaaattatccagaggtgggatggtgggcataagtcggcttgagtgtggtcctccagtcgagaacctcttgagcacagttagataatgtaggcacttaaagcacgaggtccaagcagcttgacacatgtcattccagagccacctctgaagggtccttcagaggccttcgttttggaatgtctcaaataccatgccccacctccacctagaccttgggatggccactcagaaattcctcccgcactgccggtaaatgcaatgccaactccacatagcctccatttggctgttcagtctcatgtcactggcaatgtggattcctgttctgatctaggtgtttctgggttgatacagggctctaccttttgcttacaagacattgttaagcctcaccatgagttttttttaagcttagccatgatttacccaaatgttcactcctcataaaaaataatcttcattttggggttattttttgttgttttctgttctaaaaaaaaatcactgttctccatgcttatacgagtgtcatgatgtgacacaaygtgttcacttgttcacagcagtggtaaaatatttcagaacgcgcaactgatttttcttccttaaaacaaaacaaagaggagaccagagggggagggggggaaagaatgtgttctgagcaaacataggtccttccgtcaaaagcagcttactctgaccaacgcccaaagaatgagcggggcctgggaggtgcatcacgggatgtggagtgtgagcatttttttgttcagttgccttaatttttattcactttctagtcatctgatcgatattgcaaacatcttcacaacatacaaatgtatcttttatcagccagaatatatattgtaggaattctttccccatctctactccctgtgggaactaaaaaacaaaacaaacraaygaaaaaaaaacacaaaacaaacaaaaatataccccccatcccccatcccctaagccagtaaagcaatgacaacagcaccttgacattgttttaattccaacgctatcagaagttaaaagcagtaaaacagatatagtactaacaagaacgaagatacttactgtctaaaatgtaaacggaatgttttggttcaaatttttgttgtgtgtgtgtgtgtktttttctgttttctgaaagaggacagtttattatcaattcacaattaaagcagcatgcaatktattattttttttaactttttatgttttcagttcttggcaacggcaacaaaccacaacattatcaaggaatgtaatgcagactttttaagttgtgcgcaaatgactgtttcccttctggtcatggacatgtccaataaatagattgtagaaccactgtactgtataaacttcatttatacatgcagttcataaaattatttttttcttaactgaataatttaccctgttatgtatatatacaaatagataatttttgtctcaatataatctaatctatacaacataaatccactatcttccccttttaatggtcaatgtacatacacaagaagtgtctatccttatgaatcgccagccaattctctttttgctatccatggtaagggcccgcacgtacgactgggtagttcggcactgggagttccaatgccttttgtctatgcccctgcagccttcttttgtgtaacccatgggattgcacttggtctcgtagaagtattgcttcagttggccttttgatacagggaccttttcaaggactgtgaccgtcccgcccgacatgtccactgcagtctttttgtctgcygccgttacccactcactaatactgtcacacacgctcagctcccctcggcgggcagggtcagagtggcgcvggaccvtcatggacatgtttgcagcatctaggtaatttttgtattcctccagcagaaagagaagaggaggctccaaaggcacttgactactgagcatcaccctggacgtgtacaagtctgcgtccttattgttttcttcattgggccgaactttntggtcctcatccaacagctcttctatcaygtgttcgaaagtgtcagccaatgatgtcaagcctcttgaacctgccttgggcccattcacgctctccagagtcccatgggtccgcacacctgggtaggccaagccaccttgtcctcggatgtttgcttctttcatgggggcagccttcatgcaaccaaagtatgaaataaccatagtaaggaaaaggatggtcatcactcttctcacctggtggaactgtagggagaaagcagaaacaagacagaaaactggttagggctttctttcaccgggatgccatgtggcccatctgattgtaattccaggccattctgcagggtcaaggtttttttatgtcttggtgataaactccagctgcaccagacacaaatcagtgtcagtagtgtgctgtatgtggtttaatataaaccagagacatgcagtgtttcccccaagatctagcatataaacctgagattagatggcttctaagcaagtgcaaaaattgtggcttcaagttctccttcttcccactttagcagctttgtaagtttaatttttaatgatctctgctcatgctgtcacgagaaacacaaaatcataaatgttactaagcaacaactgcaagtgtaattaatagtaatttttttcaagttagcaacatggtcctttgcaggaatgtgtgacaggaacagcagtggcctgaggggtctgatgggcctttctagctatgtgatgtctaggcatgaatagcacaataaaacagcagttggggaactataaggagcctttaaattgacttttttttycctcttcccacagagatactctattatagcaaagaagaawgataatttcattgagccatcctgttttacaggtaaggaaaccaaaggccatagaagacttgccttatgtcatgaagaaagtttatgttagaactcagggctcccaattccactgttctttattctacacctgggtggtcacaactgaaaatgttttgcttatttctaaacagaaatcattttttgacatgttcattttaatgatgtgtctatgcctggggctaatgtcatgaaaacaatgtgtctggtaaggagaaaactgaaaaagtcagcattaaaaagacatttaagtccatttcaaatgcctcccatatgcagactccactttatctcctccagttctctaaaacccttcactccttggctttttctggctaatacacacatctagctaagaaagctcaacttttctttttactagagatgtyctctbtgtgtgtgtgtgtgtgtgtktgygcgcgcgcgtgtgcgcgcgctctgagtttatcctacttttaaaaagctgagtggtgttttacacattttggaataggcagctagtgcttctttttctgcttttgaagtttcctgggaagtcccttaaaagcataccacaaaattaatctcttcctgtttgccagagggttgctctactctaaatttggctytacatctacaagcatgctctaggaagccaattaaaatggatgaacaagcaaaatgaaaacatacctatggaccaacccaaggttaccgtcaggtggtgaaggacttcagaatcacttacctgaagcattgtgtttctcagcagcaaagagtagcatccccagccctgaccctaattttattcctacttctcagttctgaggcatggacttacaaaaagacacatacatgcaatggccatcatgatatccaaataagtaggaaaaggaactgtgtttctgcccatgaagttttactgaattcaaaggcaacctacctccagtcaataggtcagaatgcagaaatggctgaaaactctggtattgaaaagcaaatgttctccacttttgtaagaaataacattttcaaccactaagagactttattaccatccctaaacacacaaaaaaatttcttttagatttactctcactttgcacgaatagcaaacatgcttagaactgcttagattgcacaatgttctcagattaggaagggaaaattggtttgaataaaatacagatgtctattccgctaacaactaaatctttgtgaatgttctgagtcctgtaccatcaaagaaatagatcgtccatgggggtttctatttctggtagattgtacttacacactgaatgaaaaagctttctcctaatattcccagtccaaataaaaacaacccaaggggcacctcttatttaggtcaataaaagtttgcaaatgtggaatactttagccatctacatcacactggtagagactttctgtgatcagctattttttaataccatatttaatcaaatctaagataccatcattgtgaaactcgacattttatatatcactaagaaagcaaaaatgcagcctgggtgaccagagtgaaactccatctcaaaaaaaaaaaaaaaagaattaatgaactatagtttaatacatatttactaagtgcccacactaactacttaaaaatggtccaaaatactgaggcatcttaagctgttggaaaattgttttgttttcaccactacagtaatgagtctttgaatgataccattttctatacttggcttctagtttactctgcctttcactgatcttatctttttattaataactttatgagaaaaataattaatgctttatatattgttctctcagttccatgagcaaatatttcagagggaaaattggcatctgagtaaatattacttggctttcattctgaagcccaaacatgggtattcctcaagctgagcatctgcatagaattaggaattaacacaatggtgacaaagtccaaccccacattgcaagccctgctctctgagtggcacttctgcaattctaactaactgtctactcacttgtaaggccttgaagttaagtgggtgcaacaccaaactcaatactttttgttggaacagtggtatctcctaccttttctaacaatggttccctgatattttgggcaacccaggcataggatagaaatcctggaatcaagtttgacaatatatttcctgcatagccttccaatccagtcagtaaagatgtcctgttaatttttcctttaaaatatttgtcctggccatccctttttatccatcccactgccaccatcttggctcagccctcaccacctcattttgtgaccacaacgtcccgatgctgtatcagacactctttctgctccattcaactctgatgaccacttcctgggtaaccaccctaatactattctcttacacaaaaactggcaatggcatttttgttctatctgctcaaatctaatgtcttctctctgatactcaactctctccaacatctgccctcacccttcttagctaactttctcaaactactcaatgcttcatcacttctgctccgatcaggacagagtccttggagtgccgtacacattactgcctcctgacttgttccattcctctgacaaactcctctctccctctcacttgctgccaaaatcttgcttatccttcatgatccagttcaagcatcaaatcatgcatgcccctttctctaattactccagcatacactgccttccttccctaaaattccacattacatcttacgtagtacttgattcccttctcacttgttttgttttgtttttttcccaagacagagtcttgctctgtcgcccaggctggagtgcaatggtgcaatctyggctcactgcaatctccacctcctgggttcaagcaattctcctgcctcagcaggaggtagctgggattacaggcgcccaccaccatgcccggctaatttttgtatttttagtagagacakggtttcaccatgttggccgagctggcctactcacttgttaattgttaaccgtatttgctcattctagtcagtcttcagctgaaaggtaagttctttgagggaatggatcatgtctgagcccccataatgcttaacagagaaaaatgtaatagcagtactcagtaaaaacttactgataggtttattaaactaagagaaaagacagtttggatataattttcgtaagaagccttttcatttggaaagatcagtgaacccattgaaattctcaggtaaatataggctgtgctaaccccaaattataaactctaaggcagtggtcccaacctttttggcagcaggaaccagttttgtggaagacaatttttccacggtctgggagtagcagggtggatggttttgggatgaaatggttccaccttagatcatcagttaaattatcataaggaattggattctcataaggagcacacaacctagatcccttgcatgtgcagttcacaacagggctcatgcttctatgagaatctaatgctgctgctgatctgaaaggagacagagctcagatggcaatgtttgctcacccgccgctcacttcctactgtgcagcctggttcctaacaggccagggactggtaacaatccatggcctgggtgttgcggatccctgctctaaggaatttgacagatagcaattatcagccatgaccaacttcttgagttcctctaatggaataaaaccttacttgaataattaaaaagcagataacactaccacrtactaactgtcctacaatttcctgtgtagctctatttctaacagatcaataagagacttgggaagtaataacaataataatagcaaaatttgtagttttcagccttttaacttcttgtttcttattctgctaagctttcaatgagtaattttatatactgtattaggaaataataaaagattaagtaagagcttccaggacaattcttcattttcaaccttcggatgactctttatcacacataagataaagaggctgtgtaatattgctaagcagattatatatttatttatacttaataaattcattgatgctgtctaattctgctttaaggcttacagccattaattcaaccacatctataaaatgctaggaaggctttcatagccccactgtcaggaaattcaatatagtacatagaactaaaaagaaaatcaatgaagtagatatcaagtttagctttaagtgtgactcacaagtcttagacatttcactgaaagaatgtccataacaacatgctcttttactcttgctgtagtcataacttacatttgtctaagagactatagaacattcacaggcgtcatctaatttgatttttacaaggagacaggatgggtattattatccccattatatagatgaggcaattatgcgtcagagaggttaggtaacctgtcaaatgccataaagctagtaggtcacctgtctcctgaaccaagcttttaccatcaggatgtgttgccagttttagaatatcagccacagagaagagagtggctgtgacaacgaaggagcttacaaaatgtggacactgcagctatgtgtgtcctggaacctaactttctaaaaggagtgccattaagatactactttgtaggtctagattaatcatgaccaagatccttcaactttaaggcttgattacttaaatggatgaaatttcagacaatgtggtctttttctaagagaaagaactgcaaaaattgtagcatgttagaactaagtttctatggccaaaggtgggaaaacaagcaacagtacagataattcaggcatacagaaaaaaaaaaaagtcttgtttgttcccagcccctttgggttttacctgtgagcgtgtaatcagagaaaacacagtttaaagatatggctgctcattttagacagtcctataaagataatggtaatgctgaagaagttattaatatttggttcctaacatatatgatacaaactattaagagttgaccttaatgaaatcttgcaaatcaatatttaaaaatttttaatttgcatccagttgactatatccatatgttagacttccttttgttcattcattcatcacacatgaagtctactttccagtcttacttacctccctccctaggagggaggtaggacatacgtaactagaatataaaggtagaaatgacccagaaaaggtacagatacaattttataaagagaaagaagttacttccagttagggaataaaggaatgcattgtcaagaaggttgcaaagggccaggtgcagtggctcacatttgtaatcccaacactttgggaggccgaggcgggaggatcactagagcccaggaattcgagatcaacctgggcaacacagtgagaccatgtctctacaaaaacttaaaaattaaaaaaattaggtgtggttgtgcacacctgtagtttcagctacttgggaggctgaggtgggaggattacttgagtctaagaagttgaggctacagtgagcgattgatcatgccactgaactccagcctgggtgacagagacactattgccctaggaaagcaactgttttgctgtaatcaatgaaggctcccgatagccagagccacccagaattcacagtcacatcgaaccttgccctcatcctctgcctccttgtcacagagcaacactgccccagtagcacacatctccagtctgtaacaaagaagtcttagcatcaagcatactcaagccacttggatagcaaatgaggtcatctgaaaatacttttaaagtttacttttttaaaaaacagttttttgtttacaggacccaaatggcagttgacattccctgtaaaagtttaacctcttcaattagaattctgttttctttagaatttcaggtgggatctgttacaattcactgaagtttagatttgacaatgttctatctactatgttattgaaaccatataatatttaccaaattcccatacatggtagacagtgacattaattaagaagataatttccaatttgttccatgaagtttcagtgacccactctgtaataaagaacttggaaagggaggttccaagatggccaaatakgaacagctccagtctacagcccccagcgtgagtgaygcagaagacgggtgatttctgcatttccaactgaggtaccgggttcatctcactggggcttgtcagacagtgggtacaacccacggagcatgagccaaagcagggtggggcatcacctcacccaggaagcacaaggggttggggaattccctttcctagccaagggaagccatgactgacggtacctggaaaatcaggacactccccaccctaatactgtgcttttccaatggtcttagcaaacggcacaccaggagattatgtcccaggcytggctcggagggtcccatgcccacggagcctggctcactgctagcacagcagtctgagatcgaactgcaaagcagcagcgaggctgggggaggggtgtccaccattgctgagacttgagtaggtaaacaaagcagccaggaagctcgaaatgggtggagcccaccgcagctcaaggaggcctgcctgcctctgtagactccacctctaggggcagggcacagctgaacaaaagacagcagaaacttctgcagacttaaatgtccctgtctgacagctttgaaaagagtaggggtcctcccagcatggaatatgatatctgagaatggacagtctgcctcttcaagtgggttcctgacccctgagtagcctaactgggaggcacctcccagtaggggccgactgacacctcatacggccaggtgcccctctgagacgaagcttccagaggaacaatcagggagcaacatttgccgttctgcaatatttgctgttctgcagcctctgctggtgatacccaagcaaacagggtctggagtggacctccagcaaactccaacagacctgcagctgagggtcctgactgttagaaggaaaactaacaaagagaaagaacatccacaccaaaaccccatctgtacgtcaccatcatcaaagaccaaaggtagataaaaccaataagatggggagaaaccagagcagagaagctgaaaattctaaaaatcagagcacgtcttctcctccaaaggaatgcagctcctcgccagcaatggaacaaagctggacagagaatgactttcacaagttgagagaagaaggcttcagatgatcagtaataacaaactcctccgagctaaaggaggatgtttgaaccttttagcaaagaagctaaaaaccttgaaaaaacattagacgaatggctaactagaaaaaacagcatagagaagaccttaaatgacctgatggagctgaaaaccatggcacgagaactatgtgacacatgcacaagcttcagtagctgattcaatcaagtggaagaaagggattgaagatcaaatgaatgaaatgaagcaagaagagaagtttagagaaaaaagagtaaaaagaaatgtacaaagcctccaagaaatatgggactatgtgaaaagaccaaatctacatctgattggtgtacctgaaagtgatggggagaatggaaccaagttggaaaacgctctgcaggatattatccaggagaacttccccaatctagtgaggcaggccagcattcaaattcaggaaatacagagaatgcygcaaagatactcctcaagaagagtaactcaaagacacataattgtcagattcaccaaagttgaaatgaaggaaaaaacattaagtgcagcgagagagaaagggcaggttacccacaaagggaagtccatcagactaacagcatctttcggcagaaactctacaagccagaagagagtgggggccaatattcaacattcttaaagaaaagaattttcaacccagaatttcatatccagccaaactaagcttcataagtgaaggagaaataaaatcctttacagacaagcaaatgctgagagattttgtcaccaccaggcctgccttacaagagctcctgaaggaagcactaaacatggaaaggaacaaccagtaccagccactgcaaaaacatgccaaattgtaaagatcattgaggctaggaagaaactgcatcaactaacgagcaaaataaccagctaacatcataatgacaggatcaaattcacacataacaatattaaccttaaatgtaaatgggctaaatgctccagttaaaagacatggactggcaaattggataaagagtcaagacccatcagtgtgctgtattcagcagacccatctcatgtgcagagacgcacataggctcaaaataaagggatggaggaagatctaccaaggaaatggaaagcaaaaaaaagcaggagttgcaatcctagtctctgataaaacagactttaaaccaacaaagatcaaaagagacaaagaaggccattacataatgataaagggatcaattcaacaagaagagctaactatcctaaaaatatatgcacctaatacaggagcaccagattcacaaagcaagtccttagagacctacaaagagacttagactcccacacaataataatgggagactttatcaccccacggtcaatattagacagatcaacaagacagaaaattaacaaagatatccagaaattgaactcagctctgcaccaagcggacctaatagacatctacagaactctccactccaaatcaacagaatatacattcttctcggcaccacatcacacttattccaaaaattgactacatagttggaagtaaagcactcctcagcaaatgtaaaagaacagaaattataacaaactgcctctcagactacagtgctttcaaactagaactcaggattaagaaactcactcagaaccactcaactacatggaaactgagcaacctgctcctgagtgactactgggtacttaacgaagtgaaggcagaaataaagatgttctttgaaaccaatgagaacaaagacacaacataccagaatctctgggacacatttaaagcagtgtgtagagggaaatttatagcactaaatgcccacaagagaaagcaggaaagatctaaaattgacaccctaacatcacaatttagagaagcaagagcaaacacattcaaaagctagcagaagacaagaaataactaagatcagagtagaactgaaggagatagagacagaaaaactccttcaaaaaatcaatgaacccaggagctggttttttaaaaagatcaacaaaattgatagatcactagcaagactaataaagaagaaaagagaaaagaatcaaatagatgcaataaaaggtgataaaggggatatcaccaccaatcccacagaaatacaaactaccatcagagaacactataaacacttctatgcaaataaactagaaaacctaaaagaaatttataaattcctggacacacacaccctcccaggactaaaccaggaagaagttgaatctcttaatagaccaataacaggctctgaaattgaggcaataattaatagcctaccaaccaaaaaaatccatcaggaccagatggattcacagctgaattctaccagaggtataaggaggagctggtacyattctgaaactattctaatcaatagaaaaagagggaatcctccctaactcattttatgaggccagcatcatcctgataccacagcctgacagagacacaacaaaaaaagagaatttcaggccaatatccctgatgaagatcgatggaaaaatcctcagtaaaatactggcaaaccgaatccagcagaacatcaaaaagcttatccaccatgatcaagttggcttcatccctgggatgcaaggctggttcaacatatgcaaatcaataaatataatccatcatataaacagaatcaaagacaaaaaccatgattatctcaatagatgcagaaaaggcctttgacaaaattcaacagcctttgtgctaaaaactctaaataaactaggtattgatgggacatatctcaaaataataagagctattcacgacaaacccacagccaatgtcatactgaatgggcaaaagctggaagcattccctttgaaaactggcacaaaacaaggatgtcctctgtcaccactcctattcaacatagtattggacgttctagccagggcaatcaggcaatagaaagaaataaaggatattcaaataggaagagaggaagtcaaattgtctctgtttgcagatgacatgattgtatatttagaaaaccccatcatctcagcccaaaatctccttaagcygataagcaacttcagcaaagtctcaggatacaaaatcaatgtgcaaaaatcacaagcattcctatacaccaataacagacaaacagagagccaaatcatgagtgaactcccattcacaattgtttcaaagagaataaaatacttaggaatccaacttacaagggatgtggaagacctcttcaaggagaactacaaaccactgctcaaggaaataaaagaggacgcaaacaaatggaagaacattccattctcatgggtaggaagaatcaatatcatgaaaatggccatactacccaaggtaatttatagattcaatgccatccccatcaagctaccaatgactttctccacagaattggaaaaaaactactttaaagttcatatggaaccaaaaaagagcccgcatcgccaagacaatcctaaaccaaaagaacaaagctggaggcatcacgctacctgacttcaaactatattacaaggctacagtaaccaaaacagcatggtactggtaccaaaacagagatatagaccaatggaacagaacagagccctcagaaacaataccacacatctacaaccatctgatctttgacaaacctgacaaaaacaagaaatggggaaaggattctctatttaataaatggtgctgggaaaactggctagccatatgtagaaagctgaaactggatcccttctttacaccttatacaaaaattaattcaagatgaattaaagacttacacgttagacctaaaaccataaaaaccctagaagaaaacctaggcaataccattcaggacataggcatggacaaggacttcatgactaaaacaccaaaagcaatggcaacaaaagccaaaattgacaaatgggatctaattaaactaaagagcttctgcacagcaaaagaaactaccatcagagtgaataggaaacctacggaatgggagaaaatttttacaatctacccatctgacaaagggctaatatccagaatctaaaagaacttaaacaaatttacaagaaaaaatcaaatgaccccatcaaaaagtgggtgaaggatatgaacagacacttctcaaaagaagacatttatgtagccaaaagacacatgaaaaaatgctcatcatcactggccatcagagaaatgcaaatcaaaaccacaatgagataccatctcacaccagttagaatggcgatcattaaagtccggaaacaacaggtgctggaaaggatgtagagaaataggaacacttttacactgttgatgggactgtaaactagttcaaacattgtggaagacagtgtggcgattcctctaggatctagaactagaaataccatttgagccagccatcccattactgggtatatacccagaggattataaatcatgctactataaagacacatgcacacgtatgtttattgcggcactatttacaatagcaaatacttggagccaaccaaatgtccatcagtgagcaaggacatcattctgagcaaactatcgcaaggacagaaaaccaaacaccgcatgttctcactcataggtgggaactgaacaatgagaacacttggacacagggtggggaacatcacacactgggacctgtcatggagtaggggtaggggggagggatagcattaggagatatacctaatgtaaatgacgagttaatgggtgcagcacaccaacatggcacatgtatacatatgtaacaaacctgcaggttgtgcacatgtaccctagaacttaaagtataattaaaaaaaaaaagaacctggagaaattatcaagtaagcatcatatttaatgaatttatggtgaaatcatgtgggaaaaatttttctgtacagggatgatgactctggaaatggtggagagagagacagaaaaacaaatgtcactgtaacacaggtatttaaattgtatttaaatacacagacttttgaatttatagaaaattttcaagtatgaaattgatttcatgcaacctaaagtctcaaacttcaaataattttttgtgttaaatttataaattgtgtattaatgcaattcaaatttattcctaaaaatattttaactaaaggagaaattcctggggcctgagattagagttttaggaaatgtacatatgggataaacttacacaggctgaaattaagtgaaaccttacttctcaatgttgagatggattagccattttaacataaagtagaaacttctaagaaatgcagaatctcaacttccccaccctcattccacctaccccacccactcaatcagatcctgcatttcaataagatttatttagtgcaataacttttttacttatcaaagttgagaagcacaggactaaatgataaagagaaaagaggctgcttaggataaggaaataaaaggttgaagttaacttaagtattatgatactttcttagcgtgtcatacggttacctgtcatctttcctctttggttcaacttgttttatggggacatttatgtgggaaaatatctttgcttttgtaatttatgtgggaaaatatctttgcttttgtgtttttacttaagtaaaatctgggctccttttatgtcaactagcttttccactattgttattatgatagaaagtacaggctacttataaacatgattagttcaatgagaacttttagaatattgctgacctaaatctggacatctacacaatcattaattcttaccaaaatgctacaaggcaatataagcataattagcctccctgatccctgaacatagcctaatatcactcactcaatcagaatcatactggaaacgatatgaccaactatggcaggtagtagatgtccagtcacactagtattgctttcagccagatgtctctggtccttgtgagttcctttsgtccttaatggtgaaatagcaacagagggaaccaactcactcactcaaggcagatttcttatttctagacttgtcctgaaaccaacagatccagctctctcctaccaaataccatgaaatttaaacaaacgaaactcgcaaaataatacagcagcagcagcaacaacaacaatgaaatattaaaatagtaaatataagtatcaaacatcaaaaccccctctccaaccaaaatctctcttcttcgataaasttcccaggaggtaacccaatttctaggttggtgtccaatatttgggatcatttgattcaagactgaagtacttaaaatggcttttaaaaaaggaaaaaaggttagatttccagagaaaagtgtaacattttttaagttgaacattatgagggatttgatgggggcagctttgcaagtagaactggagactggtccactgttcaggctttttacgaaagactgcaaaggttgtttgtttccaaacaccaagaagtcaccaagttcaccagtccaaatgcaaatgactcacactaggaaccctaatagtgctgctgttaagtcatttgcaaatgggtggggctgagatgacacagaaccctattttcccaggtggcatcttaagtatggttgattctaccttcagccccacatttaaaagtacagtgtaaacacagctaagggaccgcctccttcaaattacacacaaggcacacctactaataggagatgttgtgaaagccaggtggggctttgtctttcaagtccctgcatccaagaataagcatgctgtgtacaaaaaaaaaaaaaaaagcaagggtgatgcaactgcattcattgtccctaaagggagaacatgcaataattctcagatccaaggataaagggaatccccctttaagaaaagatgttggcattatgtggggattgggaacatgccagaacaatcacacatttttacaaaagagagaaagagaaaaaaagttaagacccatttgtcttatttcagtctctttcttcagaattgacgactttaatcaacaggtcactttcagagtattgctggacaccttgactttctgccatgaaatgctatgggaattctggcagttgagagccaacaccccactagacaccagtgctgcataaccacacttttaatagaccccagagctgtggtgacagcatgcccttcccagtttttccacagacggtgctcctgaaattttccatagacagtgtattcttgtggttaattagttatctgagcaatttccattatagaaagagtatctgtacataattaaacccatcttaggaccaaactgccgggcttcaatgtcattaattcagaagggctaaaatgaaaatgagatgaataattctcacctgatgaagggaccgcactagattagatcctatcctctgaaatacatagagcattaaatttaaaaaaacaagagaggtgaaaacaggtgatggaagaaactggaaaggtaagttgcctctagagaccaaagaataacactccttttcaaactattatcaagaaatcttgggggaaagataaaattagcaagagaaggctattagctctctgttactcacctttatgaaaccattttcagggatcagtttgttaaattccactgaaacgtggaggtacacagcacagcccttcttctgggatgcacagtcatgccatacagaagcgtgtgggtagacgccaaaacatgtgtggacctgcaaccctttctgtagaaactcagcattctgagtagtaacaaggattaaccttgtgcactcatggagaaaactggtggctccacacatccagttgtccttcgggttatttttgcatcccactctataatttcttttaattacttaactgtaaagcacaggaaagtgmtcattacttgtagcttaatgcaggaggaaatataattgaatatgttctcctagccactgctctaccccagctcccagctcttctgaagtgtcacggttcatttcaacagcacgagtaaggcagtttccaggccctgtgcataatgagccatgtggaccctattcaagaaactggctgtactccagaactactataaaatataaggaaaatattaacatcttagatgacaaaagatccatatggctggccagaaaatatctgcatcatttaagccattagaatgcacctatatggaaacattcaatttggcggtactgtgaacaacaggactgtgaaaacatctgtttatctccacccgttttcactaaacactgattcctatagaagacatgcaaactcaaataccaacatatttcatctaagcataggacagggactccatttttacatagttgctataataaatacaatacagtatttgttggtgataggattttggaagatgctctggatagctggaaaaataagtaaaatgtttctctttgtattaaacttgataaaaaataatagctaacatttattaatggtgaggtaaataatttgattatccaccatttatagctgaggaaactgaggcccagagagtttcggtggattccctaagatcacatacccattatgtggtggagagggaatatgaaccagtgctggcttgctatgcctctttccatatggggtcagacatagatgtggtgtcttataatgtgagggaggtctacttggcagaaatatcctgcagaccctatatgccagtttcttatttatttaaacaaagccccatatgagcatttctgataagcagtttgtttacacactaattccacagaggttaaatataaccctaatgtttctttgttgctactctgtttccagtattgaattattaccacaaggtaccaaccatatatgcatacttaatagggtattttgtcaaaactatgcatgaaggtcatttgtttgagatgtcagaacattttcccgtgagaagatctcattgggcattgaaacagaaccacatgctcttcagaccagcaaccgcgactaccaaatactcctctgtcaactctacttgagtaagaacgctttcaattaaggcctaagtgtcaacatgcctttaaaaaaaatcgtggtgacacaaaatctttctttttagcacccaacagaatcccttcaaagcctcgtggtctgacaccctatgctacgtgacttgtgacccatccatttgtcatgttcttcgggaatgtggctaaggggctaagatgtgacttgaaaagaaaggtagaacaagatcatctcaaatttattatcaaggaatagttcagaaaacgacttcagaccacagagacagcagaacagatggtccggcatggatagagcatcagacactcacagactgtgccaacaagagccatcgagtcaaaacagccaaaggaaggagggtcatggaatgggttctctcacaccaaactgatgcccagaggccctcagcatgaataacaaaggcaaccagacccacaagccatactgagtggatacaaaacctatacctaggctgacatcccaaatgtgtgtggcaagttagatgatgatggcacaaaagacagaacaccttgcttctggccattgtcagctcttggaagagagcacacttttagaggagcagctgcaaggagcctgagaacaaaactggaaatgtctgttatgaaagccttcacaggtattattaacaaaagaaaatgtctatttgtcaatggtgtttcagctagattttggcagtccattcttatgcccaggaatgacctcttgtgtagactggatacagtcatcaatgcaactgtccaggtgcaactcttctataaaggggaagaggagtgactttcccctatacagtggccctgtcaaaattctataaaaaatattgtccatttaaattaaataaccactgtgcccggctccatttaccacacttttctatgcagtggaactgaaggggatttttttttttgctgtcctcagagaaaaataagactaagaatcaacctttctaatgagaatggtaaggagttatgtggggatgacctggaatatatgctgctcaaatggtggagatgttatctaggccgtaaatcatggcatttttatatgatcccctatttgcctaatgcaggaaaccacttggcaactttaaggaaaaagtctagcaataatgcatcatagttcaatgtttatattgtacttggacagtttaaatttatcttataaagtactaattatttaattacaaatgttgagtaagtgtaaaatcattcctcaaaaaagcatcccttgagtatgaaagttccaagcttagcaagacatccctgtgatttgggatacatctcttgaactcagtcctgaaaataatgttaatagctgagaaaagagcattgaaagccttatacacagtgtgttgtagtgaaacaattttctttttggttctaaaaaacactgttgtgctctttagatccagcatggctagttagatgaataatgaatgcatgttcaactttctgctacaggaaattctgcaagtggcaacgtgggtccattccgtgtgtgtcactagagctggcgcaagcccatggccatggtgaggcagcgtttccactggaactaatctgatacctgcaccagctcttgcaactgtgcagtgttcccactgcaaactacggatggggtaaaagactgctcacctcctatttctcatctaatctcacacactctgtttgatgaggctatggagaaacaggtcttctcatacactaaaggtgggagtacaaacaattcaagccctgtgcaggacaattaggcaatacctatcaaaattatacatgatttttcctgctgacccagcaattccacttctgggaataattgacagatataggtgcatatgtacaaaatgatggaaagctctctggtatatattagtaagtgataaaacaaggtgtaaaatagtgtatatatggctactaccttttgttttaaaaatgggggaaaatggtggagcttgcggtgagccgagatcgtgccactgcactccagcctgggcgacagagcgagactccgtctcaaaaaaaaaacagggtggggtgggggggaaataatagtacatactcatatttacctgtatctatataaaacacactatcaaggattcacaagaaactaatacaaatgatcaccttatagatggtatgtattgggggatactgaggtgagcagggtataagtggggcaagacttttcagtgtaaacttcttttaaattttattttgatttttgaataatgtaaattaactgtcaaataattaaattaaaaataaccaatttattaacaaaacatttaatctagtggctttacttttgacacaagacaatctccaaatctccaccaatcaccaaaaacagagatttacaccagttcctttgcttgtttttcctggtaatgactacaattaagaagtcctgtgggtgccatctcagttttggagatatttccctagaagaaactgattcaaggtgggacaattgggtatagagaatagtccctgggaccgggggctgaagtcctgaattctggtcctgcctaactcccactttctattaagctgaccctgtgaaacggctgatacatgaccattttttaccaacaaattagacaaattcatgggtgatcaaattcaaaaaccctgttgccttaccactgtaatatgatgaggacacgtatacacaccctgcctaactcacagcatcacaccagggattgtcaacatatgggaaagagctttgtacattgtaaaggtcaaccctacaaacagcagctgtgaaacacaacacaaccctgagggggtggccatggccaaacataggaggggaaaaggacccaktctcaaaagcatctgagatactgagatagtgcagaggaatgaaatcttccaaaagatggaatctaaacataaacagacatcaagagcgggctgacttgcagtggaagatgtggttaaatgactccacatgtggtcatctgccattgcatacactgcaaattctgtgaagcctactaagggaaattagggagatgtaactgggagcgcactgtaaagatactgataygaacacgaatgtgagatcaatgttgaatgatggacccaaaaggatggctcttagtccttgtgaacatatagttgttggagacatgtgtctgtcatacacagataggcctccaactcacctctgaaatcagatgcaaacttcaaatacttttgaaaagtctccctagaggaccttttacccccaaatgtagasactaaatgaaaaaccattctttaaaaggggttaaaaaaaacactcaaaaaacttctcctttccacatgtatagtcatctggaaaacagatctcccattaaacggatggtcaaagctgtatcacaacattaaactaagcacaaaaattcaagacttcccttcctcaccctcctaaaacgaaacattccaataggctagaaataacctcatgaggaagttcattgaaggtactcccacttggcactactatccagacactgggttaggaaactagttacttggaactcagaaaaaataagaactattttgattaggcaaggcccctgtgcaaggtgcctagttccagctgggtctcagtagtctgatgggtgtcatgcactcctggacctcctcttaatgaaacaagggaccttgactttgggccccatgttgagaagctctgaagccaaatataatggtcaaatataatgtcctctcayttctagcttcatagcagaccatgtttccatatagaaatttctctaggaggcttactatcctatgttatctcaagccgaggcctcctcttacacaagaggcttaaactgcccgtaagtaagaattaaagatatgttacattttttatgaattagtcatttattcattcagcaaaggttattaagaaggtactgagtttggatgtactttgctttaggaaaatcattttcaaggttgcttcatgcaaagtgggaataattaacttggtaactcaatagacttgctaagtgattgccccaagtttaaactgtcactgatttgcaagtatgacatgaaaaccagagacccaaggaggtgggcacattcccacctgtcaatagccctcaagagaagtgcttcagtattaccccaaatggccaactttgcatggttaatcatttagttagaggctcacaagatcaaaaacaattcttaaaaaactatttatgtgaacaaagggacaatgagctgacaccttcaaggtgcacgtcaggggcacaatacaagttcctgtttcaccagcagagctctggtcgctcagttgaagctgaaagtcagaaccagctgtgtttctgtcattccctcatatgaaaagaactcagctgtagacctttactccatgagaaaacattttttaaaaacccacaaataatttttaggtttcatttttgcctctgctttctccagarctacaaaggtcacccaaatttctgtggcgaggttatttaggagagcctttcttttggatgtcaacttgtcaaacttgcagtttagatgagtgtgatgtagtctcctaaaatttacttttgcactattttttcaaataatagatattctctgagcacaggcactgaggacatcaaaatgaatgagactgaatttctgcccttggggactgcagtgttaagggtgggttagacccaaaaaccaacaatacagtgcaatgtggtacatgctgtaactaacatgcacaaagggcattcccaaaaaagagaatgaaaagagggaggaaggtggcaaaggagaaaggcctttggcccaagtttttgttcaataaagatcatattttgtagatcaaaagattatatgatctgctaaccccttagcatgtatagctcatgaagcaagacaaagtacccatgaagagttcaacattagcgagcctctggggcaagtaagttggaaatcataacccatttatggatacctgcctagaactgatttcctattcagagtgccttcctagctgataagaacaatactgaaatctttcttttccatgagggaaaaacatgttgaatcatttagcaagtacctacagagccacctactatgtatgtgcccagcagtctactgtgtgctatcaggagtaagaaaatgtagaaatattcttgcttttaaagggtttacaatctaattgtagaaataatactaaaatacatgagaggaaagaaaagcaaacttagcttctctgggataaggactatatctcatgcaacttttaaaaagttaccatttattcaacttcctaccaccattacatacttctggtaatcaattatcttccttctccccttgggattttgaattgggaacagaatagaaataagttgccaaataagaatcaaaatacagggtcagcctcaatttcagtgcaagtggtccattgctttggttcacaggctctacagtccagaagatgaaagattaaggatttcatccatcagattaacctctcctcttttcacagaaagaacaagtaatggggataagagaagggcctagaatattcccctgaaagtgttacttattaggaagcaagttcccttgtggaaacacaaggatgggggaaagggatttccctcaacattgttctatctacacacagagaattcaagtaacttgcccaaaatcacagagctagtaagtggtgaggcttaaatcaaacttgatcatcaggtccaggaacacaggtacaggctggggctgcctcatgaagtgtctgtttaggaaatgtgtctttaaagtcaacagactgtcctgagtaggacattctagaacatttttctagacaaaaacatcrtatctacaacttccagcctagaatctgatacagcaaagacacacaataatgttttgttatataagtgcatatacaattaattaccaaattatgaggtacagaccacctaggaactcagatagggcaggtttattattatgggcaagagtctttctagaaacaggattccagctaggtcttgaagaatgagtagaattcagatgaataaacagcagaaaaaatcattaataaacacatgagactcagagaattacaacaaaacagttttagtcwtgtaaactttgctataaagtgaagcatatttaggtatgaagcatgctgattaaactttttattgtcttaatacaagtctaaaaaaagtatctttttgggggagctggaaagtactaaaaataaaaacagtggctgaaattcattaagcatttactatgccaagcactgctctaagcacttcacagacactaacacatttaatccctaccaataccctgttgagaggttgagatacagagaatttaaattactgacccaaggtcatagacctagtaagtgttaggcctggagwcaaactcgatcctcctctggctcaggaatattgttccaggcctttgctctcacctggaagtttctaattagaaaatttatttcaagtcagaataaaatcttcagcagttctctcatctcaaaatgtctgaatttctgattatttacaaggctgcaaatcccttctagccacgctctaatgcaagtacttggatagtgaaataaacgataagtctctctaaatcacaggatattcagtttatttgattttagttcagcgattcttaaactgtcccatacatccaaaccatctgtagaagtttctaaacccaacataggcccagggacccaataccaaacttacaaatcttggagactaagatctcatatgtatatatattttaaagattcaagggtaattctgatgctgaatgtgtttgagaatcactgctgtatgctgcattctattttattgtatttcttttattattattattattawaataataataatacttttaagttctggggtacatgtgcagaacgtgcaggtttgttacctaggtatacagatgccatggtggtttgctgcactcatcaacttgtcatctacattaggtatttctcctaatgctatccctcccctagcctcctacaccctgacaggccccagtgtgtgatgttctcctcccagtgtccatgtgttctcactgttcaactcccacttatgagtgagaacatgtggtgtttggttttctgttcctgtgttaccttgccaagaatgatggtttccagcttcatccatgtccctgcaaaggacatgaactcatccttttttatggctgcatagtattccatggtgtatgtgtgtcacattttctttatccagtctatcattgatgggcattcggattggttccaagtctttgctattgtgaatagtgccacaataaacatacatgtgcatgtgtctttatagtagcatgatttataatcctttgagtatatacccagtaatgggatggctgggtcaaaagatatttctggttctagatccttgaggaatcaccacactgtcttccacaatggttgaactaatttacactcccaccaacagtgtaaaagtgttcctatttctctacatcctctcctgcatctgttgtttcctgactttttaatgatcgccattctaactggcataagatggtatctcactgtggttttgatttgcatttctctaatgaccagtgatgatgagcttttcttcgtatgtttgttggcagcataaatttcttcttttgagaagcatctgttcatacccttcgcccactttttgatggggttgttttttttcttgtaaacttgtttaggttccttgtagattctggatattagccttttgtcagatggatacgttgcaaaaaatttcacccattctgtcggttgcctgttcactctgatgttagtttcttttgctgtgcagaagctctttagtttaattagatcccatttgtcaattttggcttttgttgccattgcttttggtattttagtcatgaagtctttgccatgcctatgtcctgaatggtattgcctaggttttcttctagggtttttatggttttatgttttatgtttaagtctttaatccatcttgagttaatttttgtataacgtgtaaggaaggggtccagtttcagttttctgcaaatggctagccagttttcccgacaccatttattaaatagggaatcctttctgcattgcttgtttttgtcatgtttgtcaaagatcagatggttgtagatgtgtggcgttatttctgaggcctctgttctgttccattggtctatctatctgtttatgtaccagtaccatgatgttttggttactgtagccttgtagtatagtttgaagtcaggtagcatgatgcctccagcttgttcattttgcttaggattgtcttggctatacgggctgttttttggttccatatgaaatttaaagtagttttttctaattctatgaagaaagtcaatggtagcttgatggggatagcattggatctataaattactttgggcagtatggccattttcaygatattgattcttcctatccatgagaatggaatgttcttccatttgtttgtgtccyctcttatttcattgagcagtggtttgtagttctctttaaagaggtccttcacatcccttgtaagttgtattcctaggcattttattctctttgtagcaattgtgaatgggagttcactcatgacttggctgtttgtcattattggtgtataggaatgctcgtgatttttgcacattgattttgtatcctgagactttgctgaagttgcttatcagcttaaggagattttgggctgagatgatggggttttctaaatatacaatcatgtcatctgcaaacagagacaattkgacttcctctcttcctatttgaatatgctttatttctttctattgcctgattgccctggctagaacgtccaatactatgttgaataggagtggtgacagagggcatccttgttttgtgccggttttcaaatgaatgcttccagcttttgcccattcagtatgatattggctgtgggtttctcataaatagctcttattattttgagatatgttccatcaatacctagtttattgagagtttttagcatgaagggctgttgaattttatgaaaggccttttctgcatctattgaaataatcatgtggtttttgtcattggttctctttatgtgatggattatctttattgatttgcatatgttgaaccagccttgcatcccagggatgaagccaaattatcatggtagataagctttttgatgtgctgctggattcagtttaccagttttttattgaagatttttgcatcaatgttcatcagggatattggcctacaattttctttttttgctgtgtctctgccaggtttttgtatcaggatgatgccggactcataaaatgagttagggaggattccctccttttctattgattggaatagtttcagaaggaatggtaccagctcttctttgtacttctggtagaattcagctgtgaatacgtctggtcctgggctttttttggttggtaggctgttaattactgcctcgatttcagaacttattattggtctattcaggaatttgacttcttcctttagtcttaggagggtgtatgtgtccaggaatttattcatttcttctagattttctagtttatttgcatagaggtgtttatagtgttctctgatggtagattgtatttttgtgggatcagtggtgatatcctctttatcatcttttattgcgtctatttgattcttctctcttttcttctttatcaatctggctagcattctatctattttgttaatcttttcaaaaaaccagcttctggattcactgatttttttgaagggttttttgtgtctctaatctccttcagttctgctctgatcttagttatttcttgtcttctgctagcttttgaatgtgtttgctcttgcttctctagttcctttaattgtratgttagagtgttgattttagctctttcctgctttctcctgtgggcatttattgctatgaatttcccctaaacactgttttagctgtgtcccagagattctggtatgttgtatctttattctcattggtctcaaagaatgtatttatttctgccttctttttgttatttactcagtagtcattcaggagcaggttgttcagtttccactgtagttgtatggttttgagttagtttcttaatcctgagttctaatttaattgcactttggtctgagagactgtttgttatgatttccattcttttgcatttgctgaggagtgttttacttccaattatgtggtcaattttagaataagtgtgatgtggtgctgagaagaatgtatattctgttgatatggggtggagagttctgtagatgtctattagttccactgggtccagagctgagttcaaatcctgaatatgcttgttaattttctgtctcgttgacctaatattgacattggggtgttaaagtctcacactattattgtgtgggagtcttggtctctttgtgggtctctaagaacttgctttatgaatctgggtgctcctgtattgggtgcatatatgtttaggatagttagctcttcttgttgaattgatccctttatcattatgtaatggccttctttgtctcttttgatctttgttggyttaaagtctgttttatcagagactaggattgcaacccctgctttttttttgctttccatttgcttggtagatcttcctccatccctttattttcagcctatrtgtgtctttgcatgtgagatgggtctccagaacacagcacactgatgggtcttgactctttatccaatttgccagtctgtggtcttttaattggggcatttagcccatttatatttaaggttaatattgttatgtgtgaatttgatcctgtcattatgatgttagctggttattttgcccattagttgatgcagtttcttcatagtttcaatggtctttacaatttggtatgtttctgcagtggctggtaccggtttttcctttccttatttagtacttccttcaggagctcttgtaaggcatgcctggtggtgacaaaatctctcagcatttgctcgtctgtaaaggattttatttctacttcacttctgaagcttagttggctggatatgaaattctgggttgaaaatwcttttctttaagaatgttgaatattggcccccactctcttctggcttgtaggcttgtagggtttctgctgagagatccactgttagtctgatgggcttccctttttgggtaacccgacctttctctctcgctgcccttaactttttttcctgcatttcaaccttggtgaatctgacaattacatgtcttgggtttgctcttcttgaggggtatctttgtggtgttctctgtatttcctgaatttgaatgttggcttgtcttgctagtttggggaagttctcctggataatatcctaaggagtgttttccaacttggttccattgtccccgccactttcaggtacaccaatgaaatgtaggtttggtcttttcacatagtcccacatttcttggaggctttgttccttccttttcattctttttttctctaatcttgtcttcatgctttatttcattaaattgatcttcaatctctgatatcctttcctctgctttatcgattcagttattgaagcttgtgtatgcttcacagagttctcgtgctgtgtttttcagctccattaggtcatttatgttcttctctaaactagttattctagttrgcaattcctccaaccttttttcaaggttcttagcttctttgcattgggttagagcatgctcctttagcttggaggagtctgtttttacccactttctgaagcatacttctgtcaattcatcaaactcattctccatccagttttgttcccttgctggcaaagagttgtgctcccttggaggagaagaggcattctggtttttggaattttcagcctttttgtgctggattttcctcatccttgtggatttatctatgtttgatctttgatgttggcgacctttgtacggggttttcgtgtggacatcctttttgttgatgttgatgctattcctgtttgttagttttccttctaacagtcaggcccctctgctgcaggtctgctggaatttggtggaggtccactccagaccctgtttgcctgggtrtcaccagcagaagctgcagaacagcaaagactgctgcctgttccttcctctggaaggtttgtcccagaggggcacccaccagatgccagccagagctctcctgtatgaagtgtctgtcgacccctgctgggaggtgtctcccactcaggaatcacgagggtcagggacctgcttaagaaggcagtctgtcccttagcagagctcaagtgctgtgctgggagatccactgctctcttcacagccaacaggcaaagaacatttaagtctgctgaagctgggcccacagccaccccctctcccaggtgctctgtcccatgagatgggagttttatctataagcccctgactggggctgctgcctttctttcccagatgccctgcccagagagggagaatctagagaggcaatctggctacaggggctttgctgagctgtggtaggctccacccagttcaaacttcccagtggctttgtttacattgtgagaggaaaacagcctactcaagcctcagtaatggcggatgcccctcccccgaccaagctggagcatcccaggttgacttcaggcagctgtgctggcagtgagaatttcaaaccagcagatcttaccttgccgtgctccatgggggtgggatctgctgagctagatcacttggctgcctggccttcagcccctttccgggggagtgaatggttctgtctcactggaatttcaggtgccactggggtatgagaaaaaactcctgcagctaactgggtgtctgcccaaatggccacccagttttgtacttgaaacccagggccctggtggtgtaggcacccaagggaatctcctggtctgccggctgcaaagactgtaggaaatgtgtagtatctgggccagatagcactgtccctcatggcacagtccctcagggcttcccttggctaggggagggagttcccctgaccccttgcgcttcctgagtgaggcaatgccccaccctgctttggctcaccctccatgggctgcacccactgtctaaccagtcccaatgagatgagcccggtacctcagttggaaatgcagaaatcacccaccttctgcattgatctctctgggagctgcagactgcagctgttcctatttgccatctggccagccacctaatatttctaatcattcacttagcaagagtctcaggtttaagtaaaattataactaagttactaaggaacaatacatcaaaagtcatatattcatttttccctctaagagttttttcttttttaaaaaaattaaattaaaaaactccttggaaaaaacatttttaatcttcccattaccactttattccttggcacacagaagggtaccagtctctgctggagacaaaggtggacagtaggccagggtgacaatatcagcctgttcctgctccaggtctcacattaatgcatcaagggcaagatatggtttcttacttgaatactgcaggttttggttatagacagctggagtggtggtaaggggactaggttaggtgaagtcactgggctatcatccttgctctggttctacagctgtgcattttggattgctatttagcttctctaagctccagtttcctcctctgttatatagaaataatgtctgccaatcttttttatagagttatttgtaggatcaaatggaatgagatatgtgaatgcattttaaaaatgtatggaataccacacatttggacaagattattattgaagtgtgcaatcttgtctacatgacaagtgaaatcacgtaggaatcgtagtaacaacaaaccagctgaattttggtctcagtaccaatgcctactggggcactgcagtagagcaagttttcctaacacctcatggaacagtgacagtgaaggttctcctaggtttttatgtgagactgcctgaagagcaattacaggctctggaacaatagatgctactaagtttattttattttattattattttttattttactttaagttccgggatacatgtgcagaatgtgcaggtttgttacataggtaaatatgtgtcatggtggtttgctgcacctatcaacccatcacctaggtattaaggctcgcatgcattagctatttgtctgtttgtcctgacgcactctctcccttcccctgccccctgctccaggccccagtgtgtgtggttcccctccctgagtccatgtgttctctctgttcagctcccacttatgagtgagaacatgcagtgttaggttttctgttcctggctaccaagtttaagaaagtcattgtcagggatgtgaaaatcagaaaaataatctggtattttaggaaaagcacttaaaataaattgtattaatgacaccacattttaatgattaataaaatacttgataaggcaatcctgtattaatattcaaccatttatacatgattatttctaaacattatacaatgcaaaaaaattcacatgtttaaagaagtatctactttatcaggtaccatttgtgaatactctcaacaagcaggtgaatacaactctcaatgcaagtgaatatacacagaaatgggcagcaggatggtcatttgcctgtctgtcttgcttgggagtaaaagagaaggctaggaacatggctgtaggtttggtactagaagaaaagtgggacctattccgacttcctgatcctgtgatttttttctttttttgagattcacacacacacacacacacaaactatgcacaagtttgcttccatgttgtatagcaagagtttaaatatttctgagttaatgatgccaaactgtgctccgattatatcagcatatttacatgatccttgaacaccacatatagattcctatactacacatttaagcaaaatcacctcctgacttcacaatgaaagagacctattggattaaaaagtggtttctagtaaaccccaaagagatactgttactaaattactaaatttaaaggcaaaatagtattcactaaactgatttttctgtcttattttccttatttggcataatcattaaccaacttctagtaaatggaagcattctcacaatttaagtttttttagggggaaacacacaatttrtaaatactgtcaagtgaagaacagattcctgaatactaaaagacccatgcatatccttgtatgtaaaaaaaaaaaaaatccatcataaaatcatagactcaaacaccatctttgattcagtagttctccctctactgtggcttctgctatagagtcattgttaaaaagagttcttcatgaaagattctcacatagcaaaatgctttaagaaaatgtctaacaaacatttttattgtctcaatttgtacacaaactgacacctgaaaatcagagaggataaagaacttcaatctttaaaaaagagaggtaagttattccaaaatgctaccagtcaataattaaaaatacagtttgggggcaagaagttctgaaataactcagagaacttgctcaagattttacttttggaccagtcctctttgggagggagtatgtgaataggtaatgaaagccttatatgagagagtcaatggagagccatatcaaggagcacctgaagatatatggatcaatacagggaaaagaaatccaagtagcccagtgcctgacactcactgggcactcaattaatgcacggtgaattaacaaatgaattaatgaaagaaccatttgctacatataacattcttactttaagaaaaaagaatttgaaacagaagaaaacatacacgcaagaacacatacaaactataaactatatgatatcctaaaggagatgtaaatattaaactgtttgctttgctgactgacactattaatacctaaaagcagtatgagagatcacaaagaataagtactcattcatacttggagtgggctgctcatcttatggtctaacttgcattttatgtcatggccatgttgcttaatctccagctgttctacagaagagcaaaataagttataaataaattattaaagaaaaaaagtaactctatccatgctgaggcctgagggagttgggggaggagtcaattccttttagtttatatttaaaaagagaaactctttggaaaactgtaatatctgaagattttgtggtttccaaaagtgaaggtgaacggtgagaagttttcttagtttagctactgaaccctaaaaaaatataacctcaaaagttaatttcttaagcaatttgggcacctgaatttgataagaacttttttttccagacattctgttctgtctaacccaaaggaaaaatagccaattttgagaatctgtatacaaataaggaaaagtaaaatacagcgctttgcaaagaaatgggagggatttctgatactcaattcatgatgctaaacacttcaagtagatgattcaaaggcagaaatatataactgttctcattaggattgtttatggactataaataaggagcagacttatggccaatgcattagaaaaaaacaagtacaaaggcacttcagaaaataccttactccaacctcccattttagtgtcatttctaaaagggtttcatttcagccttcctacctttcttccttccttcccttccttccctccaacggggtctcactctgtcacccaggctgaagagcagtgggacaatcacggctcactgcagccccaacctcctgggctcaaacgatcctactgcctcagcctcccaagtagctgggactacaagtgcctgtcaccaggcttggataattttttttgtcttttgtaaagatggggtcttgctatgttgtccagactcgtaatgatctcctgggctcaagtgatcctcccacctcagcctcccagagtgctgggattacaggcatgagccaccacaccagacctcttttttctttattatatattcctctaataaagtgctctgtatgcagtgagcattcaatatttgctaaattaaattaatggaaagttttctaactaccatgtagagtatctaaatttacatcattggttctagaactgctgtctgaagcaacacaaattacacttatgacagttcgtcaaatctttgaagcccatcctcaaaataaggatgtcaaaaatacatcacacatgttgacactctaatctcccagccacagtaggcattagcaatctgaatgttatttttactaatccttcacagttttagaattcttctcaacccaacattcaaaaaccacttgccattccagcctaagttttcttgtccctaagtcatgcattccaagtcccctcaaccattgctcacatgcaatgctttcaaattccctatgcatcctggtcacagtgatttgaatgtacactaatttatcgatgatgtacctaaaacaacttatttcatttccttgaactgatgataatattctagatacagtctatttaaaaagtgaagaattattagcttctccatttcagtattatatttctagcagtgcagcccaaaatttcagtagctatgataacagcctcttgtcacaccactggcttatactgaacttgcagttaatttaaaacattcaagcttcctttctacaatctgctgataagtcatcccctaaaaccgtgcccgcaactctctattctctcctaaattgatttttttgtacttaatcatagtattttacatttaagtaaatgtaaatgatccagattctatcattcaacagaatgtctgcaatatctgctggctttatgtttcatatgataagcatatcgtctgtgccttcagacacattatcagccaacatgtcggtgctggatgtattttcccaatgttgcataagaggaataccttcgagagtttggcctaggaatgtggcctgggactccgccaagcatctctctccagcaaaatgactgcaaatttctcgaccttcagattctacatgatgtaaaagaagtttgtctgtgtttaaaaacacattcaagaaataagtgaacatgtgaaaagacagaaaaacttgttttaatttgggcatagtttcagttttcaaaggcacatgaaggcagaaagaaagaatcacaaaatggaactactgatgatagcaactccaaaaccaagactgattagactaaatcccatgtggcaaaaattttatttagtaagtttccttctccctctctccctttagatatatgtgcatacacacacacgcacctttattttagtaattttttttttctgaaaaagaaagttttctgcacctgattgcttccatgaataacacaaagcacaaacaatatgactttctttggttatcatgcaattttttctctgcttaccagaaattggcacaaatttaagatatactatattctactccctgaagcacagtcgctggcatctccactggcatttaaaaatttgaagacatttaaaagaaaatccacaagcttatagttgctgtctaaatcaactttaacatttcatatattcacaatttcataagtgaatcaaattacacataagaaattatagaactaagccaactaaatgacttttataataggtactggggaaaaatattattaaaccttttcctccaatttctgcctttcttccagcaagacaaaccattttcatgaagtttctgtctacatcactagtgataatctgaagcagccattaatcaatctattagtgcattcagcaacatttatcaaagtgcctccccagaactgttttggatgctgttgtgggcgcatgcaaaaatgaactaaatatagatttttgtcatccaagaattttaagtcaatttgtaattattggttcctggttccataacttttttttttttttttttggtgctggctcagatgtataccttcatctattctaaggttaaggcaatccttataattttcttcctttttcttgtttgtttgttttttgtgtgtgtgtttaaaatcttgcttatatttgactttattttattctcacatcttctgagtacattaaagttaaaggtagatcataaatcgaaaacattcttaaaggtctctctactcaaattatttggtgttattgtatctcagaaagtataatgaattgcctgtagcaaataaataaaatcagaacctttatactcaatggttcggtttggtacatatccatgaaaataataaatgttaaaaaggatgctagccgttgattcctggcatgctattctacatttggctacattacaacgttaaaaggatttagtgcatatatcaaattgtggatctgcttgttttaaaatttcatctgtaattccacatgcaacccccacccccatacacactcacaagatctgaatatggtaacaaggaaatcctagtaactgtagcgttggaaaaatggttcatatggaaataagccatttggctagtaaagctggtgattttgttctctaggtggcactattacttcaatttttggtgagttgcttaaattacttggaactgcccgtttattttctttgaattcccattttataaattttaattttatacaagctagttgtaattaaacgacaggttgccttctaggttttatttcagtaagtcaatttgaagttcagtgattttttatcatataattttatgtttccttactatactgtcttagttttaagaaatcctcccttgcctgacctcctctctccaaaaatgcagaggcatgtcaaaaacacagagggtcgtcataaagtttccgtcagaccaaaggaaccaagatgaaagcatgtttaagagctactaggttctgggagatttcaaaatcaggacattactaccatgacaaccaatgaaaagttctttcaagtgaacctttggggaaaactatataacgttccttactctctaggctctctggaaataaacttttactttattatggctgtcactaaagcttgtaaatttactttgcttccttccaatcgttctcctgtcccacactcagccccctaactcacttaatgcaacccatcctcaaacatcaatctataaatgagacatcagggcaatgagccacttcttagcatctagtatatttgataagatttgtctcatcaagaggataagtgccctagagcttctacttgaacttaaatacttaatttaaatgaaagcttccacacttatctgaccagatactcaaatttttctacagaaaagagaataccttcctgttccacttaaagaacacacacatttaccactccccctcctctcccctgcaaaaggttttcaatgtcagtacattagtgagctccattttgcatctgccatcaataatgattccatatagtcaataattgggttcatgacctttctaaatctttacagtgtaaatattctggaaatccagtgaggcacttaagtataaaattatttaggattaartaattctatgccttaagtagaagtttaagaggacgtttaggacacacatgactaagcctacaaataccaaagccactctatgtttcctaggtttaaataccacatgcaaataacatacggatttcatttgccagcatcatttattgcctaacattactccatactaaacagagtaaatggatgcagagtgtaaccagtaagtttgctcattcacttttgaagctcatctgtgcatgttattcatcctaataaagaaaatttatcacaacacaacttgatgcgattcttgttcaaatgatttcctcttccattgaacaacagccagcacttaaaacctagaattccacagaattctctcctcgattcctctttaaaatgcaattcacagtttgagatcacagagcctgccagtggctgaatggctgcactagatggctgagagtccttcaattaagcaacaattttgcaattagtggaaactgagtgctctataacaattgtttgaaaacaagttgagacaagttagcaattaccctataaaagggacatattcacttttgttggataggcgagacccctcacacaaattgaactcttccacacagggagatgcaagttgaaaattaatgttttaatcactaaaatcaaatccatattatgggcacctgaaatgggagtgcctttcttctcaaaagatattcagagtttagctatcatccactctctatgctgtctgtttttattcaggaagtctgaaattgttcttctgtactccgggattaatttcctacatctcaaaatgttaataaactacttgaacatgacctttccattctgtaaatttccttaagagtaagtctacgattgagacccaaagctgctggctgtgttatatttcacagttcacagttctctctctctctctctccccctctacacacacgcgcacgtgcacgcacacacacacacacasasagagagagagagagagagagagagagagagagagagagcaccccaggttttagaagatgaatgtaaaaagaatgtaaacaagttctctgctatactatcaggtgggcgtgcccagctcactgtgcgtgctgaactacaaaccagtgctattcatataagaaatgatatcaatcatctacattttgactattgaaaagctgggactcttaaagattccaggaaaaagggaatagcttacattttcatggcgccccttttaaacaggaaacccacggactttgagccaggattttagaaatttgcatttctttttttacaggattttccctcctggtgagtcaaaatgaacaagaaataccccaggacctcccttccctccttggccattaatgagatgaaggcaattaactcacatagtataaatgaatcatttgaggtgatgactgcattttaggcaaatgatgactttcttggttccattggtttgcaagtaaaagttacacacattgaaaagacactgaaacagatttcctaaatgcttcattttctggatgcaccaatgttgacctactatacatgttaaatggttttaaaatatcaccttaaaataaaggaaacttccagctactaactcagctctgaatgggctatgaaaggctccaaaggtatgtgaaaaattactgttattttgctttaaaaaatgtgatgtctaagagtgtctgcaatgttctaatgcttcaaaacatgtacgtaagccttgtttatctggaaatcatttctttctgcttatatcatttataaatagaaaatgttctgtaataacttaaaatagttccacatacataatgcttttmgtgtcataatacttactactggtctatatttaccaacatttatcacattttacaaaatgaagtagaagaaaaaaaagacaacgactttatggccctggaattccagtaatggtgaccaacatgttttaaattccagtaaaggttatggttacatttcaacaagtgtctctttcctttctcttacctctcctgctaacccagaggtaaatttaccaaaaaaaaaaaaaaaaaaaaaaaaaaaaaaaagtcttaagcaaggcatttgcaaaatcagaaaacaggaacaggagtttagtgattgtttttaaaaggtgctgttcccagggtcaaaactttgtggtgtaatttcaacatgctatgttacctattatgtgtaatgccttgaaacgctacatgccataacatcagaaatctccaacctaaaaattatgttgcatgagataagcattgaaggcacacacgttcatacaaattaaatctgtaattatgcctcaataagttaaaatgtaaagacatatcaaattgtaagaccaaaatggcttttgaccttacaacaaactcatataaaaatagatttttcgataataataaaggggagagagagattttgcaggatattgagccagtagggaggggtctcatttaatatcatgtcgccttttatatgcagttagaaaatcaacgttcccaattacatattactttgctttaaaagattactaggaggattaataaacactcagaaatatgcctttctttgcttctggccaagaacattcctgcgtgcttgtcggaaaatgttctttggttgctactgacattaaggagtaagtgcaggataactagaggaccctaaaataagatccaagaagccctaacacaccgccaatcgaggcttatcaaagctcccccagcgcgaggaaaacttgcatagaagccaaacaagaacgaggagtcaaaatccaccgacgacgagtcgcacgccccaccgagctggagtcagcagcaccattcaacaagtccctcctaccagctctctaagggatcccgcaaaaccttcctttaccacttccccacccccagcctcccgcccccagtagctgctcttggcagcatggccggcagagggcaccctctaccttccctagcttcgttctctgggtcccctcctcctcctcgcctcccctccaccccggtccctcatccccgctctacccccaacacacaaacactgcatcctccagttcaccctcgcagccccgaggcttcttccttagggatgcccctagtctgtaatctccccttcttcttgcccgtcaggcacagagcccccaatcctcagctatttctttccaggagtaactcactcacccattcctcttcccggctctgcatccccagagactaacccgagtcaagaatcccccacgtacatcccaaccactccccgaaagtcaaaactcttaacttccctggagggcgcttcagaagaggggcgcaggatgggtagagatgtgggttcggcctgcccgagagtgtcgcagaccctttcagttcccagcggtaggaattccgcctcccaagttttccaagctacattggcttcggacttgtaagtccacttcagtctcaattcctggggagcaggtagccgtgtgcagctccggggaagggatgcgggctgaaggcgcaagcttccctcccactccccccgcaagtcggcgcggggaccacccaccccctggaaggattcctagcctagccccagcaccctcccctcagtcaggaccctcgacagctctggccccctaagtctctctcgactactcctgggctgggggagggctgcgagggatccccgggtcgccgtctttgctcccatcacgcagctctgggtctcctccaggccttccctcctctacttcgtgacttccccgggtccctttttccctggtggtgccggctgaccttctgggttgtgggatgggggagaaaactccccaagagtaactccaaatcgtcccttctaccggaggggaggaaagaaggagactggcctcgtcccacaactttggggtgggggatcccccagtcaactctctcccgcggacgggcagctcctgcaccaagccccattcccagcgcttgcctacctcggggtccacacaaacctcacgggtccccggcggcggagtcacatcgtggttccgattctggctccagcgcccagccccggtccccgtcgcggtgctgctccccgccggccccacagcagcggtgggtgtctcattaaagccccccgagcaggaggtggaggggcgcaccgggctggctcctctgtccggcccgggagcccgaggcgctacggggtgcgcgggacagcgagcgggcgggtgcgcccgggcgcggcggcggcagcggcggggacccggagctccaggctgcgccttgcgcccgggtcagacattatttagctcttcggttgagcttcgattggtcaaacggcgccgcccccccccccgccccccgccccccgctccccgctcgcccgcgctaccgatacccgttcgaggcggccgcttaaagggaacgccgcgtcttttcctcgcgcggggaaccgaggggcgcccggaactccccgctcccccggggcctgtcctcacctcctcccctagggccccgcgacatcgccctgcgagtcctgcgccctcctggggcgccttggacaggacgcccgcggcttcgaggggtgttccagccccagcctcagccccggggaaccccgcgtcccgcgccctctgcagaaaccccggctgtgggcgctggggcgggagggagcgagtgagaatcgcacgccccgaggtctcgctcccctagctttcaactctccccttcctccccatcccagcacccaagttctctgggagagggcgtgcgtttcccgggccacagacacaccttcccgcaccttcctgcactacggagcttgcgaacgcgagcacacaatgaaatcgcacagagcatgggggctattggtttactctgctgccttaaacacgccggcttaaacagagttcgcgcactgacctctctagagtttgcctaataggaattcaatcaagataataacagcattttttattgatgaacgcccccagataacgttacaccaagttacttgttccagccaggaagcccaggcaatgacagacctcgctaaagccacacgctttctagccgaccaaacagaaaaacggaaagagaaagaaagaaaacaaacccaccttttcagtcactacttgtcaaagtaaccatcaaggcagctgctccgggaaagacttcggccccaaaactcccacactctattattttttcacgttcccttcgcttaattaaaggggggagggggcgcgagtctttggtgcccggtatgtactccttctgttctgcagcaaagaagttaaattattgatagtggaaattgcatggcggaggtaatactcgcaccccatcagcgagaagctccatttgatctcggcagaggcagggagatttcatgctagttcgccggggggagcggcagcgagagcagccctctccgcggtgaatgggaaagtgggtgggagtccacgagagggctccacggtgccttgacgtgcgctgtcatatgatacctccgctgcctcgaaatagacactctagtgcacgaattaccagaatcaaaattcagcgcatttaaaatgatacatcttttattagaagagttccgttccagggcattgcatgcttttgcagatgttttcacttccagccccagcaaacacacgtataagctaacccttttaataacgaaccagggcagccaagataaataaaaagtcttctgctttaaccagagtgggggtaggtgattcgagggtgggggcagaactggctcagttaatcctcccccgccctccacccccaccactgcccgcagcaaaagagcaaatagcctttcgggttctcatttgcctgtagccaagacccttgaagagaacttatatggctagggtccagaggacattttcaattatccatttgatgaactctgtcaaccgtctacctgtgtttctgctttaaagctgaattttcttctcattagttcaaccaatttgtgcagaccttaaaatttagaataaagaataagacagcagtaccgtacttaacttggagtccctggacctcctcggagcataaaaatcacctgggtgagtgttaaaatgaaggtccctcctcctgaaattgtgatttagtaggggtggggcagggcccaggagttataattttaataaataccacaagcaattcgaatgcagacaatctgaagtcacactttgagaaacactctcttgggggtacaacactgggtatcagaggaatctcccaccaagcccacacccaaattctgcaggcagctttctgtgtgtgtgcgtttttctgtaatctcaaaggggtttgacctaataattgcgaagactattgctgtaagaatttccctaaagactccaacattaattttgctaaagggaaagatttataaacagtttcctttcctggaccctcttgtggttaccaagaatgtgctgttgaactgaatatataatattattacatactcagttcaatttacctaagggtttacagttagcaaaatgaattcactaacattagctattttagaacttctaaagactagtgacagaaattatttacccgttttataaaagaagaatccgatcctctgccaggaaataatttacccacgttcacacagtgaagtaccagggacaagacttcagtgaactcaagaattcctgctagaaataaccctgcttccatctcccccaccccctaagtgaagctatctgttccttggaagtgttatcagaatgtgtgatcattcagagcgcctttgcaaattgttggactaaatagtcaaattattcaaatatatgcatattcttcgagtgtcacacatttagctttgcacctctgtcaacttgacagagcacatgaccaatacaaactaccctacagcacagatggcagagtttattgtggaatatttaatgtatgtgaaatacgcaggctaaccagaaagcaataaaggacagagggcatgaagctggataccgctaccccagagaccctctgcgttggttcccaggttgtaagatgaatgcaggcacaatttcttttagtagcacaatacaatttaaaaggctagtgttatacatttaaaaaaaatacttgtactacattataaaggactggaggaaccctactccaaactttaactttgttaacttcaaactgatgcttcacatttgcttgaaaatgagttctaccctcaggtttttaagctcaattgtaatttatttccttcctgaaaaaatacctggcaagttaatgccaggaatctaagctagcattctgaaggctgctcacttagaagttatggcaaatcttttttctgctaaattcacattggcacgtcagcatttctgctgaagg

SEQ ID NO: 5655 - DNA, 13502 bp, Homo sapiens
  misc_feature (1)...(13502): n = A,T,C or G, or insertion/deletion polymorphism (see Tables 1-2)
gagccactgctcctggcctgagtctagcattctttatctttaagcttagaaagttgggactagatttcttgtattcatttacatgtgaagctctgagtctgtcattcttttcttcaaaaaaaaaattatcttcttcctagatcaacaccaaccagatattattcccgctatttttttttttttttttttttttttgagacagagtttcgctcttgttgcccaggctggagttcaatagtgcaattttggctcactgcaacctcccctcccgggttaaagcgattctcctgccttagnnnnnnnnnnnnnnnnnnnnnnnnnnnnnnnnnnnnnnnnnnnnnnnnnnnncttgaactcccgacctcaagtgatccatccacctcagcctcccaaagtgctgggattacaggtgtgagccactgtgcccagcccagctttttgtatttttattacagatgggggtttctccatgttgggcaggctggtctcgaactcctgacctagggtgatccgccagcctctgcctcccaaagtgctgggattacaggcatgagccaccgcgccggccaataactgtacattttaaactaaagagtgtagcctgggcacggtggctcatgcctataatcctagcactttgggaggcttacatgggtggatcacctgaggtcaggagttcgagaccagcctggccaacatggtgaaaccctgtctctaccagaaatataaaaaattagccagatgtggtggcaagtgcctgtaatcccagctacttgggagcctgaggcaggagaatgcgcttgaacccggggggctgaggttgcagtgagccgagatggtgccacttcattgcagcctaggtgacagagcgagactttgtctccaaataaataaataaaatagtataattggtttgtttgagggaatggataccccattcttcatgatgtgcttatttcacattgcatgtcagtatcaaaacatttcatgtaccccataaatgtatacacttatgtacccacaaaaataaaaactaatcaatagaaaaaagaatgcaggatgaagtcaagggacaaagaaatgaagatgtattcttatgctgatcacatttctctgtgggggtcttcaaactacttgctggaagtcagggtgtgaaaaacatctgaagttatttatttattttgtagacagagtttcactctgtcactcaggctggagttcagtggcacaatcttggctcactgcaaccttcacctcctggattcaagggattctggtgcctcagcctgccgagtagctgtgattacaggcatgtgccaccacgcctggctaatttttgtatttttagtagagaccaggatttcaccattttggctaggctggtcttgaactcctgacctcaggtgatctgccccgcctgggcctcccaaagtgctgggcttatgggagtgagccattgcttaaggtgttaagtgattctttttttagatggagttttgctcttgttgcccaggctgtagtgcaatggcgccatctaggctcactgaaacctcagcctcccaattagtcgggattacaggcacctgccaccatgcccggctaattttgtatttttagtagagagggggggtttcgtcatgttggtcaggctggtctcgaactcctgacctcaggtgatccacccgcctcggcctcccaaagtgctgggataacaggcgtgagccgctgcgcctagcaagtgacttgttgttgtttttgagatggagtttcactcttgttgcccagactgaagtatagtggcacaatctcggttcactacaacttctgcctcctgggttcaagtgattctcctgcctcagcctcccaagtagctgggattacacaggcatgtgccaccacaccttgctaaatgttcgtatttagtagagatggggtttcaccatgttggtcagggtggtctcaatctcctgacctcgtgatccgcttgcctcagcttctcaaagtgctggaattacaggcatgagccactgtgcccagcctacaagtgattcttaaacaaaagtcttatgattccaatgtcagagaacgtgcctataggaacaaaggggatgcaaatcaattcttttatttatttctttttttctttgaatttccttcctcatgttaaagcaaatcaattcttaaacagtcttacaaccctaacttcagaaatcctatctataggaataatgggaatgcaaatggtcagtacctggtgctacctgacttttagcaacaaggaagtgggccaaagtacagcctgattaatacttagttatgactacatatcagtccagaaccctacatgcaattcttgtcaatcctgtgggggtggtttcatatatatatgtgtgtgtgtatatatatgtgtatatatatatttatatatataatcctttaatatgttgttggattaaatttactaatattttgtaaataatttttgagtatgagggatattagcatattatataatttatgagggatattggcatattattttatttatttaattttgtaatatatttgtctagtttgtggttattatggccacataaaacaaattgagtagccaggtgcagtggctcacgtgtgtaatcctagccctttggaagaccgaggtgagcccaggagttttagactcctgcttgagcccaggagttttagaccagcctgggcaacatggcaagacctagtctctacaaaaaaatttaaaaaattagccaggcctggtggtgcacgtctgtggtcccagcttctcaggaggttgaggcaggatgatggcttgagcccaggaggtcaaggctccagtgagctgtgttcacactactgcaccctaccttgggcaagataatgagattctgtttcaagaaaagaaaaaacagctgggtgcggtggctcatgcctgtaatcccagcactttggaaggccgaggcaggtggatcacctgaggtcaggagttcaagaccagcctggccaacatggtgaaaccccatttctattaaaaatacaaaaaaattagccggtcgtggtggcaggcacctgtaatcccagctacttgggaggctgagtcaggagaatcgcttgaacccgggaggcagaggttgcggtgagcctagattgcgccattgcactccagcctgggcaacaagagcaaaactccatctaaaaaaaacaaaacaaaaaagaaagaaagaacaaaaaacaaattggggttgagctcagtggctcactcttgtaatcccagcactttgggaggtcaagacaggaggatcacttgagcttaggagtttgagaccagtctgggcaacagacggagaccccatctctaaaaatgaggagttgttcttttctcctctttttttgaaagagtttatatatgattgatgttatttatttcctgaatatttaaaaattttcagcactgaaactggggtttcttcatggaaatatttttttcttttttgagacagggttttgttttgttttgtttgttttgagacagagtttcactcttgtcactcaggctggagggcaatggcacaatctcagctcactacaacctctacctcccaggctcaatctattctactgccttagccccccaagtagctaagtaccaaggaccacaggtacccactgccacgcccggttaatttttgtattttctgtagagatggggtgtcaccatgttgcccaggctggtcttgaacccctgggctcaagccattgacccactttggccacccaaagtgctgggattacaggcgtgagcctctgtgcctggcctctttatttatttttaataatgtcaatactcttaaaatataaaagctgccctctccctctccctctccctctccctctccctcctctccctctccccacggtctccctctccctctctttccacggtctccctctgatgccgagctgaagctggactgtactgctgccatcttggctcactgcaacctccctgcctgattctcctgcctcagcctgccgagtgcctgcaattgcaggcgcgtgccgccacgcctgactggttttcgtatttttttggtggagacggggtttcgctgtgttggccgggctggcctccagctcctaaccgctagtgatccgccagcctcggcctccggaggtgccaggattgcagacggtgtctggttcactcagtgctcaatggtgcccaggctggagtgcagtggcgtgatctcggctcgctacaacctccacctcccagccgcctgccttggcctcccaaagtgcccagagtgcagcctctgcccggccgccaccccatctaggaagtgaggagcgtctctgcctggccgcccatcgtctgggatgttaggagcccctctgcctggctgcccagtctggaaagtgaggagcgtctctgctcggctgccatcccatctaggaagtgaggagcgcctcttcccggccgccatcccatctaggaagtgaggagcgtctctgcccggccggccatcgtctgagatgtggggagtgcctttgccccgccgccccgtctgggatgtgaggagcgcctctgcccagccgccccatctgagaagggaggagaccctccgcctggcaaccgccccatctgagaagtgaggagaccctccacccggcagccgccccgtctgagaagtgaggagcccctctgcccggcagccaccccgtctgggaagtgaggagcgtctctgcccggcagctgccccgtccgggagggaggtgggggtcagcccccgcccggccagccgccccgtccgggagggaggtgggggrgtcagccccccgcccggccagccgcctcgtccgggaggttaggggcgcctctgcccggccgcccctactgggaagtgaggagcccctctgcccggccaccaccccatctgggaggtgtgcccaacagctcattgagaacgggccatgatgacaatggtggttttgtggaatagaaagctgggaaaggtggggaaaagattgagaaatcagatggttgccgtgtctgtgtggaaagaagtagacatgggagacttttcattttgttctgtactaagaaaaattcttctgccttgggatcctgttgatctgtgaccttacccccgaaccctgtgctctctgaaacatgtgctgtgtccactcagggttaaatggattaagggcagtgcaagatgtgttttgttaaacagatgcttgaaggcagcatgctcattaagagtcatcaccactccctaatctcaagtacccagggacacaaacactgtggaaggcctcagggtcctctgcctaggaaaaccagagacctttgttcacttgtttatctgctgaccttccctccgctattgtcctatgaccctgccaaatccctctctgtgagaaacacccaagaatgatyaataaaaataaaaattaaaaaaatatatatataaaagctgaatttagatagaagttatgctatcacatgaaatgacaggagctagggttctttttttttttttttgaaacagggtctcgctctgccacccagcctgcagtgcagtggcacaatcacagcttattgcagcctaaacttcccaggctcaagtgatcctcccaccttatccaccttaccctcccaagtagctggaactacacaggcaccaccatacccagctaatttttcttctttctttcttttttttcttttcttttcttttttttttttttttgagacacagggtctccttatgttgtgtggcctggtctcaaacctctgggttcaagcactcctcccacctcagcctcccatcgtgctggaattacaggcatgagtcatcacactcggcctagggttcttatttttgggtaaaatgccttcacagcacttcctattatcagttttaaagatcagactcttcctccatgcctcgccgctcttcggttctactctgtccactgccatggcccaagctgacatcgtgctratcrgattggcagtcatgggccagaacttaattctgaccrtgaaagaccatggctttgtggtctgtgcttttaataggactgtctccgaagtggaygatttcttggccaatgaggcaaagggaaccaaagtggtgggtgcccagtccctgaaagagatggtctccaagctgaagaagccccagcggatcatcctcctggtgaaggctgggcaagctgtggattatttcatcaaaaaactgataccattgttggacattggtgacatcatcattgatggaggaaattctgaatatagggacaccacaagacggtgccaagacctcaaggccaagggaattttatttgtggggagcggagtcagtgrtggagaggaaggggcctggtatggctcattgctcacgccaggagggaacaaagaagcatggccccacatcaagaccatcttccaaggtgttgctgcaaaagtaggaaccctrctgtgactgagtgggagatgagggagcaggccrctttgtgaagatggygcacaacaggatagagtrtggggacatgcagctgatctgtgaggcataccacctgatgaaagacgtgctgggcatggcacaggacaagatggcccaggcctttgaggattggaataagacagagctagactcattcctgattgaaatcasagccaatattctcaagttccaaggygctratggcaaacacttgctgccaaagatcagggacagtgcagggcagaagggcatggggaagtggaccaccatctctgccctggagtacggcataccygtcaccctcattggagaagccgtctttgcttggtgcctgtcatctctgaaggatgggagaattcaagctagcaaaaagctgaagggtccccaaaagttccagtttgatggtgataagaaatcattcctggaggatattcagaatgtccctstatgcttccaagatcatctcttatgctcaaggctttatgctgctaaggcagggagccaccgagtttggctggaccctcaattatggtgayattgccctgatgtggagagggggctgcattattagaagtgtattcctaggaaagataaaggatgcrtttgatcgaaacccagaacctcagaacctcctactggacgacttcttaagtcagctgttgaaaaccgctaggactcttggtggtgggcagtcagcactggggtccaggctggcattcccatgccctgttttgtcactgccctctccttctatgacaagtacagacacgagatgcttccagccaacctcatccaggctcagcgggattcctytggggctcacacctatgaactcttggccaaaccagggcagtttatccacaccaactggacaggccacggtggcagtgtatcatcctcgtcatacaatgcctgatgatgatgatgctgctcctgtcaccctccacgattccacagaccaggacattccatgagcctcatggcactgccagctggccctttttttttttgagacggagtctcactctgtcgcccaggctggagtacagtggcgcgatcttggctcactgcaagctccgcctcccgggttcatgccattctcctgcctcagcctcccgagtagctgggagtacaggcgcccgccaccacacccagctaattttttgtatttttagtagagacggggtttcaccatgttagccaggatggtctcgatctcctgacatcatgatcctcccgcctcggtctcccaaagttctgggattacaggcatgagccacccctggcccagatctttttaaaaagtgttgtaagagactccagaggaaggcacacagtttatttgtaaagtagctctgtaagagctgctgtgccctctgcccttgcctcttgggactgaccaggagctgttcatgtgtgtgagagtgggaaccacctccttgcagcagtggcttccgcatgccccatgtgctggtgtggttcccatcacgcagacgggaagggtctttgtgcactctgatcaattggaacctctgtatcatgcggctgaattccctttttcctttactcaataaaagctacatcagactgataataaagaaagaaagaaagatcaacagtgattctccctgggtagccaattgaggtagtttggataatttagttctttctttatccacttttattgctgatcctctagtttcaaaaataagtaaatttaaaaataaaacaaaaaaggccaggtgtggtggctcacacctgtartcccagcactttgggagaccaaggtgggcggatcacttgaggtcaggagtttcagaccagcctggccaacatggtgaaaccctgtctctactaaaaaacacaaaaattagcctggacgtggtggctcacgcctgtaatcccggcactttgggaggccaacatggacagaacacaaggtcaggagttcgagaccagcctggccaatatggtgaaaccccatgtctactaaaaatacaaaaattagctggacgtgtggcgggcacctgtagtcccagctacttgggaggctgaggcaggagaatcacttgaacctgggatgcggaggttgcaagtgagccgagattgcaccactgcactccaggctgggcaacagattgagtctccgtctcaaaaaaataaggccaggcgtggtggttcacacctgtaatcccagcactttaggaggccaaggcggggggatcacccgagattgggagtttgagaccagcctgaccaacatggagaaaccccatctactgaaaatacaaaattagccaggagtggtggcacatgcctgtaatcccagctacttgggaggctgaggcaggagaattgcttgaacccaggaggcagaggttgcagtgagctgagattgcacgattgcactccagcctgggcaacaagagcaaaactctgtctcaaaaaaaaaaaaaaaaattaaccaggcatggtggcacatgcctgtaatcccagcttactctcaggaggctgaggcaggagaattgcttgaacccaggaggcagaggttgcagtgagctgagatggcaccactgcactgcagcctgggggacagcgagacttccactcaaaaacaaacaaacaaacaaacaaacaaaaaaccaatttagtcatagttattggacagttcaggccaaaacaggtcatttggcttgaattacatggtttccttttcccagtttaattattctaccttgcctgggtgtggatcctatcttaaagttgctggcacggaaaagcaaatgagaggtaaaatgactcaattcactaagataaattcaccttggactttaactcactgtattagtccgttctcacgctgctaataaagacataccctagactgggtaatctataaaggaaagaagtttaattgactcacagttccacagggctggggaggcctcaggaaacttaaaatcgtggtggaaggggaagcaaacatttccttctgtacatggcagcagaaaggagaagaagaagaaggaagccacttataaaaccatcagatctcacgagaactgactatcatgagaacaggatgggggaaaccatccccatgggtcatttatctccaccttgtccctcccacacatgtggcaatgatgcaaactctaattcaagatgatatttgggttggaacacatccaaaccatatcaatcactttccatttaaaactatgtttataaagacaccaaagggaacaaaagtattaataatatatgtaacccaaaataagctctgggtatttatttacttttgcttgaagattatggtttacctgtgtaagcaatgctctagagataatcagactatcagaagacggaatccctatgccagtcttcctcattcattccctgggcaagtcccttaatctacatatatctaaattctctatttttttaaaaaaagatgatacatatctaaatattatatttacttttgtctattaattaaaattctgaaaacagaggcagacgtggcggccgcggctccgttggctctggtagctcccacctccccagcgctggcagcatacccacgccagcccggaggagcagaggatattgcaaaggatacagatgaagagatgcatagaccaggtatgggaggagtgcagagcttccatgccatacctaggcgccacccttcaagaaccttcatgtgttcagccatccagaagcttcctgaacctgtccttttatgtttgtctggaggattcattatggagacacgattgactaaatgattggccattggtgataaacttaacctttagtcccctcccgggactgatcctgcctttgcctttctggtgaccaaccccatcctgaagctgcctaggggctgccagccctcagtcaatcattcacaggcaaaaggcatcactgtggagattccaaggattttagtcttcatttctgtgtcgggcacagtgctaagtgctaggtgttcaatggtgatgaagcagatggaggttaccaaacttgtggaccagagcctcatgtaacaaacgtggacctcactgtagcctagtcatggcttccagctttttggatctgagcctccaaaggaggaaatgaccgttcagggttcttgctccagcttgattatggaaactgaaccttcactgggtgtgcacttaccaaggacaggaaagtttctctctttgaagggctttaaatttgtaacaaagaaaagtgatgactttatctatcagatagcagatgaaaaacattgtgaaaaattactcagaggcagaaatcaaagtccaggaggccacctccaatgacccatggggcccatccagctctctgatgaccgagattgcagacctgacctacaacatggtggccttctcggggatcatgagcatgatgtggaagcggctcaatgaccatagcaagaactggcagcatgtgtacaaggagctgctgctgctggactaccccatcaagacaggctccgagtgcatggcccagcagtgccgtgagatcatctttgccatccagaccctgaaggacttccagtacattgaccaagatggcaaggaccagggcatcaacgtgcatgagaagtcaaagcaactggtggccctcctcaaagatgaggaatgactgaaagctgagggggcccaggctctcaaaaccaaagagcacatggcccaggttgccactggcatgggcagcaaccagatcaccttgggcgaggctccagccagcccaacctctccaccagccactcggagcaggagtatggtaaggccaggtgtccccgggctcctaccatggctgtgagtaatggaagtgcttctcaccctttgccagagcagcagcaatgggtgacaggtgggatgggtgtccccaggcttagggagcggtggctcccgcagagcttgaatctatcctcggtactgagcctttggcagcccaggcaaattgtccttggtctggattgagtttggttataaagggacttttagccccttggctgctctggttcaggggtctctaaggccctttgctgctctgtgggtctcattctgtacatctgggcagaaggtgggcagaggcaggtcttgtctgcttcctcctcagagcgggtctggcagcaaagggttgtcctgctgcatatccaatgcggagttgactctggtagccaggaggaaacaaatgctttttcttgataatcttgtttcttttttttctgagacagagtctcaccctgttgcccaggctggagtgcaatggcacaatctcggctcactgcaaactctccctcccgggtttaaatgattctcctgcctcagccatccgagtagctgggattacaggcacccaccaccacgcccagctcttcttcgtatttttagtaaagacagggtttcaccatgttggctagggtggtcttgaactcctgacctcgtgatccacctgccttggcctcccaaagtgctgggattatagatgtgagccactgcacctggctgataatcttgtttgtttaatctcatattaaatgtctttccactgactgaaaaaagtaataaataaaaataaaataaaatactgaaaacagtaagaagcatactttctataaaggtctaaggttctaaaattctttttctgttcttcaaactctgtggtaagttaagaaaactggtgaggtgtggtggcttacacctgtaatcctagcactttgggaggccgaggcaggtggatcacctgaggcctggagttcgagaccagcctggccaacgtggtgaaacctcgtttctactaaaaatacaaaaattagctgggtgtggtggcatgcgcctataatcccagctacttgggaggctgaggcaggagaattgcttaacccaggaagcagagggtgcagtggagattgcaccattgcactccagcctgggcaacagggcaaaaactctgtctcaaaaaaaaaaagaagacttttgcttaattcttagaactccaagtagacatccttgaataatgatagctaccatttacagagtgtttacctaaatccaaccaatatcaaagtgttctacatgtattgattcattgaaacttcacaacaattctcagaggtaggtcttattattcacaaccgaggaaacaaaggcacaaaattaattgacttccctcagaaatcccctgtagtaagtggcagacttagaatttaaacagtatggcttgactccctactgttacttttttttttttagatagggtctcaccctgtctcccaggctggagtaccgtggcataattttagctcactgcagcctcgacattctgggctcacatgatgctcccacctcagccttccaagtagctgggaatacaggcacacaccaccacacccagctattgtattttttagtagagacagggttttgccatgttgcccaggctggtctcaaactcagggactcaagcaacctgcccacctcagcctttcagagtattgggattacaagtgtgagccacagcacctggccaactccatactcttatccattatatactatatcccttccgttgccacaatgcttcataatgtcataactggtattttggctgtatcctcaataaatacttgttaagtgggtctgaatataattcttaatatgtatttgagaaataatagagttgggattttcagagaaagaccttaagttgtaagactgttaatttgtggccattaatatatattcattgtgatatataatgagaatgctgtttctttggatatagttgaagagagctggccagcttttgcatgccctgataatctgaccttctcttgtccaaaaatacacaccttctttagcacattcctttatgtatgattttaaactccctctccattttcccactcttctatatgaatatttttgggccgggcgcagaggctcacgcctg

SEQ ID NO: 5656 - DNA, 29517 bp, Homo sapiens
gaactacgatggtgccattgcactccagcctgggcgacagagtctccgtctcttaaaaaaaattaatggaatcatcccaaaatgtaatcttgtgtccagcttctgttgctcaacattgtttatgagattcaccatgttgcaacatagtagtaatttgttcatttcctttgtagcacagaactccggaatttacatgtactctaaacatgttcatccattctactgttaatggctatctgggttgtttccagtttggggctactaggaagactgctatgaatgatatcgtaaatgccttttagtacatttatatatttatttctgttggagacatacctaggggtgtatcttagttcgtcctctccagaaagcagtgcctggggcaaaagcttagaaggtacttctgtttcgttttgtgtttttagagataggatctggctctgtcatccaggctggactacagtggtaccatcatagctcatcactgcagcctcaaacttctgggctcaaaggatcctcctacctcagcctcctgagcagctgggactacaagcatgcactaccacgcccagctaatttttaaattctttgcagagatggggtctcactatgttccccaggctggtctcaaactcctggcctcaaacgattctcccccatcaacctcccaaggtactgggattacaggcatgagccagggtgcctggccttaggtagaacttaactgggggatgcaattgcagggaagcaagagtaagggggaaaggaagtgaacagggatggcatgagagccaatatgagggtgagtttcagagttggccaccacttggtgccaaaggcagctgatgctgaatcttgtagtaacatcttccaagaggtttttataaggaatatgattcataagggtccatctgggatgaggtagagggaagaatttatccactgactcccatctgccatttatccatctgccattgtccaagtgagataggagaacagggaaaatgaggcaggaaagtagcaaagggaattgaaagttggataaagggcagaataagtaaaagcagagagcagaagaagcaaggtgaaggggcaggtgagcaagaagccagacaaaaagcagaggttcagcagccaaaacaaaagtaagataaaaaagtgagcagggccgggtgccgtggctcatgcctgtaatcccagcactttgggaggctgaagcgggaggattacctgaggtcaggggttcaagaccagcctggccaacatggtgaaacccactgtctactaaaaatacaaaaattagccgggcgtggtggtgggcgcctctaattaccagctactcaggaggctgaggcaggaaaattgcttgaaccgggaggcagaggttgcagtgagccaccgagattgcgctaccgcactccagcctggatgacaagagtgagactccgtctcaaaaaaaaaaaaaaagcgagcagtatcccatggccggcaggatcctgaccaaaccagtaaggggctgcgcttcagagatgggcatgtgcattggagagaaaaggtatccttaacataaccccgttatgataatcagctacttaaggttcatgcatatgagctgcatatcatgtatgtacttaggattatgggatggaggcaaggtgcaagcgcacgggggccaaagtaactaagcaacacacctgtcaatcaaaaagatagacactggctagagattaggcagccttgggaagagggggaaaaaaacaacatatagaaagacccaaagtacaccaaactaatgccgatctcatctcacaaagatcagtccactcttcctctccaagagtggaatactgcacttaatacactttttgctatctgtatatgtctcttccaattctttgttcaagtcgcccagatcctggaactgtgtggcaccattcagtaacacaaggataggcccgagtgtgctaactctcctgcatttctgattgcaagtttgtgggtgccagattggtcccttattatctcattcctcaggggcatcagagaatccctgagggtgatggggggtgctggcaggttgtacctgcacctgaagtgggaggaaaggtggcaaagccttgacaccaaggtgaggctaggggctggggaggtggcgtgatatccaagaggcatctaatacagagtggagatgctggatttggaggtactgccaaatggttttccaaactggtggtaccaactccacatccttgccaacattgggtgtgtaattttcaccattttggtggctactcagtggtatcttattctcrttttaatttgcatttccctgatggcccatgaggtttgagtgcctgttcaggagtttaacagtcattggacatcctcttttgggaagcacctatttaaagtcctttgttttttttttttttttttttttgagatggagtctcgctctgttgcccaggctagagtgcagtggcatgatctcagctcacttcaacctccgcctcgcaggttcaagcgattctcctgcctcggcctcctgactagctgggaccacaggcactcaccaccacccccggccaatctctgcatttttagtagagacagggtttcaccatgttggccaggctggtctcgaactcctgacctcaagtgattcacctgccttgcccttcccaagtgctggggttacaggcatgaaccaccatgcccggcctattttaaaactttttcctattgatttgatacatatttttcaatacaactcatatgcttatatttttagatagaagtcctttatcggccatatgtatggaaataacttctctcatatgtggcttactctttcctctttaatcatgtcttttgactgacagaagtttctaatcttaatgtagtccaatctgtcactttcttactgtgtttcttatgtctgtttaagaaaatgtatctattctctcccctgagttttcttctagcagctttgatgtttcacctttcacatgtacatttcacatgtacatcacctgggactggttttagggtataatggaagggtgacattaaaagggttttggtttttttcttcaatatatagatccaccaccacttattgaaaagcccgtcctttctccactgttctgcaatatcaactttgtcataataaaccaggatgggtctgtttctggatttctgttttcttccaccagtagatttgtttatctttgcatcaatgccacactgtcttccttactgtagtataagtcctccagatttgttcttcttcacatactctttagaatcagcttgttgagtttcatccctccaaaaaagccttgtaatcaacaacaaagttgtctggtgctttgatcaaaattacattggatgtatttatcaattctataaatcaatgtggagaccaacattttaaattccaatccatgaacatggtatatccctccattagcttatgtctttaacaatttctctcagaaatgttttgtagtttcttgcataaaaattgtacacatcattcactagaattatttttaggtatttgattttatgctattattaatttcattttctaattatttctagtatatagaatacaattagtttctgtatattaaacttctgtctagcgactttgctaaatgaacttatcttccttaaattaacctgtaattttttttctacatactgaatcacatcatatgtgaatggcagctttatctttccctttactatcttcatacctttttacttatttttcttgtcttattgctctggctaggacctccagtacactattgtatagaatattgacaagtgccaacatcccttctcattttcaatctcagtagaaaagcattcacactttcaccactaaacatgatgtcagctgtagggtttttgtttgtttcttggtttcttggagatttgtttttaggtagatacttttatcagattaaggaggttctcttctgtttctatttgctaagagttgtttgtttacatcacggatgactgttttttgcatctgttgaggttttccttttttctctctattaatgtggagaatcatgctgattggtttttggatggtaaaccaatcctactaaccttttgttcccattgaaatttgcaggttctagttcaattccacgaaaaggacctcctgagctatggggcctggctgacaacatacaaactccatcctgtgcaaagccctaggccgacctttcccccacaaacgcatactccacattccaggtcccagagagacaccctcgaaaaccacaggcttcagagctgcgaggcttgcgccagcccctgccccttggcaagctgcccctgattgcaccagccctggctagaccctctcccagcagaccctagaattgcgagggcaactggggggctggggagagtcaaaccagaaggtcgaggcctctggcccctaacacccgcgacaatcaggggtctccggagccagggctgcccctaccctgcgcgaggctcctttaagagagtcggcctctgaatggtctctggggctggaggtggagggcgccaagaatgccggtctccgacgacagaagcgagagggatgcagcttcgccgggtggcctccccctcggcgtcccaccagcacgtccaccctggatcctcccgctcctactcctaccccaagtccccgcccccaacttcgaagctcctgtgtgcctgcaaacgccggccccgccccgctcccacctccaggccctgccgctgccagggacccgcccctgccagggacccgcccccgccccgtcccaccccggtccaccctgcagccgtcggacccctggcagggccccagcaaacccggaggccgccactggggggaaggacggggcgcccggcgaggcctcatccacatgcaggggacggcgcgtcgcggcggccgccaggaagaaacaaaggctgttccgccgccggccgcacagtgccaggctcgccccgcccgccgccccggtggccccgacgcggcccccctggatcttttccgccggcctcggctgcacagtccggacggcttccgggaggaggcagcctccctcggatccccgcactcccraccctctcccgcgaccacagcctccttctccgtgtctcccgggcattccaggtcgcctggccttcttgggccgggctggatcgcgcgggacctgcaccagagacccgagttctagtccgctgagccctcactctgacctgggacgaggagcctgtagtgaagatctcaggccagaggtggcccagagcctggtagggtgggcgagccgtgtccaggactcgtcacaggtcttgggtccccgtgatgaggatgagagcccccgggatcttcacctcgaccctcaggcctttgatccagggtgcataggacacccagacccctcagaggagttccagacctcaacccccacccctcctgaggttgtccgcctgggagcctcagggggcacgagaaagggtttggtctcagccctgcacttgctcggcgatcgctactgatctctgggcttcaacttccacctgtagaatggactcaccctgggagctgtctcctacacacacacacacacacacacacacacacacacacatcgtgcaggcatagagtactaaagggagcacacactgcatccccacacgcggccagctgttattcttgccgtccccctcggcctccctgagagcaggggattgtcttgtctcggagctctgctccccaacccggccccaagaatggatgtaactcaggcaactggagggtcccttccttcgcccaactgggaagtccttcctagatctgccccaagtcctctccttccttcccaggccgggactgggggagggggcgttccctttaagggaggtgggggagggggctgtgggccggccctccttccgcccctcccgggcccccgccgcccggggcccccagtcccgggcccggagccagcgcatgcgcccgcctgtgggcgctgtcccggctgcgagggccgtgagctcacggaccgacggaccgacgggcggccggccggacagacggggcagcgcagggagcggggacgcggcgggacagcgacatggccggccacacgcagcagccgagcgggcgcgggaaccccaggcctgcgccctcgccctccccagtcccagggaccgtccccggcgcctcggagcgggtggcgctcaagaaggagatcgggctgctgagcgcctgcaccatcatcatcggtgagcgggacccaggcgggcgggcgccgggcggaggccgaatgaggggcgcagccgctccgaacgaggggcgtcccctctccgggcgctcggacgggtctgcctggggaacctgcagtctggcctcagagagcgctatgaccgcggggaggtcaggggctgctggcccagggtgccaaagctccgtgttcccacctcccggccgcctgcacctgggggagttttgggtcccctccaccgctggactcttcctcctgactcgattttgctgcggggcttttgcaaggcagttaccctcagtttcctcatctgtgaaatggccatgactgcagtcctgcgattagcgcaggaacttgaccagtgtaggggctggtcaggctgcggcaggctgagctccccaagttctgtactgtgggtcagtctgagtacctactgtgtgcagggtccaggtgccacgcagtgcagtgactttattcttggaaagcaggagggcctatgagcagagtgagcaagcgcagcctgcgcagaagggacggaggttcagagcaggcaatgactgcagggtttggcagcaggacccaggagagggggcgggttagccagcaattgggggcagcagtgggcagacccagcctgcagaaggccagctgctccctgagctsggatcctggtgggcactggacactcgcctggtctggaggccytggactccaaagtccccacctgagaatgggtccatgtcctgcccccacataggggtttctgggcaggcagagagctcagaggtcatgggaatggcagtggtatttttccactctctgtcccaagtcatggatactgacttgtttctttgtctacacagagtgcctctgagcccctccagggagggacaggagaagtggtttggggggtgagtgactggggcctcgactgttctcaccttaccgccagccagtcttcccggtcccctgccagtgagagccacttgtgtcttcactgccttcccaccctcagacccctggagatggagaaagtttgggggctcagtagggcagacccagggtcttcacctcgtcctctcccacccccacattagcagctcttcacatccaragttgcccctgaacacagcccctggccaggtcactccgccatctcaccccctccccttagaatgctgtctcccagagcctggtcctgacctggccctgggagcttcttggcctaggatgcccctgcctgatggacggtctgctggaaggaagggctggttccagggatttggccagggtgctggttagagctttttcttggcccacaccctctccaggaactgtcctccagggaaggggaagctcacaccatgagtgggtcataggattgagaccatgcctagaaccagctacagtgccaggcaggtgcagaaagacacagctctgcctgggctcctcagctaagcccagcatccttgacctgtcttcctactctatcccctccccacatcccatcctccccaggccacagggaggctgcctggctcctttctccccagaaaggggccctggtggtggtggtggtggtggtggtggcggtggtggtggtgatggtagaggtggtggtggtgggagtggagaaggccaactccactatcaccctccttttccaggacagactctgtaagtttcccatgcagcccaggtctgccctgacagctcccctacccttcagttccttcctgctgtgccaggtccactaccttggcctccaaaccttgaacactgagccagggtgaagggccacttagctaaccaaggatgctggattcagctacagaacccaagcccggggcactcagtggtggtcttggggagccttgatcttggcctggccyggggagcctttgaggattacagcaggcaggaggctggacgaggcaggaaaaaacaaggagatcaacctcaaccagaaggtgataggaggtggggactgggcaggtgaggactgagctggggtctgcactgccttccccacctgatgtactaagggtctcccctccccagcccaccccacctttctgccccagrtgggctcactctctctccaccaataccctggggagcctggtcagaatcaaaaatgtctgcaaagtgtcatattttagctctaaaagtcaagaacttgacgtcctgcttcctttcctttcctttctttttctttctttttttttttttttttctgagacagagtctggctgtgtcccctaggctggagtgcagtggcacaatctcagctcattgcaacctccacctccggggttcaagtaattctcctgcgtcagcctcccaagtagctaggattacaggcacacaccaccatgtccagctaatttttgtattttcagtagagacagagtttcaccatgttggccaggctggtctcgaactcctaacctcaagtgatctgcctgccttggcctcccaaagtgctgggattacaggtgtgagccaccctgcccagccaacgtcctgcttcataatctaccttggtttgttattgttattgaacatgttatttccaaaacttccacagcgaccctcctaggagatcctgtcactctctccctcgtgtataccctctgctccagctcagactgggaattgaggcttttgagaatgggaagacctggaagggtgggctatgggctggcgtgagactcatgtatagtgtgtttagggcagtgcccgccggccactgcaagcacagatggaagggaatcggccaggctggaggaaatagaactggctggggcaggggctctgcaggacatcatcacatccaatatctgttcagaaaaacacctcttactgccttatgaaaacatgttcttcctttatctcatttgaatctcatgcccaccttgcaaggtaggaatttttatacccattttacagagtggaaactaaggttggaagtgaaatgatactgctccaaggggtaggctcaggatttggaaccagatttgggctctgttcccagtccagtgcctattttattttattttattttattttatttatttattttattttattttatttattttattttattttattttatattttattttatattttattttattaaaacaaactcttgctccatagcacaaactatagtgcagtggcatgatcatagctcactgcagcctcgacctcccaggctcaagcaatcctcccacctcagccttccaaacacctggaaccacaggtgcccgccaccacacctggctaatttttgtattttttgtagagactgggttttgccatgttgcccaggctgatctcaaattcctaggctcaagtgatcctcccacctcagcctcccagagkgttagggttacaggcgggagccatcatgcccggtcccagtgccctttatactgttctgatgctgggcaaattggggccagagtcagagccctgacgggggagggttggggaccaagctgggagcttgtccaactaggcttcactgagctcctgctccactatgggtggacaaacagacagacggccagggaagtctgcctccccatcggcggctggactcacagggcctctcatactgacccaggaacctcggccagctcccttgccggatccacaacccaaggaacacacccagatcctccaaagtgggagtcccccctgggtctgctgaccaggcccttcctctgctctctctttgacttgagagtccggctcctgcaggggtttgtgggccagatgtgtgttcagtgactcaggagttgacatcatgaacctcaactcctcaggaaccaatccctgctcacccagcytcagccaggaccctccctggtctccagggctgcaggtggctgggcttcccagaggggtggacctctgcagaaccccagcccctcctcaccggggccctgaggagccatacaactgtgcaggggcttagctgttccccactacagttccatttacaggtgaggaaactgaggcaacctgccctggggtcagatgccctcggtgtgctccaggaccccaagggaagccccaactataatttcggggacctgtcagtcctgggcacactcatccatttattcaaccactacatactgaacggtgtcaggcactggcttacatgccagagacaccatgggggggtcaagacagacaaaatccatcttctggtgtgggagtcccgcaacaagatgaacaagctgaatgtgtgtattgttaagtgctaagaccagacagtccagccaggaaggaggatggagagagccagggtcggggattgcagcttggaaatgagctgagatctggggtggggttcagtgtgagcaaggcattgcaagctatgttaagggcattgccttttgctctctgtgaagcaggagccctgggctttgagcagagggatgatgggatggggcttacagggcccactatggagaagaggcagtgggggaagaagtgggaggaggaaggccggtcaggaggctacctgggtctccccgggcaagagaccacggtggctcagggcagggcggtggccatggtggtgtcagaggaggttccattccggatgagtttggaagatgagagccgaaggatttgtgatggaatagaggtcctgggggagaaagagaggaaccatgggtgactcaaggttgtggcccaagcaattgggaggacgttttgccatttattcatcagggaagatcgagaggagcattctgggggcaaggaggtaaaagtcgggaattccrttttgaacacggaaagtctgtgatgtccgcggctgagtggttcgttgcatatacagatttcatttagcagagcagtctatgctagggatataaatttaggagttgccagcagaagtcaaggtaatagatgaggtctatctatctatcaagaaagcatagaaagaaaagagaagaagccccaggactgagccctgggcacccagtgtctggaagtcaagcaagataagggattctgaaaaggagaagccggtaaggccgaggggaggccaggaggccgagtgaggaggaagcaatccacttgccacatgttgctgatgcgtcaataacgtggcctagggctcgactgttgcgtttggcaacgtggaactcaccggtgaccatgagaagcctcagccaggagacagggccctgggcgaggtttgcttggctgggctggctgagccgaacgagccggagagggccgcacacttccgctcatctcctgtctccaaaggaaagtgggttaggctggagtcgggtgccggccaagtggcagttccaggcacatcctggatgtccccactcacctccttggggtgctgcccagacctcagtagtcacagtcagcatcccggagaggtacctgacacaggcttaccgtgaggatgtgaggacacccgtgcgcttgaggcgagtaggcttcacccaggccgcagccgatcaccccggggtgttggggtcccgggtggctcaggtctcagaggaaagatggggctgcctagggggtctccaaggcagatggcagtgcgtagggagatccaaaagcacttcccatggcctctgatgtgccagacgggatcaagagaatgcctgcatcaaataaaagcatcccttcccagccatcatccaggtaccgtggccgtggggcgatgtccagattgcaggggccagggtggctggtcaggragagcttcctggaggtggtgctgcttcagggagaccagtgagctgggcagaggcctrccacagtgagggacatgttccctgagcagactgtttccttggcccagcacagatatgcagggtgcatcccctctgctgaagtcacggttggactagccctctgctgccccctagcccagtggccccacctggcagatggggaaactggggctcggaagggcagcgctggcctgagtcacacagtcgggtccagaatgtgcttcaaggcatgaggactggtgccagtgtcctggcctgacaggccctccctgccccctccccaaatcagactgcacattccccacacaccacaggaggtggctcactctgcgactcgacctccgtgggccgcccctgtgacctcagtggtctgccgctgcctccagaaataggtcagcatgcaccgcagcggccacggggaacaatggccctttcttcgttcctccaagaagctgagtaagccccatcaggccaaacatcttaatgtgataaaagctacccagcgaaggctcagggaagaggggcgggtggtggagactctgggaaggccgacttggggggcagtcacttcctcgcctacctgcccggagctctggcccacggaggacctgcagggaccactgagctgtcatcccaccgggtggacaggaacgtggaggcctcagaacctacatctctctggtcagccatgggtcagacacccaacaggggctcagcggtatctccaggcccatcccgtgccccctcatcctgttccactctgagttcctgcccctctaaaccaggttcccccaacggctgggcttcttcattgctgctccccgaatcaggtagatctgcttggctgaaatacagagtctgggaagggagaccctccgaccttcccacaccactgggaggaacccaaggcagcccccttccagctccactaatctggccaggtgtggtggctcatgcctgtaatcccagcactttgggaggctgaggtgggtggatcacttgaggtcaggagttcgagaccagcctggccaacatggtgaaaccccatctctactaaaaaaaaaaaaaaaagaaagaaagaaagaaagaaatccaccggtccctcccatacccctcctataatcattagagcattggaggcccccatccctgtccacagccccctccctcctccgtgcccaagcccgcagccccggctgctccatgcagtgccccacccatccttcatggtgccgggagcagccagtgtgcggagtgygtgatgcgattttctgccaccttcaaacatgatcctgagggagatgctgcgagtggtctaggcccagagggagaaacccctgaggacctcagagacactggctaacgcctgtggtcctttgagccacaagggagaaagtcctgaactgtggcctgaggccacgtgttccaaacaatagtggcctctccacccctggcaagcccagtatctgagtcttcagccactgrgcacaaggctagtgatacagccctggaagatagggtgccagatgtggcttaccccggagctccacccaggaggccccaccaagcagaagcatggtgggctctctgcagggtgggtggctcagggcctgggatgctcccagcgtgaacatgctcagctccttccaaggccacccagcccccgctggcttccaacctccctggctttcggcaaatcccagtccgccaggtcctgagaacagaggccctgctgccggatggagggaactcaaagrctctttagaaaccttacagcccacccaggcctgggcccctctgctagatgagagaggcgcttctctctctcccccgagaagtagactaagggtacagcttacctctgggggctggrgcacaggaattagttcgtccttatctggatgtatttagggctcctgggatgtgactggaaaactgagtggggcgtcgtagctgtccagactggaaatctgtgtcggctgggggtgggggcagtgggggagcaccgtggacaaggagtgaatacaaattggcggctacaaccgtgtccttatccagccccctgcgggcccggcaggtggaggaggcgggctcccgctctgagggagatggacccgtcctctcaggacccggtctggtgtggccattgcatagagaacgatgttggtcctaccaggacctacaggttctaccagggctgtttgttcatatggtctgaggttctgggtttatttcttcttggacaggccctagtgcagatctctggtgaagttaccggattcatgtgcacagatggtgagacccatataacccagaacattgtccctctttgcggagctcagggctcagcaggcactcagagtcttgctcatcctgggaacctactctacagaccatagttggcccccctgaatgtttcccatcatgtcagaaagcagaggggctgggcacagtggctctcgcctgtaatcccagcacttcgggaggccgaagtgggtggtcaattgagcccaggagttcgagaccagcctcagcaacatagtgggacccctcaactctacaatttttttttgattagccgggtgtggtkgcactcacctgtaatcctagcactttgggaatccaagcagggagggtcacttgagcccaggagttggagaccagcctaggcaatatagtgagaacctgtctctacaaaaagtaaaaaaaaaaaaaacctgggtgtggtaatacacctggagtcccagctactagggagactgacgtgggagaatctcttgagcccaggagtcccaggctgcagtaagctatgatcgcaccactgcactccagccagggtggcagagcgagaccctgtctaaatgaaagaaagaarctgggcacagtgactcatgcctgtaatcccagcactttgggaggccgaggcgggtggatcacttgcagtcaggagttygagaccagcctgatccacagggtgaaaccccatctctactaaaaaagtacaaaaaatattagccaggcgtggtggctcatgcctgtaattctaactacttggaaggctgaggcaggagaattgcttgaatccaggaagcggagggaaggaaagggaagggaaggggaaaagagaaaggaaaggaaaggagaaaggaaaggaaaggaaattgaagtaggaagagaagcccaaacctgatgtggtcaaggagggcttcatggaggagatgctatttcctgagccactccatgagtctggactttggccggtgggaaagtggcaggagagtggttgaagtcctgtgttaggggccagctctggccagtgggctggatggaggcaggacaagtggctgcatgctgatatgcctggggctctgaggtagacgggagggctgagcatgggccttgtggggtgcctgaggagccaccgtctgccrtcgctcaggtggttcagcctcctcactttgctggccccgcctcacgggggcaatggagggctgagaaagtcaaacagggcctgtctctggcagaggggcctggccagctgaacgaggtgccatttcctatgtgagggactgaggaaggggcagatgatgagcccagaatggcacttgctgggcttgggggccagtggcattcaacacctccagcccacctcctgcctcctcctcctccgggaagcaccccgggctgtcttcctcctggcagcaggcagatccccacacagaaggccgggctgcgaaggggaccccaggcctgatgcctccccatctctccccctgcagggaacatcatcggctcgggcatcttcatctcgcccaagggggtcctggagcactcaggctccgtgggtctggccctgttcgtctgggtcctgggtgggggcgtgacggctctgggctccctctgctatgcagagctgggagtcgccatccccaagtctggcggggactacgcctacgtcacagagatcttcggggrcctggctgggtgagtgtggggcaccagcgggcagggggacaccctcttgggaatgggatggccaaatgagccctggcatcagtttccactcctgcttccggcttcctagggaggtcgtgggggtggatggagagaaggtgtggggggtggatggagagaaggtgtgggggctggatggagagaaggtgtgggggtgctggacagccttctgaggacagggcaggtggaactgaggcccactccaccccactgatgtgtgctgggcactcctgcaggcccctgggcctctctggatctccttttaaatagaggtccctctgaaccccaccccctgccttgtacttaaggaggggggattcttactgtctgaaaaccctaggtaatgtgagtgcccaggcgaggaggggcctcaattttggtaaacccatatgttgcatgaggagcaaggaaggaagtgtgatattcttaccatataccctgcataaggtccttttttttttttttttttttgagacagagtctcgctctgttgcccaggctggagtgcaatggcgtgatctcagctcactgcaacctctgcctcccaggttcaagtgattctcctgcctcagactcccgagtagctgggattataggcgcccgccaccaygcctggctaatttttttgtatttttagtagagacggggtttcaccatgttggccaggctggtcttgaactcctgacctcaggtgatccacccgcctcagcctcccaagtgctaggattacaggagtgaggcactgcacccagccagaggtctcctttccttagcaccctgctatccttccttcgttcaccagggaatatttgctgagcacctaccgtgagcctgggggtggggaggcagtgatagaaaggtctgtccctgtactcaagctgctcacagaacagagaggaagcagccccttaaatgggattaaggcctggatgagccttgctttgagagtgtgtacaagaggcagcagctacacagcaaagagaacggtgtgcgccatctagggaggactcccaggaaagcaatgcttgccctaaggctgggaggaagaagattttccccaccgggcctagctgaccagtgaggaaagcatcccaggatgggggaagtgtgaacagagggtgtggtggcccaggtgagcgcagggagtctgctgtagctagaggtgaggtcaggttgggtttacggcaggygccggggcttggagagcatcaggggattgaagctgttgtatttgtccagctgcgttgtgccaagagctgcaaaggtacaggcagattctaaaatcgtttaggagcctgattcgagaggatagggcagccagcatagcagagggagaggtgggtgcagcggaggtggcacccacttccctactgagaggctcctagatggtctggggctcagaggaaaagtctgggctgaaatttacaaagtttggttctgagggatatgggccggggacccttaactgggcagccttggatggggagacgtgccagggcttgcacgctgctgtgggtgcatctgtggcagtctcctctggggagagggtcctcaaaggggctgggacccaagaaagcagaataatcatgcttcgggcctggagaggacgttcgggagggagaagagggccaggacctcatccctgggcacggaacatgcggggatgggcagaggggatgcctggcaggggaggagggccatggagctaggatgtcccagaagcccagcagggatggttgtgcagagcaaggggcaggtgatccagagatggctgatgtccccgatgaggcagtcctctccctggagggctggccaggggctaggaccacccccaagggcagacccacccctgggtgcaggaaagcccctgagaacaggtcagactcacagtctgggtgccctgcagaggcaagatttaggtagaaggggcatccatcactctccacccccagctagggctcttggtaaggtctagtctctgcaccccataggtctccctcagggggaacacagctcagagtcacccatcttcagccacagtactctgcgagagccagggctgaagccgagaggtctggggacagggaccctggctcaggagacagcctccgtccaatggggggcctagttgttattagaaaagcatttggtgactgggcgcagtggctcacgcctgtaatcccaacactttgggaggccgaggcgggtggatcacgaggtcaggagatcaagaccatcctggctaacacggtgaaactccgtctctactaaaaatacaaaaaatttgccaggcatggtggcaggcgcctgtagtcccagctacttgggagactgaggcagaagaatggcatgaacccgagaggtggaggttgcagtgagccgagatcatgccactgcactccagcctgggtgacagagcaagactccgtctcaaaaaaaaaaaaagaaaaaagaaaagaaaagcgtttggtgcctatgttgttcccagcgcctgccccacagcagccttgtcaatgtttaagtacgggtaacaccttctctgttaaaacagtctatcaatgcagccgcaagacctcaacaaggtcaaccctgcctccctggaccggtgctggcctctggcagcctcgccagcccccgggcgccaggcccagggcagccctgctgcacacatcagggccaggttggccgggaagggctctgggcagcttgagccactcccgcccctgctccttccagctttctgctgctctggagcgccgtcctcatcatgtaccccaccagccttgctgtcatctccatgaccttctccaactacgtgctgcagcccgtgttccccaactgcatcccccccaccacagcctcccgggtgctgtccatggcctgcctgagtaagcatcccctttggcccactgtccccagatcagccacctgcccgggcyccatcctgccctgagcaggaggacagaggggtgaaatttcccttcagaaaattccagctgctataggggatgccattcycgggccgcctgggctggacttggccatsgtccactgtgaaaggtcccggcctcggcgcccacccccgccttccctccgcagtgctcctgacatgggtgaacagctccagtgtgcgctgggccacgcgcatccaggacatgttcacaggcgggaagctgctggccttgtccctcatcatcggcgtgggccttctccagatcttccaaggtagggccgagtcggggtaagggccgggctggggagatggtgctgacccccgacttctgggcctccaggacacttcgaggagctgaggcccagcaatgcctttgctttctggatgacgccctccgtgggacacctggccctggccttcctccagggctccttcgccttcagtggctggaacttcctcaactatgtcaccgaggagatggttgacgcccgaaagtgagtggggcccccaactgggccctgggaagcagccaggccctctggtgggacaggcagcctctccgcccagccccactgccacccaaggctcrggctggtcctcggtggcccacgcctgttgccctgcaaaaatggccctgggaagaaagccggggggcttgcattctagcctggccctgttctctctggctatggacacgtcacagccccttgcagggcctcagaaaggctgaatatcatcatcctgctgtaaatagatccagagatttgcatttggcctaaaattatgcatatacacacaatatggtccctacaaatgaagccaatgactgcgtctgatgctcggccagggatctcgacagtaaacctttgcagctgagcgagctgggactggaaagttccaggaagactctgggtctgtggactgggctctggggccattttggggaattttccaggctgattttggctgtatgcgattttatctttctgcacagacatcagaccctgtcctcaggatgtgatggggcccctcccccatctcccatcctaccagcctgtgtccaggtgggggtggggcagggcagacaacagggtccctgtgtctcgggcagcaatgctgccccctttcctgccccaacatccccagcagacacaagagatggagactatgagctgctctcgtggctgggtctcgggggtcctgcaccctcaggagctgacgctgacgcactccactgcctgtcaccaggaacctacctcgcgccatcttcatctccatcccactggtgaccttcgtgtacacgttcaccaacattgcctacttcacggccatgtccccccaggagctgctctcctccaatgcggtggctgtggtgagtgggcccctgctcggtccctggctcctgcccaggcccctgccccggccttacacayggcctctctactgygcccacccagaccttcggggagaagctgctgggctacttttcttgggtcatgcctgtctccgtggctctgtcaaccttcggagggatcaatggttacctgttcacctactccaggtgactgcactggggagaygtgggcatggggagggaaggctggggtgcaggtgtgcaccagtcatgccgtgggccagaggaagggacacctgccgggggaggggtctgcctgaagctgggatgatgatcccacacggtaacaagtgtctgatcacaactgggaggcaaagaaagcaagaggcaggcaggctggatgagggggagaactgtccagtggggctgctgggcccggagcaggaggtcagaggcgacagcttaagagggacatcaggtccaaagctgagacccaggatgtggccagtgcccatatctgtccccaacgctaggctgtgcttctctggagcccgcgaggggcacctgcccagcctgctggccatgatccacgtcagacactgcacccccatccccgccctcctcgtctgtgtaagttgggggacctgggccaggcagggcgtggaggcagggctacccggcaatgcaggaccttccgggtaatggcaggggtgagccattccagggtgggggttgggggtggggccagggctcatcctgcaggggcgtcaggaggcaggctaggggccagccgtcagccccaggtcctctcccagtgyggggccacagccgtcatcatgctcgtgggcgacacgtacacgctcatcaactatgtgtccttcatcaactacctctgctacggcgtcaccatcctgggcctgctgctgctgcgctggaggcrgcctgcactccacaggcccatcaaggtgaggccctgggacagctggccctgtgcygggtgctgccagagccacccctgcatccacagtgggcaccaggggcaggtgggatgggaggtgccagcttttgtggagtgttgggccctgctcagggctctctgtgcactgaggcagccattcctcatagcagccccatgaggacagagctttgaatgctcccagtgtacagatggcgaaaatgaggctcaggactgggcacaggggctcatgcctattccagcactttgggaggccgaggtgggaggattgctggagcccaggagtttgagaccagcctgggcaacataacgagacttcctctctgcaaaaagttaaaaataaaagggttagcctggtgtggtggtgcgcacctgtggtcccagctacttgagaggctgaaatgggaggatcgcttgagcccgggaggttgaggctgcagtgascggtgctagggccaccgtactccaacctgggtgacagagggagaccctgtctcaaaaaaaaaaaaaaaattaaagaaaatgagactcaggaactgttcaaggtcacaaaggctgccaggatttcatgagcccacacaaaaacagaagaccatagcctgagctaaaagcaaagccccccatgtgtgtataaatccttaagtggagaagtgctcagtgcctgaaatgtgaaacaccaaaaaatcactgacctccagccaagtgcaagcctcaagtccacacgcaaccgctgtgtggagctcggtgccgctgagactttgaaaaatcctcagcaaaactggccaacggcctgacccatgaattggcctccaacacactgggctgtcgccaagagggggtgtagtgggtgcaattgcccttcaggcctcagctcccagggaagggaggaaaattccccagacccccaggggtcggggrtacagacagctggaggccctgcaccatcggtgtttctgctcccccttccccaggtgaaccttctcatccccgtggcgtacttggtcttctgggccttcctgctggtcttcagcttcatctcagagcctatggtctgtggggtcggcgtcatcatcatccttackggggtgcccattttctttctgggagtgttctggagaagcaaaccaaagtgtgtgcacagactcacaggtgagccgggcagctgcaggtcacccagcacagggggccggggcctggagaccagacctccctcttagaggctcaccccagagcagggtgtcctagcagctgaggtgggaacacagggcccagccgccaccaaatrtctcttcccaagatgtacccaaagtttccagaaccacgggtaccgacggagcaactccctgaagacccctgcccaaggggaggtgtccggagctgggggtcacccctatcccgagaggtcaggccccaaggtccatctgtctgtcctcagagtccatgacacactggggccaggagctgtgtttcgtggtctacccccaggacgcccccgaagaggaggagaatggcccctgcccaccctccctgctgcctgccacagacaagccctcgaagccacaatgagatttttgtagagactgaagcagttgtttctgtttacatgttgtttattgaggaggtgttttggcaaaaaagttttgttttgtttttttctggaaaaaaaagaaaaaagatacgactctcagaagcctgttttaaggaagccctaaaatgtggactgggtttcctgtcttagcactgccctgctagctyttcctgaaaaggcctataaataaacagggctggctgttcgctcgtgctatggggagtccctgatgggcacagaygggagtggctggggcgtacctcggtgggtgcacacatgttgctggccaggaagatgccgtggcaggccctggaggaggctcttgacattagggggctttgctgcttgacacaggcgctccctaccatggcacccagagtccccctgccctaaagggatgtcgaggatggggtagcagctcagtccgcccctaccccaggcccctcgatgccagtctgagctcggccacccaggagagctcaggggctccaggctgggattgyctttcttcccgtaaatcaccacagagtgaaggtcaggacttcagagcccacagtctcaccctggcttacaggtggggaaaccgaggccctgagataggatggaacagacgtggccactgctgttggtgcctcggcctctctgtccccagaaagcacagagcagcatgtcctgggggctttgaggcctgcagggaactccaggggcttcatgtacagcaggcacacaccccagcccttccacggtgcccaggagattggaccttcagggagggcaaagggcgcctgcctggccaggggcatgagggtttggcaggagccacccaacccaggtcctccagaggccttgctggacaggaagagggtgaggcgtgagcaaaatagtcaccacggatgagacccagcgtccccatggcccggccccatcctcatgacaactcccagctctaggggcagctgttgccactgcagggcagatgaagcaaaaaggctctggtcccctgcttctctggaaatgggttcccagaatggagtggggggagagaagtgagaccccagggtgcttgtgtacaatgggaccctgcagacgggctcaccactccactcttctccccccccgccccgttcagtcccacagctcccgcccaccagtgcagccagctggcttaggggccagcccctccgctggggtccccggagggcctctccataagaaaggacgcagaggcagggtagaaatgactgtgtattccctggttacaaagcggggctgtggcggtcaccagcgagcccagcggtcaacagaccaacagggcctcatcatcgctggcctccagcattggggagcaggggggcggggggttcctgcagacccccagtggctctggcgagtgggggcccagggtgctgctggcagtggagacctgggggtgcgggtcctgggctgagcagggctcccgaggtgcatctgcaggagctgggccgtctgccagtggctccctgcagacctttctgtccttgtccacgggcctgcactctgggtctcgcaggcccgagggcaagggtggccctgaaggtcccacctccggtgcacggccgggggcactggggggcctgtctccggccgccctggtgctgcctgtgtccatgagcggtgctggggggtcgggggcagcccctggagcaggctggaggaagccatcgcccagcacggtctgtgaggggcgtgctgcggtcagcagtgggatctggcctcggggcgcccgcggccggtgaaagagccggttccagaggcggccgaggcggcggcgggagggcccccggcgggaggcgtgccgacgcatctgtctccgcatggctgtgcgaagattctgcagcacagaggcctgtggggtggagcagggtaggggcggggggatgcggctgagggggcagacaggctgctcaggggcaggagacagcacacccccaagggacctgagacccgagagaccaccttgtccaccccccccacctggccatgggccctcaggtcaccctgcgcaggccttgcctcctgctcctgtgacccctggaccagcctcctccgcacactgtcccaagtggccccggaggggcctcacgccctccgggggctcacctgggacgcactgtagacaggaaagtcctccacgggtggaatgaggccctgggcgatgagctgaccataggatgggggtgcctcccgccgcacgaactcagcctccaggcgcgtcatctgggtctcgaaggccctagaagcagtgggcggagggcgacatgactgggctgcccgggacctgcagcaggaacaacaacaggattccaggacgaccctccacccagacaccccaagatatagggaccccagtgtgcaccagggcagcctccatgtagctagtccaggcccccgtttgcaaacccacagctacggggacagcaagcctgggtgatgaagaagcccggtcccctggctgcgggcacagcgcccacctgtattcctgcgtgcgcagtgagtagagcttgaaggcgcagcccagcgcgatgaccagcagcaggccacacaccaggctgccaatgagcgccgccgtgatgaccttgcggggcacggcggccaggcacccatgctcatcgctgccgtcctggcagtcttcctggccgtcacagcgccacgtctcgaagatgcacaggttggtaccgcagtggaaggtgccgggctggcaggagaagcagttcttctcgtcggcgccgtcgggacagcttttctggttgttgcagcggtcggcaggcgtgtagcacagaccactgccaccctcgcaggggtactggtcgggcgggcaggcagggcagccctgctcgtctcgaccgctggcacaatgccaccagccatcacagcgctgtggctctgagaagcagccctggtcgcccaggctgcccccgtcactgtcactactgctcccgcacggctgctcccaggggaggcaatagcccttcacctggtaggtggcattgaagccgtggccggcgctgcgggcgcgcgcgtggtaggccacggtgaggcggccctgggcggcctccaggctcacgggccggtggttgctgcggtaggacagcgtctgcagcaggcggtccccgcgctcgcccaggccctcgtatacctgcacgtagtcgtcatagcccagccgcagttccagctgcagcagcacccgccgggagtcctgtgtgtccaccagccacgtgcagtgaaggtctgagggcccgcgagcggcgccgaacaggtctggggaggcaaaggagccgtagaagctgcccagccgccggccgcacgccaggtcggggcagcccgcctcatccgagccgtcgccgcagtcctgcaagccgtcacagcgccgctccacaggcaggcagcgcgtggagcgcgccccgctgcatgggaaggtccccccggggcacaggctgcctggaggctcggaggcgggcgccgagcagttgccctcatcagagccgtctccacactcgtccaccgtgttgcactgccacgggccgggcaggcacttgccgttgtcacagcggaactcatctgcctggcaggatgcctggcccagcttccctgtggggtggagacgtagcaggggacagtcaggagacagaagagcctcccttcggccagggggcctggggccaaaagcgggcaggtggttccccatcactgtggcagcagagacccctccaacaccagggtgggctctgtccctgacctgagcctggggttaggggtgagttcccaggactagccaagactgggaagtggggccagtgaccttgagaggtccaaggcatccgcatgcccagtcctgccactgtcctgagattgacagggcggtcaggggacatcccacagggagccggggccctgtggagggtgccgcccctgtgggccgggagcctgtgggcatgcacggtgtgctccgtggtgtcctgcctgccctgcagcctccatcacctcggatgtaagacagacggaagccctgggcctggccggagctggaggcgtctgagtggaagaaaatccagacatggtcgcgggcagagatgaaggcaggtgggatggcggagccacagaggcggaaggcctcctggcggggtggggctgctgggcccagcaggagccagtccagggagcactggtgggactcctccacgtcaaagttgcggaagctgcgggggggcggagaggacccagacatgaggcagtaggtgggatctccatggccgaggaccagcagggagtggtcaggctggagccacggccaggacagccagccctgtcccggccggctgcccccactcctcatgttccagactgcctggttcctccactcccagccactctgtccccacactgtccccatccaggtgtgcacgggaggctccatgaagaattgcgacatccacgcaggtcatttccagctctgctgcggctccccttccctccatcagtgcacacagtacccccagcccgaagccgaagtggagcaggaagtcaagagccccctgccccgacaccctccccaaaagggcagtggcccaagggcccagaaccctccacctcgggaccactgggatgggcccagcacaaagtcccaggcatgggaagtgagggtgagactgcccacggggctggctaaggctgcagcaggttgacagcttgtcatctccggagatacactggccctgaaccacctggcccttggggaaactgaggcacagagactaggatagaccctgcccatgcccatcacatcctcacgcattgcagctatggagtaagtcaggggttgcgctttttgggctctggcatttaggaaaactatggcagatggaacctatagtgactccccagccaaatgtccctgtgaccacccctggccaggaccaccgctcactgcctggccccctttccctctgcatgtccctgcagctcaagcacccgggctttgcctgattcactcccctccccaaggccccctccagaaaccatgctctgggctcagtgccagcctggcccccagccacccctgcaggacagagaggacacctctgccacctcagagacatcagaccatgcccaccagtcccaggctgtgttcccagtggcctgtgtgctggccctgccttcctggcagagctgagtgactgagaccccccacaccccatgaacgaggctcaaaccaggaagaggtccagcttgggcacctcgccacagaggcccgtggagacccagagcactggacacacttgcgtgcatgcattcacatgtgcacatacatgcttacggttcacacatggttacacctgttatcttacatgcatgcgcacatacacgctctctgcacctttgcaggcatggctcgtgcacatacatgtgctcacacatgcagtctctcacatgtgtcctttatgtcttctccgacatgggcttttccatgtacacaagcacacatgtgttcacatacatgcacacacacacatatgcacacacacctacttacatgtgttcacatgcatgcacacaccacatacctgctcaaatacctacacacgcctacctcacacacacacatctgcatgcacacacacctactcacaaatgctcacacacatgcacacacccatacacctgttcacacgagtgctcacacacgcctcactcatatgctcacacacatgcacatgatcccacacctgctcacacacatgtacaccctcaggcgtgtgccctccacacctgctcacacacacacattctcacccaccccatgcacgtgggcccacattgattccttccgacacccccgggtgcccctacctgatggtaatcatgtcaccacggtcgccctggatgtaccagctgcagttggtgcctggcgggtagttgaggggccaggccgggctgtagatgaccccacgccgctccgtgtgctgctccagcttcccactgcaggccgctgtcgggagaggaggccgagaaaggccggcccatctttggttgggatgcgggttgcagtggggggaagggggcttcagcacaggcctcccccatggtgggatcgagtccagccaagggtggccatggccaagggcaaggccacaacttgtgacttcatggaggtggtgtgtacgggaggccaaggagggccccctagacttgaggcagctgtagcccccaaccctatgcagtggactacagcctaggtcctgtcccccgcatctctggcagagctgggagaaaacccaccaacaacccgtcctgccagccggcacctccaaggtgtagcctcgtggcctcgggtcagtggagaatcccacacccctaggcctgcccagccggcatagcccatcctgcgatggccccctgcctgccttccctgaggctttgctcactcaacaagtatttactgagcacctactacatgccaagcatgcatggtaggcacactgagtaaggtgggaataaggcctgctctatg

SEQ ID NO: 5657 - DNA, 26330 bp, Homo sapiens
gcttatttctcttagcataatgtcctcaagtttcatccatgtcatagtatgtgtcagaatttccttctgttaagactgaataggtggctcacacctgtaatcccagcactttgggaggccraggcaggtggatcacctgaggacaggagtttgagaacagcctggccaatgtggcgaaacactgtctctactaaaaatacaaaaattagccaggtgtggtggcccgtgccggtaatcccagctactcaggaggctgaggcaggagaatcgcttgaacctgggaggtggaggttgcagtgagctgagattgcacaactgcactccagcctgggcgacagagggagattctgtctaaaaaaagaaacccaaaaaaacaaagaaacaaaaaacggaataatattccactgtatggatggaccacattttgcttattcattcatcatccatcaaggaacacttggttactcccaccttgtggtcattgtgaatgatgacgcaatgaacatgggtgtacaaggatctgtctgagtccctgctttcaattcttctgggtatataccctgaagtggaatggctggattacatggtaattccatttttaattttttaaggaacccgtatactggtttccacagtagccgcaccattttacactcccaccagcaatgcacaaaaatgtcaatttctccacatccttgccaacatgtgttgttttctgtgtattccacccctgccccccaccgtagccatcctaatggaggcaaagtggtatctctctgtgattttgatatttttaattcaaataaaccttagcacctgtattagtccgttttcacactgctgttaaagacatacccgagactgggtaatttataaaggaaagaggtttaatggactcacagttgcatacggctggggagtcctcacagtcatggtggaagatgaaggaaaagcaaagagacttcctacatgtcagcaggcaagagaggacttgtgcaggggaactcctctttataagaccatcacatctcatcagattcattcactatcacaagaacagcatgggaaagacccacccccatcatccaattacctcccaccaggtccctcccacaacacttgggaattgtgggagttacagttcaagatgagatttggatgggaacacagccaaaccatatcaacaccctttctcaaaagctccattttttctcttcttttctttcttgtcctttcaccatcttactccaaagttggacattaacttctgttcagaaatcccacagtcacaggccctcatgttaatttctacccaaatggctgagcttttcaaatgtaattggagaaacatggattttaatgtatacgatggccgggtgcggtggctcactcctgtaatcccagcacattgggaggccaaggcgggtggatcatttgaggtcaggagttcaagaccagcctggtcaacatggtgaaacctcgtctctactaaaaatacaaaaattagctgggcatggtggtgcatgcctgtaatcccagctactcagcaggctgaggcaggagaatcatttgaacccaggaggcagaagttgcagtgagccaagatcacgccattgcactccagcctgggtgacagaatgagactctgtctcaaacaaacaaacaataataaaaaaatgtatacgagagcaaaatagccatttagaagacatcatcctgtgaggcacctctgctagggttccgggagggatcaaggctacaacaaaccatgatcacaccactgcgcaaagcatttcaggacagtttctgcccaaggagagactgggcagacagaccttcctctttcactgctggccccaggtgcttgcagttctctccaagggggccctggagacctgggggtccatcagtatgtccatgtgctggagcggctgctggcaggatcaagaacttccctccaaacgctctctggcttgactattcgcctgatggaacaggcagaaggatagaaattagctctggggggagcggaaacattctgaggccagagcaagctggtgatgagtggggcttggagaaggtggcaggcagggctgttcacaggatcatgcagcttgagctaaaaactttgaagtctgttctggagcattttcagcagtggggatgaaccaatttgcatgttaaaaacgtgagcaatgaattgagaggcaagggaccacatggagggaggcctctgtggaggtccaggagacaggagatggtggctgggaccagggaggtggtcacggtgatggagaaaggtgggtagatttgagatacatcatggggaccagcaggttgtagtgatggattggatgtagggagattggagtaaaaatgatcaactcagtaatggacgtggccatgaactgagtagggcacagtagagaaggggcagatgtgggggtgaggggtgtctggtctatggctcagctagaataatgagaggtttgccctcttggaagtcacctgtgataaacttgggcataaaggtgatcataaaacaatttttttcagttttatttgccaaagccacttttggcctttgaccttcaaatagattgtaggatttttgttgttgttgtttttgagacagaatctcactctgttgcccaggctggagtgcagtgtgcgatcatggctcatcgcagcctcaaactcctgggctcaagcaatcctcccacctcagcttcctgagtagctcagactacagatgcataccaccacacccagcacattaaaatttttttttttgtagagccagggtcttgctgtgttgcccaggctggtctcgaatcctggcctcaagtgatctgcccacctcggcctcccaaagtgctgggattacaagtgtaagccactgtgcctggctggttctagttatttgaaatcaggaaagacactgaccattcaacacagagtcctcttcattagtgtctggtaagcaactggataagagagcgcttgagtttgcatctgcctgtgggtgaatgttgggggaggatgtgggactctcctgtgtcattggtttcttctgtgtcccacgagggctcggggtatgtggctgatgagtgggcaatggtggtggccctctcgtatgggatggagtggggacttacatgggatgcctctgtgtcccttccgtctcctctctgcatgtcctgtggctcctcactcctgcagcagattcctgaaggcgtcactggcccacagtgactgtgacagcagctttgcttcctcctaactgggaaggccagcttcttgccaggaagcccctgctctcatgtctgagccctctgccccaccactgctccctcacctgccccagccagtcagttcccatattctgggtccatgcccaccatctccttcccagtactgaattctccaatggttagaagcttttgggttgtgatgaatagacacgttctggatatagcttgagtcaatgagggaggtttacgaaaaggyttcagaggtggagygacccaggcgattgcagctagcgtggaagagtgttgaagcagagacaggaataccaggaacctttccagatgtggtgagagggcggtgggggagaggactgggccagagctgcattggggacccccagcaagggtcttgcctggcacagcaacctctagggggcactagaccatcatgagacaaacgggaaatggggtgtcagttatgggccggggtctcaatatgggccgggagtaggatagggcagtgaggcactcaccttgggcacagaattgaaggaagtgccaaaaaactcaataatgaagataaatcaactttaatgcaaattttttgtgtgtgtgcaatggggacagttgtttccaatcagcccaaggttcctgggtaccttggccgtttcttgccttatgggtttatgagggttcacaatgggatgtgcatagattggggagcatggagatttagatatagtcatgtgattgtagagcttttcttagcctttccacttggttcaaaatatgggaggatattttgataagtgtgtctaggggctcacatttttcttttgcttcaggctccaacatgattcccatattggtcattggtctggaccctagattccttacataacgtgcaaaacatgcattgaagcaggcagcatcttcaacaaaaccgcatattttggccaggtgtggtgggtcctgtctgtaactccagcactttgggaggctgaggcaagaggatcccttgagtccaggagtttgaggttgcagtgagccgtgatcacaccactgcactccagcctgggcaacagagcaagaccttgtctctacaaaaaaatgaaaaaattagcctgacatggtggtgcacacctgtcatcccacctacttgggaggctgaggtgggaggattgcttgagcccaggagtttgagggtacagtgagctatggttgcagctctgcactctagcctgggtgaaaaagtgagactgtctctaaaaaaactaagaagcagcagcagcagcagcagcaacaacaacaacaacaacaaacgaacaaaccgcagatccaccctaccattgcccctgcctctgttgagcatttttgccatgcgtaaataaatgcctgctcatccgcagtcagcagtctgaggaaattctgaaaccaaattacacataggctagtgctctatgccatcaatctgtaatgtatcttgttatttgatttttacgtcctttaatacatttcctaagaagtctgctttggaaaaatcaccaaaggaattagaagagagagaataagaaaacccagaaaaactaaaaggatttttcttccccccattttttattaaaatccaatcaacctgcacagtgcgagtgagtgagtgactgtctacgctttcactaacggaccatcagtttctctcaaccttctctccataaacggagaatatcaaatgagggtctgggggtgttagaaaagggttgggagcctcagctcaggttggtgggcccgctgtgccatggagcctttggggacctctgatttcacatccgtcttggccctaaatggccttctcaaaccttccccctgtctctcctggttcttgcctcattggactcaacctcttggtgggcagctctccagagggcacccccagcctaagaagcaggcctcctcccaagtccccagcctcacgaggatagtgggtaacagggtgggctcagggggccctgggagatctccagaggcctctggtgtgttcaccaatgtcccctgacaggtcttgcttggcacagggggttcctcttagagacgtgacagggcacttggactgtggcaaatgaaagaagcggaggggcaggaacagggacaccttgcgaagaagacaggccttagccttgtgccacccctatgaggtccctaagcagccctctctctcccaccttttcccagtcctcgctccccggtcctcctcagcacagccggctccaggagggatcaattcgtgggcccgggaggaggccaggcgagcaccggctgcctggagcactgggctggagcgcggggagcgcggcggggggcgcgggcggggcggggctggtgcgcagagctgtccagcaccccgaggcggggcgtgcgcccccggcccgccccagccgcctccgcccgcccagccagcgccactgcggctcggcgggcgcgtcacgtggctggcgcagcgcggcctccaggctccgggcgcgggcgaggggccgggcgggaggactgacagacccacggacgctctaccggcggcacccggccgggcgggctgggcgcagcgcggggcggcccggggacgccggggccgggcgggctgcgcgccgcggggcatgggcgcgccgggggtccccgggcccaggccggccgcggcggggctcccggggcgcgggggcagcggcgggcgggggtcttccctggcggccgccgctgagcccccgcagggcccgtgacgccgcggccgatgtggccgcgcgcgccctacgggcctgcaccgccaccgcacaaagacgcctcgggagccgccgcctgcacccgggccgcagcagccacgccagccggagcccgagccctagcccgagcccgagcccgagccgcagccagagccagagccggagccgcagccggaaccggagccggagccgcggggcaggaggcggcgcccgcgggcggccgggcccggcatggagaagcgcgcggccgcggggctggagggcgcgccgggcgcccgggcgcagctggccgtcgtctgtctgggtgagtgggccgcgcgggccgggcaggtccgggtcccccgcatggcagtccgcgccgcgccctgaccgacctcctctccggccgcggcatcccgagccccccaccgcggtggctcccgcgcggagacccagagaggggccagcaccgcttgcccgcctggccccgggcctgggagggcgactctggtggcgcagccccggctcccgccccgctcggagtagcgcccggagcccgggctgagcgctggcaggmggcccttcgtgcaggcggcagccttcaacccggcccgcccgcgctgagcctggagacgagggggccccgggagctggggacaaaggccaggccggctgtcccctgaagaagaaactgtttccggcccggagttggggtgggggctggtgtaagccgcagatggggactcggggtgcggggcagggctggaggagggtgccagtgtggaggcggcttccaggggactcctgttttccctttgtgtctctcagcccccaggcaggcctgttcagtttaggagggtgcttgggttgggccagggaccggtcaaggccaggcatggggtgggaggggctcccgccctgtccgggagtttttctgtccagctttccagcgctctgtgtaggcgagaggaggagttaaatccccaacccacatggctcctttatttactgtgatgaaggagggaggccattataagaactgggggtcattaggggacaccctgtgatgtcaccagtgagggctctgtaacctgacaggtttgctgaagccactgaaatgacaaagtaatcacccccaggcctcagggagctccgaggctctggcaggcccttgccccagctgtgtgagcctggctcagtgggaatgtgccattggggagcattgagggtgtaaccccagcgcgcccaccccaacctcrgtgcggggtcatgtgtgctgggctctgagctgctgggtgctggcatccctggtgagcagagcagggggacaggcgctccatgcttaggagctttggcctggctctgtccagggggcctgggtgtcctgggtgggggcagcggttcctgcttcctggccaggcgggatctgacacacatcctgaaccccgggaagttgggtttccccccaccccccgactctgggcccgtaaccccccgggccagagcagaaggtgaaagtaagggccaaaccccacggaggtgggtgcttgargggtggctggggagttctgctttcctcctcaargtcagcttggcacgggggaagaggatggttccgtcactagctgcgtgccctgtaaatggggattatcagaactgcctcccctcctgcctctgctgctgctgggcgagcaaagccccttggtagggggaagcccttcaaagttgtaggagcaggccagggtgcggtggcaggtgcctgtaatcccagcactttgggagaccaaggcaagagaattgctggaggccaggagtttaagaccagcctgagcaacacagtgagacctcatctctacaaaaataaaaaataaaaaaataaccaggcatagtggtgcacacctgtagttccagctacttgggaggctcaggtgggaggattgcttgagctcgggagtttgaagctgcagtgagctatgcactccagcctggataacagaacatggaggcagggaggtgggggtgaggtggtagggaccctcttgatgggcagtcttgggctgcgctctgggccttgccctgtaagaggaaggggaccagcgggccagccttgggtttagctgtggtgtccctcatgggctgctgctggtccccagcaggtatgtgggacccctgaccctttctttgtatctcccacagtgaacatctttctcaccgggagactcagcagtgcggttcctgccttaggtaagtaagcactttctctccttcctccactccttcagtcccttttgggtgagtggtccctgaagayaggccttcagggtcctggcactaccccgagttcctgtgtgcatcttttctacatcacaaaggagctgtttggctttggacaggcttcaacttgtctgagcctcagtttcctcatctgtaaagtgggtgaaataacaaggtctactcaaaacctgtctcttagtattccatgagccagtgaggcaagctcttagtgtggtgcctggcacgtggtggctttataccaccggcaagctgccgagggtcccgtggaattgacatcttgtgcctcattgcaggccatgagcttcctaggatttaatttataggrgtatgactgaggggtgacacagagaggcccatgccagggaaagaaggctttattaattttcttgaaaggaggggacatgcyacgccatgcagggccacctgggaattactagatttggacaagcaggagcaggggtggaagaaaggtgtaagttagaagctgcatcacagcttccgtgggaaagtctcgacatccaggtgctgtggctcacgcctgtgatcccagcatttgggaggctgaggcaagagaatgcttgagccctggagtttgagaccagcctgagcaacatagtgaaactccatctctacaaaaaaaatctgaaaattagctgggcacggtggcatgtgcctgtagtcttagctactcgggagactgaggcargatgattgcttgagcccaggagtttgagattgtagtgggctatgacggctccacygtgctccagcctgggtgacagagcgagaccctgtctgtaaaaccaaaaccaaaacctgaggtcaaggtgcagcccgggagaacaatgggggcctctgacttgttcgttgcctgctgctctgctcggtggggcaggaggtgcctgggtttctagttctgtgcagggcccggcttgctggagaaaggacccggagctgtcaggcagcgggacccctgctgtggtcraaggggaggcccagggtgcacagaagctgtgctcactggctcctctggcaggcttgggcctctttccctctctctctgccctgagctgtgctctcaggagcccggcctcctctgatgcttcgggctggctcaaggccgggccttgctcagcrctgacctagccccagccctgtctgctgtcctggtccacacaactgatggaggcccagtctcccatcccaatttccaggaaaaggctgactggcccagcctgggtcagatgtctgtggccatggtagagtcaggggaagggggaatgagggtgtcacagcttatgaatgtgagccccaggacaccctcctgctggtgggtgtgtcaccccaaatgtgtatatactccactttcagaaaagtgcttccctggggactagggccagtcatggagcttgggcgaggaggacactgtccaggtccttgcgtttggttgtccttagctgtcaagacctcaggccccagcagggtccacgttgccaaactccaacggctgctgttcacccctggtgccctctgtgatgggagctgcacgcccagcgcgcaaggccatgggtggtgatctgggaccctagctgtcctagagtccacttctgacacctccagcattactgaccacctgcaggtggcccaaggtacccacctcccaccacagctccatgactctgcatttccagagctttccctgggattcctgctgtgtgggaccctggattgggaaacattcccccagccccttctccaccctaactaggctcagttgctccagagggtctagcagggctacctggggacctcacaggtttttacccctcagcaaaccccatcctaagcccaggtatgttgggccctgactggtcagaacacctcctgcatccccccagcctctgggctcagccctgaagctactgtggctccaacggggagggcctgggcaggggcttcatgcagtttgcaggcagctggcagcttccccggcacgtctggggtgggactcccagctccccgtcgtcggattacaccaggcaggttggcgggggtattgatcaactttggaaattggatctgcaaattgtgctttctcaggccttgcagtgtcctctcaggaatatttgatgactctttggaccaggaaaggacactggcccgaaagtacctggtcattccttccctacttgtgtgggccaccatggctccgagggcccaggccatcttctgcctgagagaagkcaggtcacctccagctgaagctcagacagacctcttgacagcccccaacacctccgaacccctccctcttccccattatcccgcaaatcatgcagtcctcccatctgccctcactgcctgcccgctgctacacagcctgtcatgaacctcacctccatggagcattcctggagatccccctcctcattggcaacccctgaccctgtgccctaccacatgcacgtctgcctcaggtcaagcagggttcttgcctaggctgggcatggtggggcacacctgtagtctcagcactttgggaggctgaggtgggaggatcacttgagcctggaagttaaggctgcagtgagctgtgatcgcaccactgcactccagcctgggagacagagcaagatcttgtctcagaaaaaaaaaaaaaaaaaggagtccctgcctagaacttgcagctscctgcacagagcccagcctccctcctgcctcccatcccctctgcatgaggctgggctgctgctgcacccaccatggtctctgccaacccgctttggagaagagcaaacagtttaaccaagtttccctgatgtggaaatttccggggggcccccaggggtgaggctgtttggaggcacccgttgtcagggttttgctgagaggcagggcagctggcagttgtcccttcctctgctcctgatgtggctggtggcctcccaacccctgatgaagrggtcagacataggtctatgagggagaagggttctggctgaagtgagtgggaagagagaaaggtggcaggtgacacctggcttttcccagaaagcgtgggtgagacacctggcccccaagggccccaaggagaggggcaggtctatgtctgtcccctaggggaggcctctggggctgagtaggaatggacagcgccttgccctgcccctggccttgtcctccaggacaggggacstcacaggtttttacccctcagcaaaaaggtgaacatgggaggttcccagccacgctgactcagaggctgacacttcagcttagcatgcgctttagagatgcaatgtgggggaccataccacttcagcctcactgggccttcccttctgtggaacctcctgttcrgccccctccaatgggaaagatctcttcttttggatttccttcttttttttaawtttttttggagaaaaagtcttgctgtgtcacccaggctggagtgcagtggtgtgatcttggttcaccacaacatccgcctcctgggttcaagcgattctcctgcctcggcctcctgagtagctgggatcacagacgcccagtaccacgcctggctaatttttatacttttagtagagacagggttttgccatgttggtcaggctgatctcaaactcctgacctcaaattatccccccgccttggcctcccaaagtgctgagactgcaggtgtgagccactgcacccggtctcttttggatttcttcaccctacacctcccaaggaatcccagttcaggacctcagggctctgtgaggtcctcatggccagtagcctcacccggcaaagggaaccaggctggggccggggccactttgcatgtttgggtggctgcaccctgagactcctttctgatagtttatctcctgcccttcctggctgggagcagggtgtacagtgccctatttctggggcaggatcagaggctcattgtgggggctgcctcccagggccatgcatgagttccaggtggagaggtgctggcttgcacctcactgacctgggactgtcaagggtctgatggtgacgcagtggtggccagccttgctttaggaccaagagttctgttcttatccttgatgctctcacgagctgtccgtgggggttactggctccctatttgtcacagtcccgactcacctgggccttcatggtcctagtaggcccccaggggaaggggcttcagctctcagctcatggctccagctgcccagcaggtcctcagatggacccgtccactcagggacccacatctctggagcacctgccatgcattaggcactgtgcagggccctgggacatggcacggccctacctgcctgtgtgatgttcatccatcagtcccaacaacaaaagggaaatgctctgtggccgaggctggggggagggatggagggttggagctctgtgggggctatcccggagggcttccctgggaagggaccttggagctaggggtggaagctgaggagtccgtgaatgggataagaaggtggggatagcacccactagggaccaccagggcctccagggcaaagtcccctccaatgtgagagatcggagaggtccggggggctaggggttatgggagggatgaggcagagtgtggggcagggagggggctggcgctgctgtagtgaattgtggttttgtcctaagagcatgggaggcagccagagggctctccttcctttcctgcagctgggtgccagagagtcttgctgagaaccagagagaacttggcttgcaaggtcacggtgccaggggccagccatgggagagtgaggagagagtgtcactgggctcgggaaaggggtcgtccctcacctcagtttttccatctgcaaaatgggccctgccttcatctcaggctgttgtgagaawcagatggaccagcgtggggaagggtcagggtgctgtggggtgggaggtgtggtcaagtgcaggggccagccgcctggtcctgggagggtcagggcacagcggggcagggcaggctcaccacactgccctggatggtttagaagcagagagcatggagaatggatggattaaagcgaggcccatggggctgggcatggagggctcctcctttgagctggcgggcgtgatgctttgctcaacctgagcggtatacagttggcactccatgagtgcatgctggctcagtgctgcagcaagaagctgaggcccccagaggcctacagtgattcctgactctgcccctccctaactgtgtggccccaggcaagtcgctgaycctctctgagcctgtttcctcacctggttccgagatctacctttggcggctttscacttgtactcaggataaaactcaaattctgcacaaggtgtgatcagatccaggtggcgtttccagccacagctggactttgccacctctcttcaggcctgttgtagtatcttcattccactgaggggttctgcgtaaagttcgtctgctcccacccccagcctatgagttccatagagcaggccttattcccaccttactcagtgtgcctaccatgcatgcttggcatgtagtaggtgctcagtaaatacttgttgagtgagcaaagcctcagggaaggcaggcagggggccatcgcaggatgggctatgccggctgggcaggcctaggggtgtgggattctccactgacccgaggccacgaggctacaccttggaggtgccggctggcaggasgggttgttggtgggttttctcccagctctgccagagatgcgggggacaggacctaggctgtagtccactgcatagggttgggggctacagctgcctcaagtctagggggccctccttggcctcccgtacacaccacctccatgaagtcacaagttgtggccttgcccttggccatggccacccttggctggactcgatcccaccatgggggaggcctgtgctgaagcccccktcccccyactgcaaccbgcatcccaaccaaagatgggccggcctttctcggcctcctctcccgacagcggcctgcagtgggaagctggagcagcacacrgagcggcgtggggtcatctacagcccggcctggcccctcaactacccgccaggcaccaactgcagytggtacatccagggygaccgtggtgacatgattaccatcaggtaggggcacccgggggtgtcggaaggaatcaatgtgggcccacgtgcatggggtgggtgagaatgtgtgtgtgtgagcaggtgtggagggcacacgcctgagggtgtacatgtgtgtgagcaggtgtgggatcatgtgcatgtgtgtgagcatatgagtgaggcgtgtgtgagcactcgtgtgaacaggtgtatgggtgtgtgcatgtgtgtgagcatttgtgagtaggtgtgtgtgcatgcagatgtgtgtgtgtgaggtaggygtgtgtaggtatttgagcaggtatgtggtgtgtgcatgcatgtgaacacatgtaagtaggtgtgtgtgcatatgtgtgtgtgtgcatgtatgtgaacacatgtgtgcttgtgtacatggaaaagcccatgtcggagaagacataaaggacacatgtgagagactgcatgtgtgagcacatgtatgtgcacgagccatgcctgcaaaggtgcagagagcgtgtatgtgygcatgcatgtaagataacaggtgtaaccatgtgtgaaccgtaagcatgtatgtgcacatgtgaatgcatgcacgcaagtgtgtccagtgctctgggtctccacgggcctctgtggcgaggtgcccaagctggacctcttcctggtttgagcctcgttcatggggtgtggggggtctcagtcactcagctctgccaggaaggcagggccagcacacaggccactgggaacacagcctgggactggtgggcatggtctgatgtctctgaggtggcagaggtgtcctctctgtcctgcaggggtggctgggggccaggctggcactgagcccagagcatggtttctggagggggccttggggaggggagtgaatcaggcaaagcccgggtgcttgagctgcagggacatgcagagggaaagggggccaggcagtgagcggtggtcctggccaggggtggtcacagggacatttggctggggagtcactataggttccatctgccatagttttcctaaatgccagagcccaaaaagcgcaacccctgacttactccatagctgcaatgcgtgaggatgtgatgggcatgggcagggtctatcctagtctctgtgcctcagtttccccaagggccaggtggttcagggccagtgtatctccggagatgacaagctgtcaacctgctgcagccttagccagccccgtgggcagtctcaccctcacttcccatgcctgggactttgtgctgggcccatcccagtggtcccgaggtggagggttctgggcccttgggccactgcccttttggggagggtgtcggggcagggggctcttgacttcctgctccacttcggcttckggctgggggtactgtgtgcactgatggagggaaggggagccgcagcagagctggaaatgacctgcgtggatgtcgcaattcttcatggagcctcccgtgcacacctggatggggacagtgtggggacagagtggctgggagtggaggaaccaggcagtctggaacatgaggagtgggggcagccggccgggacagggctggctgtcctggccgtggctccagcctgaccactccctgctggtcctcggccatggagatcccacctactgcctcatgtctgggtcctctccgcccccccgcagcttccgcaactttgacgtggaggagtcccaccagtgctccctggactggctcctgctgggcccagcagccccaccccgccaggaggccttccgcctctgtggctccgccatcccacctgccttcatctctgcccgcgaccatgtctggattttcttccactcagacgcctccagctccggccaggcccagggcttccgtctgtcttacatccgaggtgatggaggctgcagggcaggcaggacaccacggagcacaccgtgcatgcccacaggctcccggcccacargggcggcaccctccacagggccccggctccctgtgggatgtcccctgaccgccctgtcaatctcaggacagtggcaggactgggcatgcggatgccttggacctctcaaggtcactggccccacttcccagtcttggctagtcctgggaactcacccctaaccccaggctcaggtcagggacagagcccaccctggtgttggaggggtctctgctgccacagtgatggggaaccacctgcccgcttttggccccaggccccctggccgaagggaggctcttctgtctcctgactgtcccctgctaygtctccaccccacagggaagctggrccaggcatcctgccaggcagatgagttccgctgtgacaacggcaagtgcctgcccggcccgtggcagtgcaacacggtggacgagtgtggagacggctctgatgagggcaactgctcggcgcccgcctccgagcctccaggcagcctgtgcccyggggggaccttcccatgcagcggggcgcgctccacgcgytgcctgcctgtggagcggcgctgtgacggcttgcaggactgcggcgacggctcggatgaggcgggctgccccgacctggcgtgcggccggcggctgggcagcttctacggctcctttgcctccccagacctgttcggygccgctcgcgggccctcagaccttcactgcacgtggctggtggacacacaggactcccggcgggtgctgctgcagctggaactgcggctgggctatgacgactacgtgcaggtatacgagggcctgggygagcgcggggaccgcctgctgcagacgctgtcctaccgcagcaaccaccggcccgtgagcctggaggccgcccagggccgcctcacygtggcctaccacgcgcgcgcccgcagcgccggccacggcttcaatgccacctaccaggtgaagggctattgcctcccctgggagcagccgtgcgggagcagtagtgacagtgacgggggcagcctgggcgaccagggctgcttctcagagccacagcgctgtgatggctggtggcattgtgccagcggycgagacgagcagggctgccctgcctgcccgcccgaccagtacccctgcgagggtggcagtggtctgtgctacacgcctgccgaccgctgcaacaaccagaaaagctgtcccgacggcgccgacgagaagaactgcttctcctgccagcccggcaccttccactgcggtaccaacctgtgcatcttcgagacgtggcgctgtgacggccaggaagactgccaggacggcagcgatgagcatgggtgcctggccgccgtgccccgcaaggtcatcacggcggcgctcattggcagcctggtgtgtggcctgctgctggtcatcgcgctgggctgcgccttcaagctctactcactgcgcacgcaggaatacaggtgggcgctgtgcccgcagccaggggaccgggcttcttcatcacccaggcttgctgtccccgtagctgtgggtttgcaaacgggggcctggactagctacatggaggctgcyctggtgcacactggggtccctatatcttggggtgtctgggtggagggtcgtcctggaatcctgttgttgttcctgctgcaggtcccgggcagcccagtcatgtcgccctccgcccactgcttctagggccttcgagacccagatgacgcgcctggaggctgagttygtgcggcgggaggcacccccatcctatggtcagctcatcgcccagggcctcattccacccgtggaggactttcctgtctacagtgcgtcccaggtgagcccccggagggcgtgaggcccctccggggccacttgggacagtgtgcggaggaggctggtccaggggtcacaggagcaggaggcaaggcctgcgcagggtgacctgagggcccatggccaggtggggggggtggacaaggtggtctctcgggtctcaggtcccttgggggtgtgctgtctcctgcccctgagcagcctgtctgccccctcagccgcatccccccgcccctaccctgctccaccccacaggcctctgtgctgcagaatcttcgcacagccatgcggagacagatgcgtcggcacgcctcccgccgggggccctcccgccgccgcctcggccgcctctggaaccggctctttcaccggccgcgggcgccccgaggccagatcccactgctgaccgcagcacgcccctcacagaccgtgctgggcgatggcttcctccagcctgctccaggggctgcccccgaccccccagcaccgctcatggacacaggcagcaccagggcggccggagacaggccccccagtgcccccggccgtgcaccggaggtgggaccttcagggccacccttgccctcgggcctgcgagacccagagtgcaggcccgtggacaaggacagaaaggtctgcagggagccactggyagacggcccagctcctgcagatgcacctcgggagccctgctcagcccaggacccgcacccccaggtctccactgccagcagcaccctgggcccccactcgccagagccactgggggtctgcaggaaccccccgcccccctgctccccaatgctggaggccagcgatgatgaggccctgttggtcwgttgaccgctgggctcgctggtgaccgccacagccccgctttgtaaccagggaatacacagtcatttctaccctgcctctgcgtcctttcttatggagaggccctccggggaccccagcggaggggctggcccctaagccagctggctgcactggtgggcgggagctgtgggactgaacggggcggggggggagaagagtggagtggtgagcccgtctgcagggtcccattgtacacaagcaccctggggtctcacttctctccccccactccattctgggaacccatttccagagaagcaggggaccagagcctttttgcttcatctgccctgcagtggcaacagctgcccctagagctgggagttgtcatgaggatggggccgggccatggggacgctgggtctcatccgtggtgactattttgctcacgcctcaccctcttcctgtccagcaaggcctctggaggacctgggttgggtggctcctgccaaaccctcatgcccctggccaggcaggcgccctttgccctccctgaaggtccaatctcctgggcacygtggaagggctggggtgtgtgcctgctgtacatgaagcccctggagttccctgcaggcctcaaagcccccaggacatgctgctctgtgctttctggggacagagaggccgaggcaccaacagcartggccacgtctgttccatcctatctcagggcctcggtttccccacctgtaagccagggtgagactgtgggctctgaagtcctgaccttcactctgtggtgatttacgggaagaaagrcaatcccagcctggagcccctgagctctcctgggtggccgagctcagactggcatcgaggggcctggggtaggggcggactgagctgctaccccatcctcgacatccctttagggcagggggactctgggtgccatggtagggagcgcctgtgtcaagcagcaaagccccctaatgtcaagagcctcctccagggcctgccacggcatcttcctggccagcaacatgtgtgcacccaccgaggtacgccccagccactcccrtctgtgcccatcagggactccccatagcacgagcgaacagccagccctgtttatttataggccttttcaggaaragctagcagggcagtgctaagacaggaaacccagtccacattttagggcttccttaaaacaggcttctgagagtcgtatcttttttcttttttttccagaaaaaaacaaaacaaaacttttttgccaaaacacctcctcaataaacaacatgtaaacagaaacaactgcttcagtctctacaaaaatctcattgtggcttcgagggcttgtctgtggcaggcagcagggagggtgggcaggggccattctcctcctcttcgggggcgtcctgggggtagaccacgaaacacagctcctggccccagtgtgtcatggactctgaggacagacagatggaccttggggcctgacctctcgggataggggtgacccccagctccggacacctccccttgggcaggggtcttcagggagttgctccgtcggtacccgtggttctggaaactttgggtacatcttgggaagagacatttggtggcggctgggccctgtgttcccacctcagctgctaggacaccctgctctggggtgagcctctaagagggaggtctggtctccaggccccggccccctgtgctgggtgacctgcagctgcccggctcacctgtgagtctgtgcacacactttggtttgcttctccagaacactcccagaaagaaaatgggcaccccmgtaaggatgatgatgacgccgaccccacagaccataggctctgagatgaagctgaagaccagcaggaaggcccagaagaccaagtacgccacggggatgagaaggttcacctggggaagggggagcagaaacaccgatggtgcagggcctccagctgtctgtacccccgacccctgggggtctggggaattttcctcccttccctgggagctgaggcctgaagggcaattgcacccactacaccccctcttggcgacagcccagtgtgttggaggccaattcatgggtcaggccgttggccagttttgctgaggatttttcaaagtctcagcggcaccgagctccacacagcggttgcgtgtggacttgaggcttgcacttggctggaggtcagtgattttttggtgtttcacatttcaggcactgagcacttctccacttaaggatttatacacacatggggggctttgcttttagctcaggctatggtcttctgtttttgtgtgggctcatgaaatcctggcagcctttgtgaccttgaacagttcctgagtctcattttctttaattttttttttttttttgagacagggtctccctctgtcacccaggttggagtacggtggccctagcaccgctcactgcagcctcaacctcccgggctcaagcgatcctcccatttcagcctctcaagtagctgggaccacaggtgcgcaccaccacaccaggctaacccttttatttttaactttttgcagagaggaagtctcgttatgttgcccaggctggtctcaaactcctgggctccagcaatcctcccacctcggcctcccaaagtgctggaataggcatgagcccctgtgcccagtcctgagcctcattttcgccatctgtacactgggagcattcaaagctctgtcctcatggggctgctatgaggaatggctgcctcagtgcacagagagccctgagcagggcccaacactccacaaaagctggcacctcccatcccacctgcccctggtgcccactgtggatgcaggggtggctctggcagcacccggcacagggccagctgtcccagggcctcaccttgatgggcctgtggagtgcaggcygcctccagcgcagcagcagcaggcccaggatggtgacgccgtagcagaggtagttgatgaaggacacatagttgatgagcgtgtacgtgtcgcccacgagcatgatgacggctgtggccccrcactgggagaggacctggggctgacggctggcccctagcctgcctcctgacgcccctgcaggatgagccctggccccacccccaacccccaccctggaatggctcacccctgccattacccggaaggtcctgcattgccgggtagccctgcctccacgccctgcctggcccaggtcccccaacttacacagacgaggagggcggggatgggggtgcagtgtctgacgtggatcatggccagcaggctgggcaggtgcccctcgcgggctccagagaagcacagcctagcgttggggacagatatgggcactggccacatcctgggtctcagctttggacctgatgtccctcttaagctgtcgcctctgacctcctgctccgggcccagcagccccactggacagttctccccctcatccagcctgcctgcctcttgctttctttgcctcccagttgtgatcagacacttgttaccgtgtgggatcatcatcccagcttcaggcagacccctcccccggcaggtgtcccttcctctggcccacggcatgactggtgcacacctgcaccccagccttccctccccatgcccacgtctccccagtgcagtcacctggagtaggtgaacaggtaaccattgatccctccgaaggttgacagagccacggagacaggcatgacccaagaaaagtagcccagcagcttctccccgaaggtctgggtgggcacagtagagaggccatgtgtaaggccggggcaggggcctgggcaggagccagggaccgagcaggggcccactcaccacagccaccgcattggaggagagcagctcctggggggacatggccgtgaagtaggcaatgttggtgaacgtgtacacgaaggtcaccagtgggatggagatgaagatggcgcgaggtaggttcctggtgacaggcagtggagtgcgtcagcgtcagctcctgagggtgcaggacccccgagacccagccacgagagcagctcatagtctccatctcttgtgtctgctggggatgttggggcaggaaagggggcagcattgctgcccgagacacagggaccctgttgtctgccctgccccacccccacctggacacaggctggtaggatgggagatgggggaggggccccatcacatcctgaggacagggtctgatgtctgtgcagaaagataaaatcgcatacagccaaaatcagcctggaaaattccccaaaatggccccagagcccagtccacagacccagagtcttcctggaactttccagtcccagctcgctcagctgcaaaggtttactgtcgagatccctggccgagcatcagacgcagtcattggcttcatttgtagggaccatattgtgtgtatatgcataattttaggccaaatgcaaatctctggatctatttacagcaggatgatgatattcagcctttctgaggccctgcaaggggctgtgacgtgtccatagccagagagaacagggccaggctagaatgcaagccccccggctttcttcccagggccatttttgcagggcaacaggcgtgggccaccgaggaccagccygagccttgggtggcagtggggctgggcggagaggctgcctgtcccaccagagggcctggctgcttcccagggcccagttgggggccccactcactttcgggcgtcaaccatctcctcggtgacatagttgaggaagttccagccactgaaggcgaaggagccctggaggaaggccagggccaggtgtcccacggagggcgtcatccagaaagcaaaggcattgctgggcctcagctcctcgaagtgtcctggaggcccagaagtcgggggtcagcaccatctccccagcccggcccttaccccgactcggccctaccttggaagatctggagaaggcccacgccgatgatgagggacaaggccagcagcttcccgcctgtgaacatgtcctggatgcgcgtggcccagcgcacactggagctgttcacccatgtcaggagcactgcggagggaaggcgggggtgggcgccgaggccgggacctttcacagtggaccatggccaagtccagcccaggcggcccgagaatggcatcccctatagcagctggaattttctgaagggaaatttcacccctctgtcctcctgctcagggcaggatggagcccgggcaggtggctgatctggggacagtgggccaaaggggatgcttactcaggcaggccatggacagcacccgggaggctgtggtgggggggatgcagttggggaacacgggctgcagcacgtagttggagaaggtcatggagatgacagcaaggctggtggggtacatgatgaggacggcgctccagagcagcagaaagctggaaggagcaggggcgggagtggctcaagctgcccagagcccttcccggccaacctggccctgatgtgtgcagcagggctgccctgggcctggcgcccgggggctggcgaggctgccagaggccagcaccggtccagggaggcagggttgaccttgttgaggtcttgcggctgcattgatagactgttttaacagagaaggtgttacccgtacttaaacattgacaaggctgctgtggggcaggcgctgggaacaacataggcaccaaacgcttttcttttcttttttctttttttttttttgagacggagtcttgctctgtcacccaggctggagtgcagtggcatgatctcggctcactgcaacctccacctctcgggttcatgccattcttctgcctcagtctcccaagtagctgggactacaggcgcctgccaccatgcctggcaaattttttgtatttttagtagagacggagtttcaccgtgttagccaggatggtcttgatctcctgacctcgtgatccacccgcctcggcctcccaaagtgttgggattacaggcgtgagccactgcgcccagtcaccaaatgcttttctaataacaactaggccccccattggacggaggctgtctcctgagccagggtccctgtccccagacctctcggcttcagccctggctctcgcagagtactgtggctgaagatgggtgactctgagctgtgttccccctgagggagacctatggggtgcagagactagaccttaccaagagccctagctgggggtggagagtgatggatgccccttctacctaaatcttgcctctgcagggcacccagactgtgagtctgacctgttctcaggggctttcctgcacccaggggtgggtctgcccttgggggtggtcctagcccctggccagccctccagggagaggactgcctcatcggggacatcagccatctctggatcacctgccccttgctctgcacaaccatccctgctgggcttctgggacatcctagctccatggccctcctcccctgccaggcatcccctctgcccatccccgcatgttccgtgcccagggatgaggtcctggccctcttctccctcccgaacgtcctctccaggcccgaagcatgattattctgctttcttgggtcccagcccctttgaggaccctctccccagaggagactgccacagatgcacccacagcagcgtgcaagccctggcacgtctccccatccaaggctgcccagttaagggtccccggcccatatccctcagaaccaaactttgtaaatttcagcccagacttttcctctgagccccagaccatctaggagcctctcagtagggaagtgggtgccacctccgctgcacccacctctccctctgctatgctggctgccctatcctctcgaatcaggctcctaaacgattttagaatctgcctgtacctttgcagctcttggcacaacgcagctggacaaatacaacagcttcaatcccctgatgctctccaagccccggcrcctgccgtaaacccaacctgacctcacctctagctacagcagactccctgcgctcacctgggccaccacaccctctgttcacacttcccccatcctgggatgctttcctcactggtcagctaggcccggtggggaaaatcttcttcctcccagccttagggcaagcattgctttcctgggagtcctccctagatggcgcacaccgttctctttgctgtgtagctgctgcctcttgtacacactctcaaagcaaggctcatccaggccttaatcccatttaaggggctgcttcctctctgttctgtgagcagct

SEQ ID NO: 5658 - DNA, 21254 bp, Homo sapiens
cccctagcaaccaccaatttgttttctgtctcttttggccaatatgatattcttttccttttccttttttttttgagaagggtctcactttgtcacccaggctggagtgcagtggcaccatctcagctcactgcagccttgacctcctgggctcaagtgtttctcccacctcagccccccaagtaactgggactactggtgtgcaccaccacgcccagctaatttttatatttgtattttttgaagagatggggtttcaccatgttgctcaggctggtctcgaactcctgagctcaagtgatccacccacctcagcctcccaaagtgctggaattacaggtgggagccaccatgcctggcctcttttccttttttcttttcttttcttttttgtttttttttttttttttttttttagatatggtctcactgtgttagcggggttggtcttaagctcctggccttgccgggcgcagtggctcacgcctgtaatcccaccactttgggaggctgaggcgggcagatcacgaggtcaggagttcgagaccagggtgaccaacatggtaaaaccccacctctactaaaaatacaaaagttagccaggcgtggtggtgtgctcctgtaatcccagctactcagggggctgaggcagaggaatagcttgatccctggaatcagaggttttagtgagccgagatcgcaccactgcactccagcctgggcgacagagctagactccgtctcacaaaaacaaaaacaaacaaaccaaaaaaaccaaaacaaaacaaaaaaactcctggcctcaagcaatcctccacctcagcctcccaaagtgctaagattacaggcatgagccaccgagcccagccaaccaatataatatatctttttaaattattattattattttttgagatggagtttcgcttatgttgcccaagctggagtgcaatggtgtggtctcggctcactgaaatctccgcctctcaagttcaagcgattctcttgcctcagcctccctagtagctgggattacaggcgcccgccaccacgcccagctaatttctttgtatttttagtagagacagggtttcaacatgttggccaggctggtctcaaactcctgacctcaggtgatccgtctgtcagcctcccaaagtgttgggattataggcatgagccactgcgcccggcctatttacaaaatttttttttttaaataatgttttaattttgtagagatggtgtctatgttgcccaggctggtcttgaactcctgggcccaagtgatcctctcttgcccttgcctcccaaagtgctaggattataggtgtgagccactgtgcctgcccaaccaatagaatattcttattatatatgatgcactctggtatttgccgttctgtgctattctgtttgaatttaaaaattggtcaagacccaccaaactgatttccccaccaaggcagtgacacacattagaatgacctggagaattttaaaagatactgatgcccaggcctcaccctagagattctgaagtggtttcaggactttttcttaattaaaagataaatagagatgaggtctcactatgttgcccaggctggtctcaaactcctggcctcaaacgatttctcccaccttggcctcccaaagtgctgggattaaagacgtgtgccaggctgggcatggtggctcacgcctgtgatcccagcactttggggggctgaggcaggcggatcacaaggtcaggagatgaagaccatcctggcttgatctgtagatcaagtgaaaccccgtctctactaaaaatacaaaaaaaaaaaaaaaaaaaaaattagccaggcgtggtggcaagtgcctgtagttccagctactcaggaggctgaggcaggagaatggcgtgaacgcaggaggcggagcttgcagtgagcctagatcgcgccactgcacttcagcccaggcaatagagcgaggctccatctccaaaaaaaaaaaaaaaaaaaaaagatgtgagccagccagttgcaggatttctggaagctcccaggtaatgctatatacaaccaaagtgagaaccactaacctaacgttgtctccccagcttggggaacagtgaaatgagacttagagccagggtgatccaggaacatagagggacacagaaagatacaaaggcaggttcattttatttatttatttatttatttatttatttatttatttaaattttttgagatggagtgtccctctgttgcccgggctggagtgcagtggtgtgatcttggctcactgcaacctccgcctcctgggttcaagtgattctcctgcctcagcctcccaagtagctgggactacaggcacctaccaccacgcctggctaatttttgtatttttagtagagacggggtttcaccattggccagggcggtctgaactcctgaccttgtgatctgcctgtctcggcctcccaaagtgctgggattacaggcgtgagccaccgtgcctggccgatttatttatttatttatttatttattttgagatggagtttcgctcttgttgcccaggttggagtgcaatagtgcaatgtcagctcaccgtaacttctgcctcctgggtttacaagattctcctgcctcagcctactgagtagctgggattacaggcatgtgccaccacacctggctaattttgtatttttagtggagatgaggtttctccatgttggtcaggctggtctggaactcccgacttcaggtgatctgcccgcctcggcctcccaaagtgctgggattacaggcatgagccaccgcgcccggcctatttatttttttgagacagtctcactctgttgcctaggctggagtgcagtggcacaatcttggctcactgcaatctccacctctcaggctcaagcgatgttcccacctcagccccccaggtagctgggactactggtgcatgccactacacctggctaatgtttgtatgtttttgtagagacggggtttcgtggtgttgcctaagctggtctcaaactcctgggctcaagcattcctcctgccttggcttcccacagtgctgggattacaggcgtgagccactgcgtccatccagattcatgatatttagatgttgaaatgtggctttacagactcagacagctctctgaggcaaacaaagagggagatgcaggtaccctcagcacaagccccaaattacctgcaggggagaggcggaaaatcagacaatgtagaaaccgggagaagaaaggtatggacagaccgatgcagataggaggggaaggaaatacctggaaatgagatagagaccggctggacagaccccggggaccctgcaggtcaccacacccttctctttcagctcacctgttctccaggaccagccctrctggggcccaggcccaggctytgagaggccgtgtcctaacctgccctggccccggagaagctacgttgccacctgtcccccttccctggcctggtggggcctggctttggggcaagactgagccacgggggaagggggaatcccgtacctgctgctgcttcctctgtcttggctaacgtctgtccccctgaacccctaaccataycccaagagctcccaaagcctgagaccagggtcatttgtccccaactccccatctggccctgctgttgctagtacctgttatttattacctggaggcctgtccagcacccaccctacccccataaagcattgtttacacctgtgtcttggcctccattattgtgagatggcagggagatggaagaggtccctgatggaagaatcatgtgtcatggtgtttgggggccttgtttctgttttttttttgttgttgttgagatggagtttccttcttgttgcccaggctggagtgcagtggcgtgatcttggctcaccacaacctccacctcccgggttcaagctattctcctgcctcagcctcccgagtagctgggattacaggcatgtgccaccacacttggctaattttgtatttttagtagagatggagtttctccatgttggtcaaggttggtctcgaactcccaacctcaggtgattcgcccgcgctggcctcccaaagtgctggaattacaggtgtgagccactgggcctggccttgggggccttgtttcctgattggacgtggtgtggggtataccaagcatgatgactcaggtgcctgttgcggagggagggaatttgttactgtgtggacagtttgtgacaatctgtgttctaagctcacgtgtgtaaacacgctgatgtccctgtgtttgtgacatgtgtacatgtttccagtacctgcatatgggatgatgtctataggatataatgtgtgctggttgtgtgtgatgctgacagccgtaactgctctgtggccttggtcattgtattggtgaggctggtattgtttgggacatcaaggccaggggatgggaatttggacctataggtgggcctccggtgtgtgcatgtctgatgcctgagagtcagaggcagtgactcactactgcgtgtgtgcctgtgcatgtgtaccccgaggtctgtgtgtgttttggtgtgaatttggctccttttaaacacccatgtgtggccaggcgtggtggctcatgcctgtaatcccagcacttcgggaggccaaggcagatggatcacttgagcccaggagttggagactatagcctgggcaacacagagagaccctatctacaaaaataaaaaacagaaaaagttagccaggtgtcgtggtacacacctgaagtcccagctattccggaggctgaggtgtgaggatcactttagttgggaggttgggcctgcagtgaactatgatcatgccacagcacttcagcctgggcaaaagggtaagaccccatctcaaaaacaaaactaaactagaaacacccttgtgtggccatgaaccctgtgtgtgccctgaggactgcgggcttttgtgcaatcctcacgcatgtgtggataccagtatgcatgcccttgtgctcacgcgaaccgccctacgccctcaggtggcctgcaggggactggtgcagccccgaggacactcccagttgctcgtcgccctcccatctccacgtcggccttcaccgacccggcgggagccttgagtcccagctctccagagcaatggtggagcgggcagggcattcaaaatgaccttatctccttagtctcctaaagtgttcccagctggccatgcaaatgtcttctctgtgtagcgttccgtggatttttttttgtttcattttttaattttgtgtaaagataaggtctcactccgttgcccagactttccctggttctttattctgattcccacaatcgtcccgagggggcaggccggagcgggtcttgaaaatacacatttgcacatcccttctagtccgcgttcccttttctcaagggcaacccgcacttttttgcctccgttataaaagatacttatgtaaattactgacgtgcgaatttacatacatttctcaactaactgcgtagccatttctccgtctctcacctccgttcctggacggcgagaaggaggaggagctgaccatgtaaatgaagtcacgcgcaccgcgctgccgaactcggtgccccgcgctgggcggggggcgggtaggcctgtccatgtaaatcacatcatttgcgtgccccgccccgccgacgccacttgattccaacatgcaagaaacgccccctcccagacccggcccctcacactgcgttccccctcccgcgcaaagggggcggggcggaggatgcaaatgaacctcgtgtaggccacggaccgctgtttcctttctccttggtaggggggttgtcccgaacttcctcgccccgctccgccccgccccgcgcggctcgggcctgcgcaggcgccgtcccctccgcggggcgcggtcacgtgcccaccgggcgaggcggggcggggcgtcgcgcgcggtgggggcggggtatggcgcgctgtgcggcgcagggcggctggcacaaacggcggcgccggggccggaggaaaaagctcggtgaggaggtcgcggggcgagaagggagcgggaggagactaagccggagccggggcgccggcgcgaaccgggcggggtgtgggggcgcgcgccggggcctgccggggcgaccccgggaagggggatgtgggtgcggcgcgggggaggggacgcgcgccggttacgttgggtgccggccgttgtgggggttggggtgggggcggggagcgcgcgccgggcggaggccgagtggagggggaggggagggggtccgagcggcccttaggccctgcccctgtcgcctactgcgctcagaaggggcctcagggcctgccccgggttgggggcgttggggtgccctggatgggggcacctttatctctcgtcctgtctccgggtgcgtgcaccctcctccgtcctttcctctgtcgccgcggaccctctccccgagggcccctcccgtcggtcagtctcgggacctcccttccgtctgggcgtgtgtccgcccccggccggcttcctcccgtcgggctcgggtcgaccccaccgtcccgctccgccccgggtcctccctcccagcttccctccggtctatttttctgtctctgggcccctcgttctctttgtttttggactccccagtttcctctgtcttttgacccccccgcccccaccctgactctccctggaacccccacgtttctcgttgtctttctggaacgccgaggcaggtccctcctattttccaaaccccctcctttcccactcctccacaccacccttttctactccagccctccttcttctgtctttggttaccgcgtcccacaacctgcaccacagtcctctgtcttagggtcatctacccagcccctggcctccagcctctccctatcactgcctcttatctgtcagcggactcccgcacctccagattctcagggtcctctccccgacttggcctcaggttttggggggcctctatagtcaagtctgtcctggtcgtcttccccactcctgcccataccatcccggctttcccctgcctgcctgtctctagtttctctcacatccctttttttttttcytttctctagccaccctgaagggtcccttcccaagcccttagggaccgcagaggacttggggaccagcaagcaacccccagggcacgagaagagctcttgctgtctgccctgcctcaccctgccccacrccaggcccggtggcccccagctgyatcaagtggaggcggaggaggaggcggaggagggtggcaccatgggcccgggcggtgccctccatgcccgggggatgaagacactgctgccatggacagcccgtgccagccgcagcccctaagtcaggctctccctcagttaccagggtcttcgtcagagcccttggagcctgagcctggccgggccaggatgggagtggagagttacctgccctgtcccctgctcccctcctaccactgtccaggagtgcctagtgaggcctcggcagggagtgggacccccagagccacagccacctctaccactgccagccctcttcgggacggttttggcgggcaggatggtggtgagctgcggccgctgcagagtgaaggcgctgcagcgctggtcaccaaggggtgccagcgattggcagcccagggygcacggcctgaggcccccaaacggaaatgggccgaggatggtggggatgccccttcacccagcaaacggccctgggccaggcaagagaaccaggaggcagagcgggagggtggcatgagctgcagctgcagcagtggcagtggtgaggccagtgctgggctgatggaggaggcgctgccctctgcgcccgagcgcctggccctggactatatcgtgccctgcatgcggtactacggcatctgcgtcaaggacagcttcctgggggcagcactgggcggtcgcgtgctggccgaggtggaggccctcaaacggggtgggcgcctgcgagacgggcagctagtgagccagagggcgatcccrccgcgcagcatccgtggggaccagattgcctgggtggaaggccatgaaccaggctgtcgaagcattggtgccctcatggcccatgtggacgccgtcatccgccactgcgcagggcggctgggcagctatgtcatcaaygggcgcaccaaggtaaggctaggtgggggcctctttggaggggctttgcagcaccctggtttgcagcattcagtgctctgagcacagtgggtttggagacaggcttctgggaggtcacagaaggtttaggcagttcagtggagtgggtatgcttacttgtggggacttgggggggtctttatcctccctacgggccttaatgtgtgcacctgataagctaggagtttgtcctggagccacagtggttcttttttttttttttttttttttcttttctttttttattgatcattcttgggtgtttctcgcagagggggatttggcagggtcacaggacaatagtggagggaaggtcagcagataaacaagtgaacagaggtctctggttttcctaggcagaggaccctgcggccttctgcgtgtttgtgtccctgggtacttgagattagggagtggtgatgactcttaaygagcatgctgccttcaagcatcgccacagtggttcttgactttgccaggaaccctcttaaactcatgagagctgctgacattcacagcgtggaccttggtggggttcatggcctcctggtgtcagtctgtggccccagaccaagcacggggatgtagataggcacacagttcacctggccgttctctgttgctgtctgtccctgtccacatccttccctgtgctcctgtcgtccatccctgtttgctggcccatgtttctagtccatccatcctgtctccaaggcaggagaagcagaagggggagggtggctgtgatgagtgagccctggsstgagggaaggaaaggggtgctgcccgctgggccgagtgcttggccctggactgcattgtgccctgggtccccactgtggcatctgcatcgaggacagtctcctgggggtggtactgggtggctgcctgttggcccaggtggagctcatccccatgtctcccacccttcactgtcccagtccctgccctccattccccctgtcctgtgtgtcacttcctccctacccatgtctgtctcttcctctgcctttatgtgtttgttcttagtccctttttctttttgctttagaacaatagttcttaatggtattttggagcctgggtctttttgagaatctgtcagaggccacagatcctctcttaagacaaatgctcatttgcttggagtttccgggcagttgtcaaggcctcatggcctccagctgcctgttcaggaacctggggtcaggagcccagcacaggacagtggtccatagggcctttccgggctgctgacaggatcattgtcttcatgggtggtgtgggggcctggccttgagtccaaggcttggtgtcctttggacaaggccctgtggggagtgcccactgctcaacacagtgatgcctggctggctgatggcaygggcagtgttgtgccctgcaggcgtgaggctgagctcctgatgtcctctgcctcctcctgcagatcccatcttgggttctgcttctgtgtggctttcctctcaggctggagctggctcagggaccagggctcccccggggccaaggcctgtttcctccccaccccagctggaacttgttctacttccctctccctcccgttacttgatagctgagccagagccggcccctccctgggcttggctcctgtgcgggcgggatcagtggcctccctggctcagcatcttcaccccaggttggctgtcgtcctcgtcagggggagaccagaagggctgagtggcccagatgggacactgctctgagcctcaatttgctgatccacggaatacgaaaaccaggttacatccccagtgagtctggcagtttggggaggggagagtaggagaagatctcttgtgttttggtgcctctggtgcccacyttctatgtggttggggacagggccccagcgaggattggggaaggggcgtgtttggacttttttagccctaggtgaccttgattgtcctagggaagtaaggacaggccaggctggactgagaacataggggaggagccctcccctccccagtgagacagcaactccaggctttcccgcttttagatgggccccatctggactctctcctgtactccagagtaaggctgtggggtgctcaggtgggctgcagcagttgccgtggggacatggatcaccagtgtggctagagccagtagaaacgtgcttcttagtcgttctgagtggagctcctgtgtcatccttccttcccccaactccctggttggggacaggtgctccgttgacctgtaggtgggagagagttgactcccactggcagcaagggctaccagaggggaccccagggagagtccagcttgcttggtttgctccttgaagagcagcttggaggtgggacagtcacaggcttctgactggggtgtgtgtgtagtgggggtggggctcttggcaggcagattgtcaccaatagcctttaagtctttggtctcctggccctggtcccacctgtccctcccctaggtgggaggggtggagagcaagtttcctgaggccttcccctgtgagggcaggaagtagatactttccttggggccagaggatgctttcacccccaaggtgtgtatatgtgggggaagggtggggccctaaagagcaggttcctgtttctgtgtgagtcccatgtgcttggtgggaggcgctgtgtgagaatgtacagggcaggaggaaacatagcagggctggggtgcagaggaggcccagagcagtgcactccagtctgcaggtactgcactgggcactggggagaccaacctggccccaggggcttccctgtggctgccttccagggcagtactaggtaaacaggtgcctgtgctgatgccatgttgctaggagtggaacggacaatcagccggagtactcaaggtgacccttggtctctgaatcctgaataacaaagagggtcagaaggaagagtgtcccaggccagtgctgaggccttgtggtggcgatgagctcagcctgttgaggcatggagcagagtgatgggagaggcacatgaggttgggggcctttgaggctgtggttgggaatttgtattttctcaggatggagtgaagacctggagaggaggggctctggctgctgtgtggggatgaattgtgggaagagggtgcagcactggaccccttccctgccacccatccacgtgcatcatcagtgtaatctctgattggattcctaattggggaggtcttgcccrtctctagtcagtaactcactgtttctaagcctcctggrccatggcccaattcttctcccagtgaggtggttgctcagagtgccgacccttccatagggagtgagcagtgcaaagaaggtgccccctcctgaaccttgaagtgtagccattagggttttccctggggggccttctcactaattgtactctggtgctgccagagagaaggttgtcagcttcccactgctaggtggcagtagatggtggcagccctctctttccagggcaaggtctggtggatgaggtgcacatggttaatgcagagcagcttaacatccaccacagagggtgagccctgggataatgtgttgggaggcgtcctggggagggtgaggattgaagcagcccagtctgctgtggcgtgcgtgcttggcaagcatcctgttgtggcagtggccactgatgtttgatcgtgaatgtttatcttgggactgtcttgctgggccgggcccataggtgtagctgagcattcgtggggaatggacgccagcagagttgtaccagggcagagaggtcagggcagagaggtcaagacagatggtccgggctggggagaagttgaagggtccttgtgccagtcctcccctttttgtgtgctacctcatcttgccactgcagtgactttgggcagagggtgggacagggaccttttaaaatttttaaatggcatttcagcctgtgctccagttctccatgtggcaggcactgtgctggctgtcttcccagacacttgttatcttgttcacttgttccacaacaacctgtgaaatagctgtgagctccattggatccatggatgaggaacctgagaccaggaagtcacctgcctgatgccacagctcatgtggcagcactgagacttgaaccagggaattgtgtctgcagaagtggctgggccatttcctttacctctcagccacctttctgccagctccctgatgacaaacatcccggggccctggccacagcattgtagggctgggtcaggggagtggcaactgtcaggcagaggaaagaaccctgtagacagagaaaccaagccctgcaatgagtcctgttagatctccaggagttggggctccagaacctcccaagttatgttctcagagagattaattgctaccgctgtaaacagcagtgtttattacccctgctgtacacatcaggcagttgaggcccattcaggtgttggaactggctagggttacccagcaaattatccttggagttggaattaggtctttctattcagactgtagcttttggctcctgttcggaggtctatgggacagataatttagtggggattctttgtagtccagggcagcagttcttaacattgctgcatggtagaattacctgggaagctttaccaatttcaggcccttccttaggccaggtacttcagaacctcagagctccccagggggctccactccacagccaagggtaagaattcctggtctagggctgtgaggccacctccttgcacacctgaaaatgtttaaattggtattattctactgaaatggctgaggtggggtttggggtatcttgaaacaaatcaaactctgttactaattgagccctagctgggtgccaggccccaggtatgtgtgttgggagggagtgggctcttgaggcccaggarctgaggtttctgatagacttggggatgggattttggctgaaaaagaaagtcttttggggcaggagcttggaacccttgacccaaggagtcatggggaagatggggcaaggaggggtgggaaaataggtaattcatggctgcttctctaagatgtgcctgcctagccccagtaaacctacctccctccatccctgccaggccatggtggcgtgttacccaggcaacgggctygggtacgtaaggcacgttgacaatccccacggcgatgggcgctgcatcacctgtatctattacctgaatcagaactgggacgttaaggtaggggtgagggtgagggtgagggtggcgctggggctagggctggggcgggggtggcgtgcgtccactccattttccactctcagcccagattctggcattctcctgtttctcttctcaacacacagcgggcagtgcgatctgccggctcttcctgggaaatggcacctcctcctctctagcggactgtgtggtgggaactcccctctttccgggaatggtgctgtctgcccagccccacccggccttgtaatgaacactttcccccttttcctgtctttagtagcttcctgcccatctccatggtgatgcagtctctgggttgtcattcactttgagagcccgaggggtgggagggagtgatgcaggcagacgctgcgcctcctagtgggctcccggggcaccgtgggaggcagcggctcctggccgtaccagctagcctcatcctttggcctgcccccaggtgcatggcggcctgctgcagatcttccctgagggccggcccgtggtagccaacatcgagccactctttgaccggttgctcattttctggtctgaccggcggaacccccacgaggtgaagccagcctatgccaccaggtatgacctgtacttctggagamgcacccaggtgctccccctgtgacaatgtcctgtcagagcctcagagtgactagggagcgacgaagtattgagagggggcctaggtgggagcagaaccgggtggctcaaaaggatggccgcctagtgtgtgtggatatggtagctggaattgcagaaaactaatgtccaaccaccctggtctccaggtaygccatcactgtctggtattttgatgccaaggagcgggcagcagcyaaagacaagtatcagctaggtacctgcttccctcccttcagtccttcctattctgtgggccctcttgggcctgatgccaccccatccccctcatcagcctcttgttaaatcccaccactcatttttcttcatctctgcccaccttccttagcccactctcctggtaccccaacaggagccccatttcttcctggtcctctccccatctccccaggtttcccttggcttctttgtccttctgatgactcactgtctcctgtcccctctcacccccagcatcaggacagaaaggtgtccaagtacctgtatcacagccgcctacgcccacctagtggccagtcccagagccgcatggcagacagcttaaatgacttcaggagagccctgggcctgtgctggctgctccttccctgccaccgctgctgcttctgactttgcctctgtcctgcctggtgtggagggctctgtctgttgctgaggaccaaggaggagaagagacctttgctgccccatcatgggggctggggttgtcacctggacagggggcagccgtggaggccaccgttaccaactgaagctggrggcctgggtcctaccctgtctggtcatgaccccattaggtatggagagctgggaggaggcattgtcacttcccaccaggatgcaggacttggggttgaggtgagtcatggcctcttgctggcaatggggtgggaggagtacccccaagtcctctcactcctccagcmtggaatgtgaagtgactccccaacccctttggccatggcaggcaccttttggactgggctgccactgcttgggcagagtaaaaggtgccaggaggagcatgggtgtggaagtcctgtcagccaagaaataaaagtttacctcagagctgcacacatctgactccatctgcaatttagggcctttattgaccgaggagggtatggaggtttgagggccagtgagcccaccatagtggagcctgacctcagcaggccactggctggagctggaagtctggggggacactgcccaggccagtgcactgcaggtgaggttgatggtgccagggcgtaccacagggagcaggcagaacctctgtaaggtggccrtaaggaataggaagatacccgagtgggccaggcctgtgcccaggcacatctgctttgccgggtacacaggtgcacagtgagcaccaggtaccccagagccagtccaggctggtccccttcctcctctgcctgcacctgaggcaaagggcatgaaagcatcattgccctggaacttgcccttgtccaggaagttggtagggttgaagcagtctgggtctttgaattgagtggggtcccggtgtgcagtcacaagcaggggaatcacaaaagtgccctggggatacatgcaacttgggttacctgcgggcttggtgagcacctgcaccacctccatccaagacgctttttaaaagcccaagggaataggccgggcaagtagctcacgcctgtaatcccagcactctgggaggctgaggacagatcacttgaggtcagaagttcgagaccagcctggccaacatggcgaaacctgtctctactaaaaatacaaaaattagccaggcgtggtggtgggtgcctgtaataccaggtactcaggaggctgaggcaggacaatcgcttgaacccaggaagtggaggttgcagtgagccaagatcatgccactgcattctagcctgaatgacagagccagactccgtctcaaacaacaacaacaaaaagcctaagggaaggcagagctgccttcctgctccaggggtaactgattgtgttttggtctgcacagcgcamacctgctgattctggctgatctcatgcacccgggtcccgcacgggatccccagactcagtgggtacctttgggcagacagtggctgtgcaggtgggtgtcgagggtgagggtgcgcggcagccccaggggcaccacgctgatgaagcactggatctcgagcagcactgcgttggcgtagggcaggcacacgcgatagtccaggcttggggcgggcctccaccctaccacagggtccagctcctgcaccttggctcaggccgggggaggctgtgagctgcgcacttccaggaccctccagccatccccagactgcagcctcccattctgggtctctccgggttgcacacctgccacctctaggtacttaagcagaatgaggagcccrtagcacagggtggtgctcgtggtttcggtgacgccaaaaaaaaaatgcgtcgtcattaccgacgtctactcctggaaatggctstccgggtcctgctgttactgtgggcagaggagatgtgctgccgcgtgccaggcacctgttggtgggcggcatggatagagtttagagagctgggacccatgccttacccatctggtcaagcaatcaatgaaatcgcggggctccgctggctgccgcatctgccagtgtcgttgaatttgctcagagatgacccgcagctccgaaaagtttcggaagattcggtgrtgcgggcccgggagccagtccatgagggacaggcaaatgtacatctggagagacagggtctgtctcaacatgggccctgcacaaggccactaggccttagtttccctacagggagattggactaggactttgatactggatgttctagaactcttccaggaatctgtcccattctaatgatccattgtaggtaggtctgtgtactcgggatttggcataaggctggacgcaccaaggaaagattgtggccggccctctcacctcgccccatctggaactaatgatgcagaagttgtcactgaagaggttcaggagcctcaggaactccgggtccccatagcgatagcggttcccgaagacaagaacagrtaacaytggatacagcattayccagtagccgcacggggtcaaayggggcycctgggggtaggaacaggacggtggtcataacgcgtggtcctgcccccagccagccccatgggcttactggctttcttccacccaaataccttccagtggccccgtcttggcagtgcaagggactctcccacaccaggcccttccgctctcccggccaggccgaagcaatggtggcttgaaattcgtctagcagacaagccgcctcctccaggacgcgcgcctcgacggtccgcgtayccaacccgaacttcttaagcgctccaagtgcaaaattgcgcagtgtccaccagcacggccggttagaaaacaagattcctgtggtggggacgggaaaggaggcgggccggggagccggccacgccctatccaggaagcgccgggtcactggctacatccctttaggggcctccgactcctgcggccggcttcgttccctttgcttctttaccagacctccaagtgccctatccacacattggccccgcctttgctgggctccatccctgacctaggctggctctcgggctttgactcttaggctcttttctcctgttggctgcaggatgaacctccattctaaccttacgctttagcgccgccccgccctctctcggccgtttgcacctcattagctggagtctctattaggccccgcccccatttgcccgcctctaccatttacccgcccagcctggagcgtccgggccggcaagtccagcgccggggcctcactgtttccgcgtgtgaagcgttcgaagactgccatggacccgcggccagagaccgcatccgcctgtagcactaacgcgtcccgcagcgctgcgtagccgcacagccccaccgcagggcgcgggcccagccgcactgtgaacacccggccccagcggccggagagctacgggtagccggtgctcagcgggtgcccatagggttcctcatcggagccattgcccccagctccctcttccttcagacccaggagtcctcgtctcagaccctcattcctcaggcccaggaattcaaatccccagctccttcctccctgagatccaggagtccaggcccccacttccttcttcccttaggacctggaagtccagcttcccagcctcctgcaccctcagagtcgtctcctgggccctcagtactcagcctgcccaccctgaaccagaacagaccccctgctcccctcttcccacaacctgatttcctgctctgggctccttcgttacgacccagtgtcccggccccaggctctccactccctattctcctttcctagtactcagcagtccggagcactcatccttcctgtccttcctcaggatcatagagtacaaaccctcagctgtcttcattcaggaggagttctagtccccagccccaccttcacgaatccagaattccgttcccccattcctgtcgggaatggagtgcgcggtccaggcctccggactgcagctgcaagttccccagcaatgggagcggcctgggccggggaggtagggacccccgcatctgagcgcggcacccaccctacccccaccacgccggcgccagcaccagaagccacaacagcagcgcagcgatacccgcgacatgcctgcaattctccacgcctgcaccccttcacctctatttgatttccaaggggtcttaggggtggagcggggcggagacccgatgtgggaggagtgggcgtctccgggctgctcattccgtggattccccaacccgacgtctccaccccgcccccagccctagtggagctgtgccctggctccccctggctttttttgtgtgtctgcctcagcctgtcttacttagcaactttcgtgcaccagcattttcatggcaacacacctggacaacaggtgcaccctcctgagcccctagcacctttgagtccaatttacttggcctgtaagtgtgtattcctcaatctccgggccacctctgggtcccctgaacgctgtaccctgtacctctgattcctaaatacacaccgactctcaaatacaccacttctgttttttttttttcccttcttagagtttcactcttgttgcccaggctggagtgcagcagtgggatctcggctcactgcaacctccacctcccaggttcaagattctcctgtttcagcctcctgagtagctgggattacaggcatgcaccactaggcctggctaatttttgtatttttagtagagacggagtttcaccgtgttggccaggcagatctcaagctactgacctcaggtgatccgcctgcctcggcctcccgaggtgttgagactacaggccactgcgcctggctcaaatacacttctaaagacacccctggcattcctgtsctctgtgcctgtgattcctaggagctcacacctgagcccttgtcacttccattactcttaggaccctgtgtactatgcttgttccccagatctgccttcaatttccctggcttctgggtgtccatcagtctggcacttctgtgcctctccttagttcttcagggtgcctttctgcatgttgatccccttgtacctccatattatgtcctgccctgaatctaccatctctatccccaaggcactggctcccagatgcccccaaatgttctgtgcccatgctgctgaaccccctggtatccagtcccccaagtccctgtctgaggccaggccatgacgacagacaaacttatccctcattctctcatctatcccccccaacccccatcctagggcatgggctagagggggcagactctggcctggatgggccagggctgcggtggtgggagcagtgaggttggggctgtatttggaacagactgttcaggaatgtggtccaccctcctgcctgtccctgcttggccaaatccagccttcctccaagtgcctggcacagggcccagacctggggagatggtgggcggggggtggactgtgcagagcctaggactggcattgtctctgggagggtctctgtgtatctttgtttcatctctcagtcttgcttgctccctccctccctccctctgtccgtccctccctccctccctccctccctccctccctccctccctcccttccttttttcttttttttttttgagacagagcctggcttctgtcccccaggctggagtgcagtggtacgatcatggctcactgcagcctcaacctcctgggatcaaacaagcctcccaccttggcctcccaagtagctgggaccataggtacacaccaccacgtccggccaatttttgtattttttaaggagacaggatgtcactgtgttgcccaggctggtctccaactcctgggctcaagcaatctttctgccttggtctcccaaactgctgggagtatagttgtgaaccagcgcgcccagcctccctcactctcagtctctgtgtttctgtgttcatctctctctctcctctttctgtctcttcccatctctctctcttttctctcagtctctgcctctgtttgtgtctgttttctgtctctcttttcagtatgtctgtgtcttcccctccctgtatctcccctagtctgtgcttccctttgtctcagcctggcacttctgtgcctctccttatttcttcagcgtgcctttccgcatgtttacccccttgtacctccatattctgtcctcccctatcctgggtcttcctacctgtcagcctttctggaacctggtgactgacaggggttgtggggcaggacccctgctcagagctgctgactccactgacagcgggagtgtggtggggcacagtaagctgcatcctcccccagccctaccccaccctctgtgacaggctttaatggatcctgtttattatggcttctggtttctccccagctcctgactcttcctccgttttgctcgggtgggctgtcctctggaatgtcagctcttcta

SEQ ID NO: 5659 - DNA, 54775 bp, Homo sapiens
tgagtgagttctcacgagatctgatggttttataaggggctctttccccttcgctcctcactcgtctctctcctgctgccatgtaaagcaggtctttgcttctccttaaccttatgccatgattgcaagtttcctgaggcctcccccagccatgtggaactgtaaatcaattaaacctctttcctttatagattacccagtctcgggtatttcttcacagcagtgtgaaaacagactaatacacaagagaatacactgatttcaaagattcttctttttttttttttttttaggtggagtctggctctgtcacctaggctggagtgcaatggcacaatctcggctcactgcaacctccgtctcctgggttcaagcgattctcctgcttcaatgtcccgagtagctgggattacaggtgcaggccaccatgcctggctaatttttgtatttttagcagagatgggttttcaccatgttggccaggctggtcttgaactcctgacctcaggttatccacacccgcctcggccttccaaagtgctggaattacaggcacgaggcaccatgcctggcccaaagagcaatctccaagcaattttatgtagccaatgtagatttagtgcaattagagtagaatgaataacctagattataaactaaagatccaagttctcgccttacctctgctcttgtcatgaaaacaaaacaaaacaaaacaaaacttcttagcctgtctagaccccagtttctctataagatgagaatattagtcacgatttggtttctaagatcctgtctatgtttgagactacagatacctgttgctacatttcccttcatagctctgaacaaggagaattcagcccaattctcatggccttctacacaatccagagtttcagtgccatatgtactacatttagtgtcaaattaagtcaaaggcttcattagcctgaaagctctgtccctggcctgggcatggcaaactgtatcccccactgaccatccccctgtctcccttctccccagagactccagtagcctggcgtcatcacaggggccagacatatccaacatgttcccagcttcctgccactgcactttcagtgtgcctccctcttcagttacccaaatcctgcccaccattccagagccagttcaatctcacccatccaggacccccgagacccccatcgtaccactatagtctaactgtggtgtagaccccacactgggcacattgcgtacgctcattattggctgtgacgtctgattatgcccttctcctggtctggaagctctcggaggtgctccataatacatgaagagaagtagtgctggtgtgggaatagtgaggtgtgtttatccatccagctatccggcaccagcactggtctcagctttctgaggtaacacgttctgagccttagtcttgagagaacataaagaaaactttttttaaaagtagtaaaaagtggctgacaaaagctgaccaaaagcctttcaaaagaaatgctaagttatatctaagaaagtttacccaaggtcaggcaaatatgaaacctaaagctagacgtggggaagaacttccggagagttgcaattccctgtgccccagcatccccaggagggcatgcccacatctgatttagaaatctgtgtaaaatgagtgaaggtttctatttcttgggcagtgtgggcacaggtctttggagaggtcgatggcctcccataaaatccttcctgcttgatggttctggatcctcagccacagctcctaatagccatgaggtttgagcccaaaataatttatgtgtttgttttttcagccccaaaatttccatagaatcaaagtagtcagagctgaatggggctaagagaccgtccattcctgtcttctcatcacacagatgagggactgccacccagagccgtagaaactgtcccatggccccagttcccagacccttcctctctcctacagctccaagttcactgtgcattctaaatgaagatgtaaacataagcagcaacactcaagagtaaaaatgaagtgtgcatatgaaagaaacctattcacatggaccatattacattataatcacagtgtttactgcttgactaccatctgcctggcctagcaagggtgtcagtgaggaagagaggacaaggggtaccaatctgtgaactacacatggttcttgctctcccagcttctctctcccattggcaaggcaacaggtaaacacatgaaaaatcaaataatgctataagagaaaaatgtattcaggacaacaacaggtttgtatgaaggcctttcatcatcgttgtcctacctagaaactgaatgacagggaatcagagtcacaagctatgaagtctaactgggctggtcccagagaaagattcagtgcagtaggtggggctgcagccagccctgggtgggtggaaggatgacatccacataggcaagagggtgataattcacttacgcagctcctcactgcacattgaaccctgctgacttctggcttctctcccgggaggaactgcgactcaacattctgaccttatctcttgggtagcagaatgatggagaaggaaagtttctttttgcttctcgcaggggttaatcatccatctggaatgcctacatttggttgacaatggctcaccctatcatcttcctcctgaaccattcacctaaatgtgccatttctttcctgatagttctcatttgtgtgtgtgtgtgtgtgtgtgtgtgtgcacgtgctcacacatgcatgctgtcactgggtaaacaggccaccctgggcacagttccatctacaatgtttgaagtttactttccagcttctgggcatcatttgcaattataatgctgtcayaggcagaaacgagataggctaattaatcgttgtcaatactgatccctatttgccagatgagattttggagcagcatggctgggaataattggtatagactgtatttccttgctttatgtcactggaaatatttatttaagcatcacggtcgctatgcataaatatcctggaaaatggggtatagctgaatggtgcagattcattcattcatattcagcaaattatgttctaagcacctacttcagtaygtgaacagcactaaactcagaatattggtctgctggggtcctttattagcttccatgattccctgaacttggccaagacccttctggtcggctgcagataggcacaatggatagttttgcttctagataatgtaactgggacattcagcattatctatcgccttgaaattcctctagtcaggtggctttctaatgggtacccagagccctatgactacccagattgatggtgcacccaacaggactttgcatttatgagctgataagtcacagtcactagctgagattaatctgtgtgacaccagaatgtgtctctatctaaaggaaaagggatgaagggtgatatctttggtcacaagtaatgtatttccatgtagtctttgacaaaggatctaagtggattttgtaattgaagaaaaatctatgcactaatctttacagcatttccgtgagtgtacgcaagtcagctcaacaattcaacatttgctctgtggggttgtgctagaccctgtcaggggataactactgctggctggggcccagttcagggaagacttgccaaagaccttcaggaaaagagggaagctgagtcttaggtttcttcctttagagatggtgacagtcctctcaccacctccaagcatctcacaatgtttccctgcctccaagtcatcaaattcatttttgattcctacttcataaaaattacattctcccagcactttgggaggccaaggcgggcagatcatgaggtcaggagttcaagaccagcctgatcaacatggtgaaacaccgtctctactaaaaatacaaaaattagctgggcatagtggcactcacctgttatctcagttacttgggaggctaaggcaggagaatcgcttaaacccgggaggcagaggttgcagtgagccgagattgtaccactacactccagcctgggtgacagagggagactccatctcaaataaataaattaaaaaaaaaaatatatatatatatgtatatattctctatggatgctgaccattggaccctggtttcatctgcacgtaacagagtaagcttggacttgtgcttgtaaattaaagctcgacacctccttttggcttctctatacctgaatattcttactcactctccttaatgtgaatatgcatggaagcaggaccatttcctcaaacactagcagcagcgaaccctgtggaaagtcagtccacatagaataattcaaataaagtgttcagagaaatggggtttcagagcaattactttttccagacctttcacaaatcagtggtgtaggtatgaccagccttgagttgagacctctgtaatatccatctttaataacattaatatgctgtggatgagcaactgatcactggagggagtttagctgcccataggagttcatggctaatgacaatatctgaataaggacaggtgtggagcccaggtgcaggaagcaggcgaaggtctttctgtgagtctcctctgagggaactgggtctttatacatagttactgtttcagaattgatccttctggaatcatcagtcttcaccagtagcttgttacatctgggggtatctcataattcaaacaaagctgacaagttgtaacaatgagcacacactgacttctgcaacaggcgctgtccacttcccatccgcactctaccggcttgctcctggccgcctcccactcgccttcctgggtggtcccccagcagttatacctacctggttgtcgccccctctatcctaccacaattgctcactagcggtttcctgcgtacacagcttgtctccctaaccagagtggaggtgccttggggacacagccaggctcagacattcactcagctcatcatagtgccatcccatcaataaccccttctgagtgatcctgggttagtaaaccgagtgtccctgaaattccactaccgctgattccctacagctgggcagaggcagcgagcgctggctgaagyttccggtgggaaatgggcagtgcctagaagagaaggaaacgatgcatgagaaggttccagatgtctatgaggaacatgacgtgtcctgtccactactctgcttttcctcgtccgcctccccaccactggaggaaacctagaagctggtgcaggaaatcctcctctcaacaacccaagaacactttgcacaagaggggtgcgccctcggaggttgctcttccccagaggcctctcctcgctggggtttcttgaagacagatacttggactcctgctgggaccaggcaggccacccatcctcaggggcagtgactggtcactcaccagacctccctgcatcccccttctctctcctcccccagcacgggctgaaccccgcagccacagattctgatcaggattagggtgtgggtgcaaatccaaggtccaccaaaatggaaaagaagtaaccgatgggaacacgtctccaccaagacagcgctcaggactggttctcctcgtggctcccaattcagtccaggagaagcagagattttgtccccatggtgggtcatctgaagaaggcacccctggtcagggcaggcttctcagaccctgaggcgctggccatggccccactgagacacaggaagggccgcgccagagcactgaagacgcttggggaagggaacccacctgggacccagcccctggtggctgcggctgcatcccaggtgggccccctccccgaggctcttcaaggctcaaagagaagccagtgtagaaaagcaaacaggtcaggcccgggaggcgccctttggaccttttgcaatcctggcgctcttgcagcctgggcttcctataaatggggtgcgggcgccggccgcgcattcccaccgggasctgcggggctgagtgcccttctcggttgctgccgctgaggagcccgcccagccagccagggccgcgaggccgaggccaggccgcagcccaggagccgccccaccgcagctggcgatggacccgccgaggcccgcgctgctggcgctgctggcgctgcctgcgctgctgctgctgctgctggcgggcgccagggccggtgagtgcgcggccgctctgcgggcgcagagggagcgggagggagccggcggcacgaggttggccggggcagcctgggcctaggccagagggagggcagccacagggtccagggcgagtggggggattggaccagctggcggcccctgcaggctcaggatggggggcgcgggatggaggggctgaggagggggtctccggagcctgcctccctcctgaaaggtgaaacctgtgccggtggtccccctgtcgggccctagcacccgctgggaagacgtgggaagctcacagatttctttctcctgtcttacagaagaggaaatgctggaaaatgtcagcctggtctgtccaagtaaggcatctgcgcatggggcgtggaagggcgcccagccccgtgcactctcctacacccgggtccctgagggcctcccactctacagggctgagatggcatcgtggtgtgccttgctctgaccccaggaagcaagttccctgagcctctgcccacacccaagggatgccaactctcttctacctggccttctgttctgtcccaaaagttcagcctgggggcgggggagggaagggattgtctctccgctggcctgtgcacactttgaagaaacatcactgtcctgtttatcagtgactagtcattgattcgaagcatgtgagggtgaggaaatactgactttaacctttgtgaagaaatcgaacctccacccccttcctatttacctgacccctgggggttaaaggaactggcctccaagcgcgaccctgtgtgctggagccgcggggcggacttctgatggggcagcaccgccatctagtggccgtctgtcatcactgcagctggactcaggacccagatgttctttttcttcaattgttcagaaaattcctctcaactacagtggaaacctccagaaattcttttctaggagtttgttaagttagttacgcttaatgcttaatgaactttgccttaagtatttggtagtcttagagtcacggaattacggcgtgttcaagctaaaaaagcattagagatagtactatttgcgtaatgttgtcatctcttaatttgccagagggtctctcatgcagattttctgagccccattacttgacacttgtcactcccttccctgtgcctcagatgagatattcaagacatgccagccaatttaaacattagcctcagcaaaaacataatggagaagtcaaatctataaaggaaaattaagtataaagtcaattaaaaaataatttgagttgaattaccatttttaattctctatgccactgcccctctctgcccagaattggctgtccttgggagagctatttctgctatgtggctgacgtatttctccccacgttagaagatgcgacccgattcaagcacctccggaagtacacatacaactatgaggctgagagttccagtggagtccctgggactgctgattcaagaagtgccaccaggatcaactgcaaggtatggaggatgcaggcaggagggacctagagcccacagctttcccccagccctgttccagcgggcgcccaacacgcgaccttcccggaggktgtgtactgagcaaacgcagaacatcccagaactgttgtaatctgatcaaagcactgggactttgcctctgtttgtaagtcagccacattgctgagatgtggtctgcccccaccaaatttcgcaagtcagaagtattttcccgttaacttcccagatgcaataggaatccatgatctagattagcagcagtgtgggtctgtagatttcagcgtgagagaggcccagtaggtgagctatgggaggcaggcaactcggaatcgcactgtgaaatgcagtttttataatttaagtcaaacagaatctgttgctgaaaaatgaatggaaagaagaaaaaaatataaacatacagtttgttctaaaataaaactttgcttattattgagactggttgtactcatgttacatacatgtggagcagatctacaggctgctattggggtttgggtggggaagagaagtcaagctgagcagtcacctttttttagagagtaccgtagctcttgtatgtgctgtccaatatggtagacatgagccacattgggctatttaaatggaatgaaattaaaaattcatattcgttgtcacattagctgcatttcaactgctcaacagccaccctggctactggctcccatattgaacagcacacatgtacaacatttctataaagttatttgaatagtgctggataataagtaggaatccgttgaaactccagctatatgcaaagctctaaataggccctaatagatataaccagttttttgggtgacattaaggagacatttgctgtggaaacgaaggatggccctcttcctgctttctgtttttcttcttcactttcactcctagtctgcagcgcttctatttaaccacagctctttataattaaagtgagtaactttagaaccaataaaaggacatcctccttcccatgcctaggggcaaacttaagaaatgtgttacccgggagggggaaaacgtcagcaataggactaagtctaggttggtgcacagagaacccaggaggcatgttgataaggcatgtggtgttgaggcgcaggcagtggtgttcccagcaccattccctttggtgctctgattagagattaagccctgggcttcaggggccacctctcattcttgatagacaacctcaatgctctgctaccctgaattctcaggttgagctggaggttccccagctctgcagcttcatcctgaagaccagccagtgcaycctgaaagaggtgtatggcttcaaccctgagggcaaagccttgctgaagaaaaccaagaactctgaggagtttgctgcagccatgtccaggtaagtcatgttgtacatgagcacacrcatgtgtgtgtgtccgctgaggtatgaayttgtgtgtttgcaccaggcacggatgtgactgtaagtatttgtattccgtatccatcgtggatcagggaattactgagttttcacaatcatcaaaaagagagaagcattagttamcyttccctagttaggttcctttaattatcattttcatgtgtttctaaaaatctcatgctttaaacttcttgagattataaaactgagatgctttgtttaaacaagtgaattcttatttaaagaactagtcaagactagtgcttggtggtctttggtgtggggtcccagaggcactggctgctgtggccggcacatggcggggcagggtctgttcaccgcagggcagaggagcaccaaggcttcggtggctccccctcctaggctggcattcagccactgcacgctgatcggccactgcagctgcatctctgctgactggtcagggcccatgtcgcacccattgtaaatattttcaacatcacccctgcctcatcctcaatcacagtttgtagggtcctaggtgtgtatgaatacaggcaggatagagttgttaacttggtagcatcagaaaactctgtctgtattagtctgttttcatgctgctgataaagacatacctgagactgggcaatttacaaaagaaaggtttattggactcacagttccacgtggctggggaggtctcacaatcatggcggaaggtgagggacagcaagtcacatcttatgtagatggtggctggcaaagagagcttgtgcagagaaactcmtgtttttagaaccatcagatctcccgacacccatctgcaatcacgagaacagcacgggaaagacctgcccccatgattcaatcacctccccccgggtccctcccacaacacgtgggaattatgagagctacgagacgaaatttgggtggggacgcagagccaaaccatatcaccatccttgcccatttttcagttttgctaaacattagattcagatgccagtcctttcttgccaaaataggctgtgaggcttctttctttcctatgctttattttctccaagacttaactgtatatgagggagaggggtatggtggcaggaggaaagagtggtttattttttggtccttggtcttctccaaatacagaagagactcctgttcttgaaaaggagggctttccatgtttgcatcttcatgactttaactgtcttttttaaaaattgacatacaataattatacatatttattgagaacatagtgatattttgatacatgtaatgtatggtgatcagatcagagtaattagcatacccatcatctcaaacatttatcatttcttygtgttgggaactttctgagagagtgtaggctgtgggagataagtccgtcaccttttcctcctgatgtaaccagagtggctgcagccaggtcctcagaaactcagagagtacccagtgggaaatccctaagaccaaagtcagcatgggcttcagccatggcctgacaccatacaaaagaatgactgtccaacaagtgtatgaaaataagctccaattcactggtagtcaagaaatgcgaattaatgtaacaacaagatatttatctgcttttacccatcatactgcaaaactggaaaacagtgatagcacctgttgctggcaggccagtgaggaaaagtgtgctgtcctgagctgctggtggaaacgagagccatcaggcaatatctactgtaatttaaaatacttaataccctttgacacagatattttagtctttgggactctagcccatgaaaataaaagcagtaatgtgtgaagataggcacataaggatgtttgttttggtattgtttgtgtggtttaaaaaaaatccagaaagagagagggcaaatgccatcaaatggggcaatgtgtgaataaattatatttagccatggaatggaatgttctgcatgcagcttttaaaaaaatctgttagagctgtaccaagtgactcagaaggatttttgtgaagtataattaagtgagaaaaacaagataaaagtatgcataatacaatgccacttgtataaaacaaacaatggcaaaatctttgtatgactctgtttgcactcacccatgtttacagaggattgtatgagtgtgcagaaacaaatggaacaaccactcgggtgtccgtatggggaggatgggcaaagagactgatatgggtggagaacagagcagggctggatgagccaagcaaaaaaagttaaaacacrgctggacctggtggctcatgcctgtagtcccagcactttgggaggccgaggagggagaatcacctgaggtcaggagtttgagaccagcctggccaacatggtgaaaactgtctctactaaaaatacaaaaattagctgggtgtgatggcacatgccagtagtcctagctactccggaggctgaggcaggagaatcacttgatcccaggaggtggaggttgcagtragctgaggttgcgccattgcactccagcccgggcgaccgagcgagactccatttcaaaaaaagaaaaagaaaaaagaaaaaaagaaaaaaaaagaatcaccaaaacttatgtatatgtgcatacttttttgaaaatgtatgtctatgtgtagctatattctatatttacaaataaatgatgtcagaagaacaattggttaaaaaaatatgagaaaagaaacttcagtgccacccagcttacttccagcaagttgtaatggagaaggacatttccgtgaccatcctctctctgggacaggtatgagctcaagctggccattccagaagggaagcaggttttcctttacycggagaaagatgaacctacttacatcctgaacatcaagaggggcatcatttctgccctcctggttcccccagagacagaagaagccaagcaagtgttgtttctggtgaggatttagaaagctgatagcagtggcccttgaaactcatcttcatgtgttagagaccagtcctaccatatacaaagcagatcactgagtcagctccatgactagttacataggaagccctggattggcgtgaaatactggtgcccgaggttcctcctgccccttaggctcactgacagatcatcccaagcaggcttatcaggttgggtctaattttaaaacagtyattgaggagtcctggccaccccacccctgcttttgtttgatgcttcacctgtgtttgctgggttatggtgtaacacagtaaatcctgtgtgtattttaaacaccaaaaataatgggatctgttgctggtctcttttacgaatttcaggtttcactgtgagacagaattcatttcacctcagtcccatgagcacttttgtgtgttctaatttctctacgacacyataatgggagaagacaccgatgcaacctgcggaggcctttctgcagacccacctttaactggttttctctctcccaacttgggctggccaggcactagcaagaccacactctgcataggaagaaaaagaaagtccctcccaaagctagattccttctgctttttctttcacgatccccaccccatccctcccaagtacccaaggatgttgcccgtgttgaatacatgtggttgcatcttcttyctccataggataccgtgtatggaaactgctccactcactttaccgtcaagacgaggaagggcaatgtggcaacagawatatccactgaaagagacctggggcagtgtgatcgcttcaagcccatccgcacaggcatcagcccacttgctctcatcaaaggcatggtaagtcccatgtcagcactgtcgtgcacagcaaggagcatcctcttattaatacaattccagaacttttgagctagtgggcacctttgaggacagcctgccctggctgttttttatacagactagagataggaccctgagcaggcacgggaaggtctgcccaggcttcacggcctgggatcagttgagccaaggcttgagtcaggctcctccctcccagcccagagctctgtctttcctcctgtccttctgtcactggcaccaaactgcctctaatctcatcacttgagagtaatgactactcacctctgagaaggttccggggatggatgtagggcagcaaaaccaccttctgttctyttctgcacaaggactccttgtgccagctccaagcctctggcctttgaagragtcccaagacctgtgttctccccctctccctcatcccatgaagtggagtgacttagagtgctccagcttcttgtccttccacccccagtaccaccctgaccaaacatggccccactgccaccggcctggagcaccctctcctctctgttaactggggccatggagcaccatattacctgagcctgcctgacccctgcaacatcttccctgatatgagccccagcctgtctcagtgaacatgaataacttgggcaatcactgtcatgctgggcgctgttcctggtcattgtccttagggttgaaaacagggagtctgatgaccatgagtgccacagtcagaagaggataatgcactggcttaggggtcttttctgagcatctgctgtttgctcaaccccactctgggcagcaccaaggaagggacagtggcagatgaaccatggaccttcccctcaggatgcttccagtctaatgcaggagccaggtcaataaagtatacgtggtatactcaataaggtgataagctgaacagtgcagacaagaagtcctgggcctgaccaggaaggagaaagaattattcatgtagctcagcgggcaacatttcatggaagatgtggagcaggaacccaaaaaatgcaaagaatatgtaaatgaaagagacatgtaagaatgggcttttgggcaaagaaaagttactgagcaggtgtgtgaggggctatgtggtgggatgggcatgtggaggatacaaagtttagacattgtccagtgagggtggaaaaagaggagtctacagcttgactcagctttggggatgccgacttgttgcaccccctggtctaaatgtcaagtacccagttatcttctttctctgagtttatctagtggtacaggactcctgctcccttctaccttgaaggtaaatgcttttaacagaagatacagggactgatcaaaatgctygtctccaatctctttcatagacccgccccttgtcaactctgatcagcagcagccagtcctgtcagtacacactggacrctaagaggaagcatgtggcagaagccatctgcaaggagcaacacctcttcctgcctttctcctacaagtaggtcatgtgatgcacccctgatttgtcatttaatgggtcagtgtgaactgaacacttctcaagtgctctgttccaggcaaacctgtgcctgggagggaggaatggagagggataaaatgccgcccctccctgtccccctttttaagcgaacaggccatttggcagaaaagtcctaggcatgcaaaacaatccaagaccaacaaaagatatctaagacccattctttaagggctgtagatccagaaaacctgaggatcactgcagggtaccctggttagaaaaggtttcatggaagatttgggatactgactggaaacttgtgtatccaaatccactttgaaaactgataatcaatgaatatatattgagtaactgccatattcttggctctatgttgtggaagatacgaaagaattttgagacattgcactagttcctacctctggccactccagactagtggagagtataaggcacgcatgtctttttgatgggaggataactagcgtgaccaggaagaggtggatgttattcattcagggccaacaatggctggatttacccatgctttgaaagatgggcaggacttgggtagatgcagagacagggaaaaccttcaacatggaaagaatagtatgttctggccatccgtgacatggtgtgcttccttggttaccaggaataagtatgggatggtagcacaagtgacacagactttgaaacttgaagacacaccaaagatcaacagccgcttctttggtgaaggtaagagtttstgtccacatagttgctggaaaatctactcaagatgtgcctatcatggcttagccacttgctgagccctgttaaatgtctgctgactaacaagtgatacagacactggtgttctggctacctctagtgagaaagcaaactcatttcatgatgtcaagttgcaatggcataaaggaaaagaagttcccaaagctacttaggcatttgtaaatagaaaactggaatcctaagtttaacatgacatatttgatagaactgacatcacccatcctgtgataagatccagagctgtcccagacgaggtggaccaagtgggagagaaccttcagagtctggccagatagtaacctcaggagtcagtctttagaggtagaaggaactctaacaatctcaagtccaacccttacccagtattgtattgtatttatatctgtccaaattccttcttgtacattacctcattgtcctttttgctcatagcaacctgtgatgtcaggtggtagagatgtgattttatacctattctacagaggagacagtgacacagagaggcttagagtttgatgtagtcaaggccgcagaatattagaggggggaaaataagtgccaggttgtaatctaagccaggactattctcattacaccacatttccatgatgacttttacctctcttcctggcataggtcacagtaggtggtggagaggatacaaaagtgtctcccctccccacaagctgctggtagacccaattagaagaaatggtgataagcacccatgtgcctggtcccagttgtaaccatgtcaacagtagcacctcctcaccaattatttcaagctaagggtaacctgatgatagactcagacaagtctggattccactttagctctacctcttagaccctgagagctcttgggaaacctaagttgctcatctctgggtcacacttcctcatctctgggtctcatctctttgtctcatctctgggactcagagctgagatccagggatgagcaatttacatggcccaaaaactctgtgggtctcagaagcagggctgaatttatcattaaattgaacaataatgccaccccacagggataggatgatgagtcagtgaaaacaagtcaatcacctatggcagagccagatctagcaggcattgaatacaggatagtttctttcccttttcccctgtgctgatactccacaatttccagcttccagtagacaaagatatggttgagatgaagaaagctagagttcctttgacactttccatcttccaggtamtaagaagatgggcctcgcatttgagagcaccaaatccacatcacctccaaagcaggccgaagctgttttgaagactctccaggaactgaaaaaactaaccatctctgagcaaaatatccagagagctaatctcttcaataagctggttactgagctgagaggcctcagtgatgaagcagtcacatctctcttgccacagctgattgaggtgtccaggtatctaatggttacagytcaactttttataaaactgatggtaactgactgaactttcaaaccttggccaaatggagaatctcagggaccatttggatatcaatccagttaatcaattagtcaatcagttcatgattgctggatagagaactatcagctgctgcgctgagttccatgaaacacacacgcgcatactgtgttcaaggcagctatgtatttgtgtgttaaaacagaaggagaatagttcccacattttgatgggtaacttttaattcctaggtctattgcaggtgctctccagaagcttataggctggtggagagagaactcagacgaaaaatataatatgatttctctacccttcaaggcactggctttaagtgctatgaaggtgagagaagggactgaggccaggaatgagacccagctaatgttggccaggcatattctgtgtgctggccaaaggactgtgataacagtcttcttgttgctacagatccacagtcccctcttggaacttttctcgattgggcttcttctgtgggtaatattcctaaggaaagcatcatggttctgagctccaagttgggttttgaaagatggttagatttgaatagtgaatgaggtgattaagggctctcctggcagaggacacaccatgagcaatattttatgtgccctgaaggtggtctgtataactttatccatgtctttcttctcagccccatcactttacaagccttggttcagtgtggacagcctcagtgctccactcacatcctccagtggctgaaacgtgtgcatgccaacmcccttctgatagatgtggtcacctacctggtggccctgatccccgagccctcagcacagcagctgcgagagatcttcaacatggcgagggatcagcgcagccragccaccttgtatgcgctgagccacgcggtcaacaagtgagtttccacactgtatttctcctcctaggagcagaggaacatcttgcacctctgtgmatctctgtattaaaactgaacccctccttccactttcaaactctgctccttactcttgtgttttttcttgatcatttttggggtaatgacttgaaataagaaatcagcaaacacaaattgaatttttaaaaatattttctctacattatattataaaagtttttgaacatagcaaagttgacagaatttcacagggaaaacccctagaaaaccagctatctcctactatttaagtgttattatatttgctttatcacatatacatccatccattaattcatcttattttctgaagcatttcaaagtaaattgcaaacatcaacacactttcccctaagtattacagcttgcatattattaacttcagttcaatattagttagcagttttttcctctgaatttttttgtttgtttgttttgtttttttttgttgttgttgtttttttgagatggtctcactgtgtcacccaggctggagtgcagtgatgcagtcacggctcactgaagcctcaaattcctgggctgaagtgatcctcccacctcagcctcctgagtagctgggaccacaggtgcatgctaccatgccctggctaatttttgtattcttggtagatacagggtttcaccatgttgctcaggctagcaggtttttcctttgatgaaattttttggctttttcttttttacatttttatataaatttatgtggaacaagtgtaattttgttacatgaatagattgtgcagtagttaagtcagggctttcagggtatccatcacccagacaacatatagtgtacccactaagtaatttctcaccatccatctccctccacttccacaccttctgagtctcaattgtctatcattccacacactatgtccttgtgtgcacattatttcactcccacttataaatgacaacacgcaatatttgtctttctgtgactgtcctgtttcacttaagacaatgacctccagttccatccatgttgctgcaaatgacatgattttattctttttatggccgaatagtattttattgcctatacatttcacatttttaatccaatcgtccattgatagacacttaggttgattccatgtctttgctattgtgaatagtgctgtgataaacatatgggtgcaggtttcctttggatataatgatttcttttcctttaggtatatacccagtaatgggattgttggatttattggtagttctatttttagttctttgagaaatctctgtattgttttccatagtggttgtacttatttacaatcccatcaacagtgattaactgtttccttttctctgtatcctcaccaacaactgttattttttgtcttttgaataatggccctcctgactcttgtaagatgttatctcattgtggttttaatttacatttctctaatgattagtaatgttatgcattttttcatatgcctattgccatttgtatgtcttcttttgaaaaaaatgtctattcatgtcctttgcctactttttaatgggattatttgggggatttttttgttgagttgtttgaattgcttgtacattccggatattagtaccccattggatgaatagtttgcaaatattttctcccattctgcaggttaccaccctgttgattatttgttttactgtgcagaaactttttactttaattaagttctatttgtctattttttgtttttgttgtctttgcctttgaggtcttattcacgaattctttgtctaggccaatgtccagagaagttttccctaggttttcttcttgcatttttatagtctcaggtcttatatttaagtctttgatccatcttgagttgatttttttatatggtgacagataggagtccagttttattcttctgcatatggcaatccatctttcccagcaccacttaytgaaaagggtgtcctttccctagtgtatgtttttgtcaattttgtcaaagatccgttgactgtaagtatgtgactttatttctgggttcagtattctgttccattgatctatgtgtctatttttatgccagtaccatgctgtttagattactatagccttgttgtataatctgaagtcaggtaatgtgatgcctccagctatgttctttttgcttaaaattgcttcagctattcaggctctttttggattccatatgaattttataattattttttctaattcacaagtttgggttttaagacaaacctaactggggttaccaagtcctgactctcttctcttattctgtagctatcataagacaaaccctacagggacccaggagctgctggacattgctaattacctgatggaacagattcaagatgactgcactggggatgaagattacacctatttgattctgcgggtaatctcagtcttttatatgacatacatcatttcagaagcacttttcctggacaccttttacttccctctcctgcaccctgatgggttcttgtttcttttcttcaatgcaggtcattggaaatatgggccaaaccatggagcagttaactccagaactcaagtcttcaatcctsaaatgtgtccaaagtacaaagccatcactgatgatccagaaagctgccatccaggctctgcggaaaatggagcctaaagacaaggtaaagtccacaagaagaggtctgaaagtgaaagtttattaacaaggatttggaaggtactaggggaatgagactctagatttcatctactgactttattctgctgtttctttcctttccttccttccttccttccttccttcctccctccctccctttcttctttccttccttccttccttctttcgagatggaatctcactctattgcccaggctggagtgcagtggcatgatctcggctcactgcaacttctgcctcctgggttcaagcaattctctctgcctcagcctcctgagtaactgggattacaggcatgtgccattacacccagctaatttttgtattttttagtagagatggagttttgccatgttggccaggctggtcttgagctcctgacctcaggtgatccgcctgcctcagccttgcaaagtgctgggattacaggcgtgagccactgcacctggcctctactgttttctaattgcaaatttcaacaagcctattgacttgactgcctagcagtatgtgacgtgagagaaatacttgactttgctgctatgtcaacatgcagaacgtgagatgtttttgcttcctaccgtccacctaccagattgaccatccctctcatcatggaaaaacatgcttaattttcccccaataagcttaggctaggatagccaacttggccccctcttaggtgcaaagactccagaactttggaaactaccctatttattagccccaaactcttactaccccttctcatctttatcctcacattaaaataacttacgttaaaacaacttgattttcacttagtggtggatctccaaacaaatcacaacttggccataatttatgtgttttaatggaattgaattcaacaggcattccacaggctttttctgggaacccttacttgatagtgctstaggaaacactggcaagaagattcaataccagcatttgaagaacgaytacagagaaattagacctgtgcttaagaaagagctagcagacaatgccagtgtttgccaggcatgttctgtgttctgaccacaggacagtgataaccatctcctcttttgactgcaggaccaggaggttcttcttcagactttccttgatgatgcttctcygggagataagcgactggctgcctatcttatgttgatgaggagtccttcacaggcagatattaacaaaattgtccaaattctaccatgggaacagaatgagcaagtgaagaactttgtggcttcccatattgccaatatcttgaactcagaagaattggatatccaagagtaagtaagagctattcaccccatataccactgagggccctgagctggaattccaaccctaggttttggcatagccactgtctgcccttgcttctgaaacaaacacttgtgcaaatgtgtagcagatctagacccaaagacttagggtcaatgaaatcmagacattttggtagtgattggaaatccatatttacttggggtgcaagagtcaaaggataataacatggtgtgtcagctcaaaatatacttcttcttatctagtctgaaaaagttagtgaaagaagytctgaaagaatctcaacttccaactgtcatggacttcagaaaattctctcggaactatcaactctacaaatctgtttctcttccatcacttgacccagcctcagccaaaatagaagggaatcttatatttgatccaaataactaccttcctaaagaaagcatgctgaaaactaccctcactgcctttggatttgcttcagctgacctcatcgaggtaagtgtgaagagtttgaggttctctagcccattttgtacagcatcataaacagagagtccctgggagccaggagctacccagaggaaaactaagaaccaccaggcacttcctaccatgattctgaggctttcttctttccctccttccccgccttcctctctccccgctaggggtcacctgaagcatgacttcttaacattaatagaaatgcaggcctggcgaggtggctcactcctgtaatcccagcactttgggaggccgaggcgggtggatcatgaggtcaggatatcgacaccatcctggctaacacggtgaaagcccatctctactaaaaatacaaaaaattagccgggcgtggtggcaggcacctgtagtcccagctacttgggaggatgaggcaggagaatggcgtgaacccaggaggctgagcttgcagtgagccgagagattgcgccactgcgctccagcctgggygacagagcaagactccatctcaaaaaaaaaaaaaaaaaaaaaaattgaaatgcaaatgtctcgtctttaagtcccaaagccaaggaagcatatgtgctgcctagtcagatctgcttcaaatctcaaatcactcccaactctgaatcctttgttgaattatttgtcctatctgaaccttagctgcctcttctagaaaaaagcaagtaataaggtcaagattctagtgagattttaataaagcagctcctgtgaaatgctaaggtcagctcctggcctgtggtattcaaayacttgtttagataaatggacatcaagagtggggactactaggctggcatacaacaaagaaacctgatgccattttcttgtctgattttctttctcagattggcttggaaggaaaaggctttgagccaacattggaagctctttttgggaagcaaggatttttcccagacagtgtcaacaaagctttgtactgggttaatggtcaagttcctgatggtrtctctaagrtcttagtggaccactttggctatamcaaagatgataaacatgagcaggtgtgtatttgtgaagtatcttcttaaggaaagctttgggtctcaatgcaaaaacaattcttttctaagcatggaagtcctcaaaatactatctaactgaagggataactatggtttttatcaaccagacctgctggggtaagggccagtatcctctgcagttaaagatctcctgaattcagtgtgcccagaaaccagactcacaataagtactctaggataacaagagtatgaactctgggctgggtgtggtggttcatgcctgtaatcccagcactttgggaggccaaggtgggcagatcacaaggtcaggaatttgagaccagcctggccaacatactgaaaccccgtctctactaaaaatacaaaaaaactagctgggcatggtagtgggtgcctgtaatcctagctactcgggaggctgagacaggagaattgcttgaacccgggaggtggaggttgcagtgagccgagatcacgccgttacactccagcccgggtgacagtgtgagactgtatcttaaaaaaaaaaaaagtatgaactctgggcatagatttaattctaacttccctgtcttgaagctgtgcgcacttggggaagttggttgatattatgtgtatctgtttctgtctgtatcccagactactaataacagtccaaacctcacaaggttatttaaagacaatgaaataaggcatctaaaatgccaagcacagtgcctgatgctggcattggttgttcaataagcagacactattacgagttctaaattaatattttcattattattaactgctgtctttggctctcactcccatcagtgcactagcaaatgagaccaaacttccactttgaagctagcaatgagcccccatttaaggagggaaataggttgtatgatctggagcttattcttgaattttttgctacccaaagtgtggtctggtcagaaatacagcttctcatgcttcacccacaatctactgaatcagaagcgcattttagcaagacctcatgtgacttgtatgcacattcaactttgcagagcaaggcagtaatttacccctccaggctcactgttgagcacgagctccatcttctaatttcctgacccccacttgaggccgaggatctttgatctgctttgagtctgtcagtttcacattttttttttcccaatgcctgggcatccatctctgagattcttcttctctctgagaagaacttgtctaggatcaagtgtttttcaaacttctggtgaatttatataacagctacattttcttaagaaacaccttgtagtcttcactggtcaaagaagagaaggctaagcagggaacgggtgggggatagaggatcttctaatcttgaggatcctggcatactggagaatagggacccctcctctcatcccaccacatcttactatgtctacagattttttaattaagaatagctttaggagtgccactatccctgacaagaccttagttctttaatctctgcttagaggaattagcctggacttcagtgtctccctgttcctcacctggagcattttttaggcccatcctggctgcatcagacaggtcccacattgggaactgaaaggtgtttgacattgctgacatctcactggccattttattactaaactctcaggatatggtaaatggaataatgctcagtgttgagaagctgattaaagatttgaaatccaaagaagtcccggaagccagagcctacctccgcatcttgggagaggagcttggttttgccagtctccatgacctccagctcctgggaaagctgcttctgatgggtgcccgcactctgcaggggatcccccagatggtaagtcagcaggccccactgggggcccatgagaccagacgttggtttttttttagatcgcccagactcccttacgatcccagctgcacaagcccgaaaagatgcttgtactttcttcagagatggaggtttgccttgaatttcactgaagatgactcttggatcacatggaaatgttaacatttagaaattaagctattcataatgttagctgtatttttaagagcattaatttattcatctggaaaacaatgttcggtataccttcctctacctttgctgaaggtccttttatttttatttttatttttttaattttttgagatggagtcttgctcccaggctggagtgcagtgatacaatctcggctcactgcaactctgccttccgggttcaagcaattctcctgcctcagcctcccaagtagctgggactgtggacgtgcaccagcatgcccggctaatttgtgtatctttagtagagacaagcctgttgacaaccatgtcaggctggtttcgaactcctgacctcaagtgatcctccagcctgggcctcccacagtgctggaataacaggtgtgagccactgcacctracctgaaggtccttttaagattgaaatgatacaatgattataaaagaaagtatttggcaaactataattcactatctaaatatgctataatttttattattaattcataaaaggaaatatataaatgtactcctatggcttgattaaaaaaatgttgactttaagaaaacaggtctcaagctattttattgaaatattatttaaaaaataaaacccaatgcaaattgatatgtacatcatctcaataggcctttggtttcaaaaaattgattttatcataatataatacatttcaagtacaccttcacttacagtcagactccagaacaccagaattaagccatggcatatatgatacttaaagtccataaagctctgaggcccagcaatattcttaagagccttctgagtccacttgaaaatgacatgatatctatctagtgaaatttcttatatcctgattcactgaaaacggtaaaaacatcagtttgatctttatttatcaaactattcagctcatcaaaatatgctagtccttcctttccagataaagaggaattactctccaatgtatgggaggttgtaattaacaaaaccgactttaaaaagacttacttttatttgctctcccttgttgggtctacagattggagaggtcatcaggaagggctcaaagaatgacttttttcttcactacatcttcatggagaatgcctttgaactccccactggagctggattacagttgcaaatatcttcatctggagtcattgctcccggagccaaggctggagtaaaactggaagtagccaacgtaagattctgtttgccttttgatttcttaggttattactttcttccagggtgcatttcttgttaaaacatatttaaaaatgtgtttccasttcaagacaaaatgcttcatcattgtaatcacctcattatttttttatgaaaaacttcaagcttccaccagaatgcactacctcactagctccagtagtggtatggccataagacaagaactcagttctctcaacaaatgagtattcctatcatctttttaatctggttttgcctcacgttaactcaggtgctttctagttctgggtagtatactccaactctagagaactgagaactcgctttccttcttccaaacaaatcccagtaatgtttccaaaggtctgagttatccaggaaatctttgcccggaggtgagaaagggtggttgatctgactgacaggggactgaagtatttaatgaatctgaataggttgttttctgacttatagatgcaggctgaactggtggcaaaaccctccgtgtctgtggagtttgtgacaaatatgggcatcatcattccggacttcgctaggagtggggtccagatgaayaccaacytcttccacgagtcgggtctggaggctcatgttgccctaaaagctgggaagctgaagtttatcattccttccccaaagagaccagtcaagctgctcagtggagggtaattctttcagccaagtctgcctagccagtttgaaagagagaacagagaatgtacctgcagaattttgcyaggctaaacagttgattgagatcattcaggtcctgaggaagcaggagaggagtagaaaggaaagattccgggttacctattttaattctagcctagacttactacataactacataattacctttcttctacttttcacattttactaaactgtcctttatctttctgctttgagacttattaagacctactgcttaattagtttttattaagttgtgattttttgttatctatttgttttgagaatgaagaaacaatagctctggagagatcatctttggaaaattaatattttccccccmaaaaaatacctaagaacatattgatttgaggtagctaggtaggtaaagcatgaaactcctaacctcgtgataatggaatacagcctcttttggagagttccattttaagtggcaccctcaaccattgatttgccttagttttcatattttagacacattcatgtgttcattcaaaaataatatttaattggccagccacggtggttcatgcctgtaatcctagcactttgggagccccaggtggatggatcgcttgagccctggtgtttggataccagcctgggcaacatggcaaaaccccatctctacaaaaaaaattaaataaataacaaaattagccagtcgtggtggcacatgcctgtagctccagctactcagaaggctgagatgggaggatcaactgagcccaagagttcaagccttcagtgaaccatgcttgcaccactgcactccagcctgggagacagagcaagatcctgtctcacaaaaaacaaaaaatagtatatttaattgcctaatatataccacgtatgttgagtgagacacacaaggtccctgacctttgaacgcttacattttataagggagacacacaattaagcaagcagtaatcatagagtaagggctaagttatagaaagtattagagtaccatgaaattttatatcatgtagcctgtgctagtcagggaatgcattctgaagcaagtgtacttgacctgataactgaggactgtgtcagagtcatttaggcaaaggagaaaggagtgagtgttccaggcaaaaggaaaagcatgtaatggcctgaaggtaaaggaatatggttcaaggaactggaagaagtgcagaatggtaaggggctcagagatgatggggagaggtaggcaggggagagagcatgcccagctgcgaaagccatcctaaggagtttggactcttttgaaggcacaggagttgaaaaggggagcagaaataagataggggtgatgttttagaagaaatactctgactctagtgtggaagatgggtgagaaggaggcacagctggacacgaagagaccattggacatctcttacgatcctatgtggctaagagctgataatggcctgcagtggagaaaagccaggtatagaaaggagtgagcagattctacaactttctaagaggcagaatcataagtactgggtgattaactgggtatggggacaaggcaaaagaaagaagaaaagaggaaggaggcgcccttcattttaataagaactacagtgggagagcttctggtttcaaggaaagtgacaaattcagttttggatgtgctgtatttgatgtmctcctatgaaacaaccagtttagaaatctagctgtcaaatagacctatggatctgagcccagtaaagaggcttgggctccacatatggatttgggaatcattagtatacagaggttgttgtggttaaacagcaactggtatagagtgagacatgagagatgaggacagaaatatggagaagacaaacatataaaggaagaaggggaataaccagcaatgagttagaagaagtgaccagagaagcagaaggagaaccaaagccataaaaggtcacagaagccaaagagcagccacaggggagatcaccccatgggtaggcgaaagctggcattaggactccagcacatcagcaaagcttggtcttgtggcacccccaacttggagaaacaatacttggaggaaaatgtgctatttcaaagaaagcatccttagaaaaaaccaggccaatgttgaactttcttacatgtactaagtttttaagtacacacttggaaggaaggtgccatcatctcttcagatgtgagaggctccagcgtcttagtctggtcatgagtgcgcaactctatggaaggcttctgggaggtcaaggaagatgaaacctaaatatgcccattggatgtaggagcaaggagggcattagagacattgatgaaagcattttcaggagatggagtgagcagtcagagcacattgggaggaagtagagactgcaaaggcagacaactcttgatggtgaggaagatgagaaagcaagaaaagaaagaaaggagcataggggaggggcacaggggaagagacttgagcgtgcttaatgcaggtggaaggaagcaggtagagagtaggagatttcatatgaaagagacagtttctcttgccctgcattgtaggaaggaaggggcacactgaagttcagccccagtgatcagctatttaacatctctgagcctctgcttctgtaaaatgagaaccataagcctactgttgtggggattacaggtaacagatggaaagaactcagccagaagcttcagagtcactctcatggcttgtcatgttgatgttctttctaatattatttgtttctcagtaaattaaatagttagagataggtgtggactgagggaagacaggaggataagggggtatttgcaccctgagaatttgtgatgtccattttgattcatgacttggcaataactcaggtatttttgttcttcaccagcaacacattacatttggtctctaccaccaaaacggaggtgatcccacctctcattgagaacaggcagtcctggtcagtttgcaagcaagtctttcctggcctgaattactgcacctcaggcgcttactccaacgccagctccacagactccgcctcctactatccgctgaccggggacaccaggttagagatgctcagtgcctgacccagcattttctcaccttccacatcatggccacctagcatggcacaggaaaaaatactctgtgttgtaagaccctgtcactagccttctgggtttgcaccatctttgggtatttaaagcagggtcctctggccaacacattgggtgtcaccttttgcttccttgtgcatgggatgggatcacagcacagatcccaatttgctcctaattcagtgtccatgtttctgagcctccagacccatcgctatgagcttcctggagcccaccaatgtgcttgaagccttcaccgtacttaggtggctccctgtcttcagcccccaagttccagtgcttgttctcagctttgctgaaacaaccagccaactcctgctctgcttgtccaaagtcttgggaatcctggtgtctgcccttgccttgggttcttgtaggactgagggatcaaaaagatcatcttagttaagggcaagagacaatgttaaaataaggaccatatttttgttgcatttgaggctgaattgttttgggaacataatcaccatccttgaaagctctaacattatgcactgtcttcattgtaatgtctttagattagagctggaactgaggcctacaggagagattgagcagtattctgtcagcgcaacctatgagctccagagagaggacagagccttggtggataccctgaagtttgtaactcaagcagaaggtgagtattcaaaacacagctgcctcatctctgctcgcagtctcaggttcagaattcatgaggagaagacatgtaatttaacctatttaacaaataggttaactgagtacccactaagcggcaggcctattctaagacctgggttaactgagtacccaataagcggcaggcctattctaagacctggggctagaacagtgaacaatggagtctctgccttcatggaagttacagtgaacaaccaaacaagttaatatttggaatatcagataagtactgaggaggaaaacagagcgtagactggtctatggagggctaggagtaggagggaggaagaagggcagggaaagcagtgcatttggaataataagggaaagtctccctggtaaagtgagcataaggagacctawcagaaataagaggagaagccgtgtggtaagactgttaacaggcagagggaccagcaagtgcaaaggccctgaggctgacacactactaccatgtttcaaggaaaggaaggaagacagtatggctggagcagaaagaccagggagaaaagaggtagaagatgaggacagagagatatggagaggtgaaggaaggataatctcataggccatggtaagaactttggctttttctatgaattaaacgaaagccattggggagtcctcatgatttgatttatgtttatgttgagaaaagactatgggcagacaagggcagagaaactaatatgtaggttatcacaataatccaggcaggaatcagtgttgttttggatcagggcaatggcagaagagatatgagaaggggatggattctggccatattttgaagattaggctgacaagatttgctgatacagtggatgttgagtgtaagaggaaaaggggaatgaagacaaacctaaggtttttggcccgggcaactgaaaaatggaacttccatttattgagatggaaagggctactggaggagcaggttttagggaatgggagaaatttaggtgttcactttggaaaaaaaattatatagggatagcgaggagcaggttttagggaatggggcacatttaggtgttcactttggaaaaatttttatatagggatagcatatcacagaattaaactaggaagaaaatcccatgatagaaagcactggaggagcagggcacgctggggaaatagtgtttggtaaacattgttttacgaaggatataaaatggaccagcctatggattgaaggacgcccgggaatcttgttacaaagaaagggggagttggggagatggagcccagggcaagggcagcaaggaaccaggacaggcatcttgggtagaaagtaatatagagatgtcgtgtcttcctggcccagaagggctgcgagcctttgctgttccacaaacaagctaagtgctccccatttcagggcctttgcattcctgaccttctgcctggaatgtgctcctcccagaactcagcgtggctccaacctctcttcattctggtctctgcccacatgtgcccttatcagagagaatttctctgaccaccaagtatgaaataacacttcttctatccctttcttttatccttgtatccagttttactcttcttcataacattcattaccatctgacatgagcaagttacttgtttattgcctgtacacctcccccactagaaggtaagccccatgaaagcaaggattccccagtaccaagagcagtgcccagcacacaataggctcataacaggcaatccataaagacttgcatacatgaacacaactgagtttaaaattatcagtaaatgagacccattaaaaaagtttaatgagaaaaaaaaaattcagtaaaatcctgaactgtgtttttgtttaagcacattgattccttggagtttctctaccttttcctctctttccttccaaaacatagcttctttatttatttatttatttatttgtttgtttrtttatttatttatttatttatttwttttttgagatggagtctcgctcttttgcccaggctgcagtgcagtggtgccatctcggctcactgcaagccccgcctcccgggttcatgccattctcctgcctcagcctcctgagtagctgggactacaggcacccaccaacgcgcccggctaattttttgtatttttagtagagacggggtttcaccatgttrgccagaatggtcttgatctcctgacctcatgatctgcccgccttggcctcccaaagtgctgggattacaggtgtgagccaccgcacccggcccaaaacatagcttcttaccacacatctcttgattctcttatacactcgtccaggtgygaagcagactgaggctaccatgacattcaaatataatcggcagagtatgaccttgtccagtgaagtccaaattccggattttgatgttgacctcggaacaatcctcagagttaatgatgaatctactgagggcaaaacgtcttacagactcaccctggacattcagaacaagaaaattactgaggtcgccctcatgggccacctaaggtaaagaaggccgagggtcatctgacctgcactgcaggcctgggtggttcttttcattattcctcttccacttcatacctgaccaagccatgttctcccctagtctacaatcagagtggcagagagagccctcaacaattttttttttttttgagatggagtctcactctgtcaccaggctggagtgcagtggcacaatctcggctcactgcaacctccgcctcccgagttcaagtgattctcctgcttaagcctcccaaggagctggaactataggtgcatgccaccacacccagctaatttttatatttttagtagagacagggtttcaccatattgaccaggatggtctcgatctcctgacctcgtgatccacctgccttggcctcccaaagtgctgggattacaggtgtgagccactgcacccggccaagctctcaacattttaaccctctgcgcatgtccagttggattttcctaccatttatcaggcacttactattcatgtatcaagcacagtgctgggtgctttaaagaaattatctcggtcctcacaataaactgcgaggtcactgtgagttttcctgtttcatggataaggaaatggtagctcagaggggttaaatcatttggtcaaaatcacagagctagtaaatagcagagcaggattcaaacagttttcaaaaaacttctctttctcctaaacctgtttgcaaagtccttaatttgtgctgaatgttggctttagaagttgatgagtttgatctgtggctgtttctctgaaccatccttgtatctggttttgatcaccacawwtggaacttctgtttaatcctgcatatctccattgaaaggacaaaatcattggtgccaactgattttctttaccatagttgtgacacaaaggaagaaagaaaaatcaagggtgttatttccataccccgtttgcaagcagaagccagaagtgagatcctcgcccactggtcgcctgccaaactgcttctccaaatggactcatctgctacagcttatggctccacagtttccaagagggtggcatggcattatggtatgtgtctcttcccctgtgtgagcacttccaaagtaatgcaggtgttgagacctgtggttacaggctgaactagtaccattcacaactatttcctacgtattttcagatgaagagaagattgaatttgaatggaacacaggcaccaatgtagataccaaaaaaatgacttccaatttccctgtggatctctccgattatcctaagagcttgcatatgtatgctaatagactcmtggatcacagagtccctsaaacagacatgactttccggcacgtgggttccaaattaatagttgtaagtatgagtctgccagtcaataaatacatggatataagtgctaattacatcctcaactctgagctaggtgcaggaaggtttccaaagatgtataaggcatgcttccttccccccagggaattcttggggagaaaaaaaaactttcacaagtgtgtmgttacccagttacacaaagctgaatgtgatacatatcaaagagatgctactaagtagaacagttctttgcctagtggtatcaaaggaagcttcaggacaccagctaggaggctgactatgttagacattccttttataaatatggacagtgatcagtgactggcaacgaagattcataattttctgttatttatttttaactttcagtgcattgtccagcttaataattaacttgtcaaatyggtatttttgcctaatgttcattgctctttgaggctcatccaagcccattaccttaaaaatctcctgtcattttgtaggcaatgagctcatggcttcagaaggcatctgggagtcttccttrtacccagactttgcaagaccacctcaatagcctgaaggagttcaacctccagaacatgggattgccagacttccacatcccagaaaacctcttcttaaaaaggtaaaagaagaaagcagcaaggcttcttgaaccatgcaaagtaaatgaaagattttacatagcatgatttagacattttttwaaatttttaaaggaaataatttaagcattttaaggagattaataactatagcacaaacactgtggcatctttgcattagtaaacatgagaacaccaaccctgtcaggaagaatctaagaaagtcattagaggattctggtactttcaccctaagatattttattcartacaacctgttataagcaaattctccctctgactgtgaagaattcagaatggctagwggcgttattgactacaggcttgctgttaagctagagagagtcagaacagccattgagcactaaatggaggcagcattctgagaaaatactttaacccaggcttactgacttccatacctatgttctttccacaaatcaagttgtctcaattcagtttagcaaatttgtatcaagtatcccctatgtgcaaaatgctagactaggtacagtgagaagatagaaactgggtaaggtatagccttttctttcaagaagataccatggagacatcaacaaatgagaaataattaattatataagcaaaattatgacatgctctttgagaaaggtgcaagggactatgtaactgtaagaatgagacaaattggctatgacttaggtgggatggtaatgataaggagtggcccttagaagagctttgtcaggatttgagtgtttgacaggtggaggtaaaagcaaaggggtccaggcataggagtagcacaaagaaaagtgcagagtggctttgggaatggggcaagtacaatattgytgtgaaggtcagaggcagagaactttgaatgactgatgtctgactgtggggatgttatctttgttgttcatttcagcgatggccgggtcaaatataccttgaacaagaacagtttgaaaattgagattcctttgccttttggtggcaaatcctccagagatctaaagatgttagagactgttaggacaccagccctccacttcaagtctgtgggattccatctgccatctygagagttccaagtccctacttttaccattcccaagttgtatcaactgcaagtgcctctcctgggtgttctagacctctccacgaatgtctacagcaacttgtacaactggtccgcctcctacagtggtggcaacaccagcacagaccatttcagccttcgggctcgttaccacatgaaggctgactctgtggttgacctgctttcctacaatgtgcaaggtgagctatgctcaggtaaagggtgcaccgggctagttcatggcaggctctaagaggagagcctcctccagggaggaaaggactttggctttctagcagataatcttccttgctacttggaagtcttttattttattcaacaaatagaaatatttattaaacatatcacgtgtattaaatattctagtaggcagtaacagaaagtagacagataagccagcaattataattcagtgtgagaggtgctatgataaagtgtagtatataagtataaggtagagtggaagcactcaacaagggaacctaaacaaagcctgtggtggtcaggcaaggcttcctggaggaatgccttttgctatcagattttatctttgcattacagatggaggagtctattgcacaattggcccagaaaaatggggctttattattgaaagactttcaacatagagattgctctggaaatgtactgcttaatttaaccaatgtcttttcatttttatgttaggatctggagaaacaacatatgaccacaagaatacgttcacactatcatrtgatgggtctctacgccacaaatttctagattcgaatatcaaattsagtcatgtagaaaaacttggaaacaacccagtctcaaaagktttactaatattygatgcatctagttcctggggaccacagatgtctgcttcagttcatttggactccaaaaagaaayagcatttgtttgtcaaagaagtcaagattgatgggcagttcagagtctcttcgttctatgctaaaggcacatatggcctgtcttgtcagagggatcctaacactggccggctcaatggagagtccaacctgaggtttaactcctcctacctccaaggcaccaaccagataacaggaagatawgaagatggaaccctctccctcacctccacctctgatctgcaaagtggcatcattaaaaatactgcttccctaaagtatgagaactacgagctgactttaaaatctgacaccaatgggaagtataagaactttgccacttctaacaagatggatatgaccttctctaagcaaaatgcactgctgcgttctgaatatcaggctgattacgagtcattgaggttcttcascctgctttctggatcactaaattcccatggtcttgagttaaatgctgacatcttaggcactgacaaaattaatagtggtgctcacaaggcgacactaaggattggccaagatggaatatctaccagtgcaacgaccaacttgaagtgtagtctcctggtgctggagaatgagctgaatgcagagcttggcctctctggggcatctatgaaattaacaacaaatggccgcttcagggaacacaatgcaaaattcagtctggatgggaaagccgccctcacagagctatcactgggaagtgcttatcaggccatgattctgggtgtcgacagcaaaaacattttcaacttcaaggtcagtcaagaaggacttaagctctcaaatgacatgatgggctcatatgctgaaatgaaatttgaccacacaaacagtctgaacattgcaggcttatcactggacttctcttcaaaacttgacaacatttacagctctgacaagttttataagcaaactgttaatttacagctacagccctattctctggtaactactttaaacagtgacctgaaatacaatgctctggatctcaccaacaatgggaaactacggctagaacccctgaagctgcatgtggctggtaacctaaaaggagcctaccaaaataatgaaataaaacacatctatgccatctcttctgctgccttatcagcaagctataaagcagacactgttgctaaggttcagggtgtggagtttagccatcggctcaacacagacatcgctgggstggcttcagccattgacatgagcacaaactataattcagactcactgcatttcagcaatgtcttccgttctgtaatggccccgtttaccatgaccatcgatgcacatacaaatggcartgggaaactcgctctctggggagaacrtactgggcagctgtatagcaaattcctgttgaaagcagaacctctggcatttactttctctcatgattacaaaggctccacaagtcatcatctcgtgtctaggaaaagcatcagtgcagctcttgaacacaaagtcagtgccctgcttactccagctgagcagacaggcacctggaaactcaagacccaatttaacaacaatgaatacagccaggacttggatgcttacaacactaaagataaaattggcgtggagcttactggaygaactctggctgacctaactctactagactccccaattaaagtgccacttttactcagtgagcccatcaatatcattgatgctttagagatgagagatgccgttgagaagccccaagaatttacaattgttgcttttgtaaagtatgataaaaaccaagatgttcactccattaacctcccattttttgagaccttgcaagaatattttgagaggaatygacaaacmattatagttgtastggaaaacgtacagagaaacctgaagcacatcaatattgatcaatttgtaagaaaatacagagcagccctgggaaaactcccacagcaagctaatgattatctgaattcattcaattgggagagacaagtttcacatgccaaggagaaactgactgctctcacaaaaaagtatagaattacagaaaatgatatacaaattgcattagatgatgccaaaatcaactttaatgaaaaactatctcaactgcagacatatatgatayaatttgatcagtatattaaagatagttatgatttacatgatttgaaaatagctattgctaatattattgatgaaatcattgaaaaattaaaaagtcttgatgagcactatcatatccgtgtaaatttagtaaaaacaatccatgatctacatttgtttattgaaaatattgattttaacaaaagtggaagtagtactgcatcctggattcaaaatgtggatactaagtaccaaatcagaatccagatacaagaaaaactgcagcagcttaagagacacatacagaatatagacatcyagcacctagctggaaagttaaaacaacacattgaggctattgatgttagagtgcttttagatcaattgggaactacaatttcatttgaaagaataaatgayrttcttgagcatgtcaaacactttgttataaatcttattggggattttgaagtagctgagaaaatcaatgccttcagagccaaagtccatgagttaatcgagaggtatgaagtagaccaacaaatccaggttttaatggataaattagtagagttgrcccaccaatacaagttgaaggagactattcagaagctaagcaatgtcctacaacaagttaagataaaagattactttgagaaattggttggatttattgatgatgctgtsaagaagcttaatgaattatcttttaaaacattcattgaagatgttaacaaattccttgacatgttgataaagaaattaaagtcatttgattaccaccagtttgtagatgaaaccaatgacaaaatccgtgaggtgactcagagactcaatggtgaaattcaggctctggaactaccacaaaaagctgaagcattaaaactgtttttagaggaaaccaaggccacagttgcagtgtatctggaaagcctacaggacaccaaaataaccttaatcatcaattggttacaggaggctttaagttcagcatctttggctcacatgaaggccaaattcygagagacyctagaagatacacgagacygaatgtatcaaatggacattcagcaggaacttcaacgatacctgtctctggtaggccaggtttatagcacacttgtcacctacatttctgattggtggactcttgctgctaagaaccttactgactttgcaragcaatattctatccaagattgggctaaacgtatgaaagcattggtagagcaagggttcactgttcctgaaatcaagaccatccttgggaccatgcctgcctttgaagtcagtcttcaggctcttcagaaagctaccttccagacacctgattttatagtccccctaacagatttgaggattccatcagttcagataaacttcaaagacttaaaaaatataaaaatcccatccaggttttccacaccagaatttaccatccttaacaccttccacattccttcctttacaattgactttgtmgaaatgaaagtaaagatcatcagaaccattgaccagatgcwgaacagtgagctgcagtggcccgttccagatatatatctcagggatctgaaggtggaggacattcctctagcgagaatcaccctgccagacttccgtttaccagaaatygcaattccagaattcataatcccaactctcaaccttaatgattttcaagttcctgaccttcacatacyagaattccagcttccccacatctcacacacaattgaagtacctacttttggcaagctatacagtattctgaaaatccaatctcctcttttcacattagatgcaaatgctgacatagggaatggaaccacctcagcamacgaagcaggtatcgcagcttccatcactgccaaaggagagtccaaattagaagttctcaattttgattttcaagcaaatgcacaactctcaaaccctaagattaatccgctggctctgaaggagtcagtgaagttctccagcaagtacctgagaacggagcatgggagtgaaatgctgttttttggaaatgctattgagggaaaatcaaacacagtggcaagtttacacacagaaaaaaatacactggagcttagtaatggagtgattgtcaagataaacaatcagcttaccctggatagcaacactaaatacttccacaaattgaacatccccaaactggacttctctagtcaggctgacctgcgcaacgagatcaagacactgttgaaagctggccacatagcatggacttcttctggaaaagggtcatggaaatgggcctgccccagattctcagatgagggaacacatgaatcacaaattagtttcaccatagaaggacccctcacttcctttggactgtccaataagatcaatagcaaacacctaagagtaaaccaaaacttggtttatgaatctggctccctcaacttttctaaacttgaaattcaatcacaagtcgattcccagcatgtgggccacagtgttytaactgctaaaggcatggcactgtttggagaagggaaggcagagtttactgggaggcatgatgctcatttaaatggaaaggttattggaactttgaaaaattctcttttcttttcagcccagccatttgagatcasggcatccacaaacaatgaagggaatttgaaagttcgttttccattaaggttaacagggaagatagacttcctgaataactatgcactgtttctgagtcccagtgcccagcaagcaagttggcaagtaagtgctaggttcaatcagtataagtacaaccaaaatttctctgctggaaacaacgagaacattatggaggcccatgtaggaataaatggagaarcaaatctggatttcttaaacattcctttaacaattcctgaaatgcgtctaccttacacaataatcacaactcctccactgaaagatttctctctatgggaaaaaacaggcttgaaggaattcttgaaaacgacaaagcaatcatttgatttaagtgtaaaagctcagtataagaaaaacaaacacaggcattccatcacaaatcctttggctgtgctttgtgagtttatcagtcagagcatcaaatcctttgacaggcattttgaaaaaaacagaaacaatgcattagattttgtcaccaaatcctataatgaaacaaaaattaagtttgataagtacaaagctgaaaaatctcacgacgagctccccaggacctttcaaattcctggatacactgttccagttgtcaatgttgaagtgtctccattcaccatagagatgtcggcattcggctatgtgttcccaaaagcagtcrgcatgcctagtttctccatcctaggttctgacgtccgtgtgcctycatacacattaatcctgccatcattagagctgccagtccttcatgtccctagaaatctcaagctttctcttccasatttcaaggaattgtgtaccataagccatatttttattcctgccatgggcaatattacctatgatttctcctttaaatcaagtgtcatcacactgaataccaatgstgaactttttaaccagtcagatattgttgctcatctcctttcttcatcttcatctgtcattgatgcactrcagtacaaattagagggcaccacaagattgacaagaaaaaggggattgaagttagccacagytctgtctctgagcaacaaatttgtggagggtagtcataacagtactgtgagcttaaccacgaaaaatatggaagtgtcagtggcaamaaccacaaaagccsaaattccaattttgagaatgaatttcaagcaagaacttaatggaaataccaagtcaaaacctactgtctcttcctccatggaatttaagtatgatttcaattcttcaatgctgtactctaccgctaaaggagcagttgaccacaagcttagcttggaaagcctcacctcttacttttccattgagtcatctaccaaaggagatgtcaagggttcggttctttctcsggaatattcaggaactattgctagtgaggccaacayttacttgaattccaagagcacayrgtcttcagtgaagctgcagggcacttccaaaattgatgatmtctggaascttgaagtaaaagaaaattttgctggagaagccacactccaaygcatatattccctctgggagcacagtacraaaaaccacttacagctagagggcctctttttcacyaacggagaacatacaagcaaagccaccctggaactctctccayggcaaatgtcagctcttgttcaggtccatgcaagtcagcccagttccttccatgatttccctgaccttggccaggaagtggccctgaatgctaacactaagaaccagaagatcagatggaaaaatgaagtcyrgattcattctgggtctttccagagccaggtcgagctttccaatgaccaagaaaaggcacaccttgacattgcaggatccttagaaggacacctaaggttcctcaaaaatatcatcctaccagtctakgacaagagcttatgggatttcctaaagctggatgtaaccaccagcattggtaggagacagcatcttcgtgtttcaactgcctttgtgtacaccaaaaaccccaatggctattcattctccatccctgtaaaagttttggctgataaattcattaytcctgggctgaaactaaatgatctaaattcagttcttgtcatgcctacgttccatgtcccayttacagatcttcaggttccatcgtgcaaacttgacttcagagaaatacaaatctataagaagctgagaacttmatcatttgccctcaacctaccaacactccccgaggtaaaattccctgaagttgatgtgttaacaaaatattctcaaccagaagactccttgattcccttttttgagataaccgtgcctgaatctcagttaactgtgtcccagttcaygcttccaaaaagtgtttcagatggcattgctgctttggatctaaatgcagtagccaacaagatcrcagactttgagttgcccaccatcatcgtgcctgagcagaccattgagattccctccattaagttctctgtacctgctggaattgtcattccttcctttcaagcactgactgcacgctttgaggtagactctcccgtgtataatgccacttggagtgccagtttgaaaaacaaagcagrttatgttgaaacagtcctggattccacatgcagctcaaccgtacagttcctagaatatgaactaaatggtaagaaatatcctgcctcctctcctagatactgtatattttcaatgagagttatgagtaaataattatgtatttagttgtgagtagatgtacaattactsaatgtcacaaaattttaagtaagaaaagagatacatgtataccctacaygtaaaaaccaaactgtagaaaatctagtgtcattcaagacaaacagctttaaagaaaatggatttttctgtaattattttaggactaacaatgtcttttaactatttattttaaaataagtgtgagctgtacattgcatattttaaacacaagtgaaatatctggttaggatagaattctcccagttttcacaatgaaaacatcaacgtcctactgttatgaatctaataaaatacaaaatctctcctatacagttttgggaacacacaaaatcgaagatggtacgttagcctctaagrctaaaggaacayttgcacaccgtgacttcagtgcagaatatgaagaagatggcaaatatgaaggacttcagtatggagcttttattgaattgaaaccttataccttttgaaaactcattstgattttcttcatctccatacccctttcgtgatagctcatctgtttttctgytttcagggaatgggaaggaaaagcgcacctcaatatcaaaagcccagcgttcaccgatctccatctgcgctaccagaaagacaagaaaggcatctccacctcagcagcctccccagccgtaggcaccgtgggcatggatatggatgaagatgaygacttttctaaatggaacttctactacagccctcaggtaaataccacctaatgagtgacacgcccccaagagcgagtggagaattggggcagatacatttaattcaggaccaaatattcagagattccccaaactaggtgaaagacaggcggtaagcaacttcttctctgaggaaatattctctagaaagtattacaatgagtccttgattgattttaatgtttagatgcacacatgacatcccatcagcactattatttattaattctgggcaaatccaggaagatgagggttatacctcatcatctaaatcataggcaagctcagccataggcagggtatatttttcagagaggactggtttctgtagtatttaaaactttaaaattcttccccacaakagaattgctagatgagatacatcaaattcctctcatgtcatttacaagctctgccagggccaaatcaagggtgacattaccagaggagaagaccaaacatggttctatgactgttactaaaagtttgtcatgggcttggagaatgcgtactgatgttgggattctgggtctctgcagggtgggctccaacttgccttttttgctatttcttctttycctatctgtcatttcctgactcttcttctctctcctcttctttctcttccccccactcctcttccagttttcagtcctaggaaggctttaatttyaagtgtcacaatgtaaatgacaaacagcaagcgtttttgttaaatcctttctggggcatgtgataaagagaaattaacaacagtagacttatttaaccataaaacaaacacatgaactgacatatgaaagataaatccctttcagtatatgaaagattctctgatctttatttttaactgctaatgaagttttagtgtactatattgtgtaaytggagtaattgaaaacatgttatttttttttttctctctgtttagtcctctccagataaaaaactcaccatattcaaaactgagttgagggtccgggaatctgatgaggaaactcagatcaaagttaattgggaagaagaggcagcttctggcttgctaacctctctgaaagacaacgtgcccaaggccacaggggtcctttatgattatgtcaacaagtaccactgggaacacacagggctcaccctgagagaagtgtcttcaaagctgagaagaaatctgcagaacaatgctgagtgggtttatcaaggggccattaggcaaattgatgatatcgacrtgaggttccagaaagcagccagtggcaccactgggacctaccaagagtggaaggacaaggcccagaatctgtaccaggaactgttgactcaggaaggccaagccagtttccagggactcaaggataacgtgtttgatggcttggtacgagttactcaaraattccatatgaaagtcaagcatctgattgactcactcattgattttctgaacttccccagattccagtttccggggaaacctgggatatacactagggaggaactttgcactatgttcataagggaggtagggacggtactgtcccaggtatatwcgaaagtccataatggttcagaaatactgttttcctatttccaagacctagtgattacacttcctttcragttaaggaaacataaactaatagatgyaatctcgatgtatasggaactgttgaaagatttatcaaaagaagcccaagaggtatttaaagccattcagtctctcaagaccacagaggtgctacgtaatcttcaggaccttttacaattcattttccaactaatagaagataacattaaacagctgaaagagatgaaatttacttatcttattaattatatccaagatgagatcaacacaatcttcartgattatatcccatatgtttttaaattgttgaaagaaaacctatgccttaatcttcataagttcaatgaatttattcaaaacgagcttcaggaagcttctcaagagttacagcagatccatcaatacattatggcccttcgtgaagaatattttgatccaagtatagttggctggacagtgaaatattatgaacttgaagaaaagatagtcagtctgatcaagaacctgttagttgctcttaaggacttccattctgaatatattgtcagtgcctctaactttacttcccaactctcaagtcaagttgagcaatttctgcacagaaatattcaggaatatcttagcatccttaccgatccagatggaaaagggaaagagaagattgcagagctttctgccactgctcaggaaataattaaaagccagrccattgcgaygaagaaaataatttctgattaccaccagcagtttagatataaactgcaagatttttcagaccaactctctgattactatgaaaaatttattgctgaatccaaaagattgattgacctgtccattcaaaactaccacacatttctgatatacatcacggagttactgaaaaagctgcaatcaaccacagtcatgaacccctacatgaagcttgctccaggagaacttactatcatcctctaattttttaaaakaaatcttcatttattcttcttttccaattgaactttcacatagcacagaaaaaattcaaactgcctatattgataaaaccatacagtgagccagccttgcagtaggcagtagactataagcagaagcacatatgaactggacctgcaccaaagctggcaccagggctcggaaggtctctgaactcagaaggatggcattttttgcaagttaaagaaaatcaggatctgagttattttgctaaacttgggggaggaggaacaaataaatggagtctttattgtgtatcataccactgaatgtggctcatttgtattgaaagacagtgaaacgagggcattgataaaatgttctggcacagcaaaacctctagaacacatagtgtgatttaagtaacagaataaaaatggaaacggagaaattatggagggaaatattttgcaaaaatatttaaaaagatgaggtaattgtgtttttataattaaatattttataattaaaatatttataattaaaatatttataattaaatattttataattaaaatatttataattaaatattttataattaaagtatttataattaaatattttataattaaaatatttataattaaatattttataattaaaatatttataattaaatattttataattaaaatatttataattaaatattttataattaaaatgtttataattaaatattttataattaaaatgtttataattacatattttataattaaaatgtttataattacatattttataattaaaatgtttataattacatattttataattaaaatgtttataattacatattttataattaaaatgtttataattacatattttataattacatattttataaagtatttataattacatattttataattaaagtatttataattacatattttataattaaagtatttataattacatattttataattcaatattttataaatagttaaaaagacgaggaaaaaattaaaaagacgaggttattgatctcaggaattgtatttgccaagtgagaaggaaaaaatattcacaaaggcttgtacatactttgatcctgaggaacacctctggtgtcttcatgtgccacatagtcttcctcactgactgtctgcctttgcaaggcaaggctctccggtaggcctcgagatgaaataacaagtcctttatttcactcagcctgccaggagtggagaaggaatggctagggagtcctagccccaggggcttcatggcaatacggaccccagatgtctccctggagctctgccaggatccattcaaggccaagaaagtatgattgggagaggaggggtggagatgtagattcctaacaattctgtgacccagcatacatgtatgctctttaggctcttaagcatccttatttttccaaatataatatccaacaatcccaagtgtagtaaaaacccaagggtttctcctgccacatccactcacttcaaactctgattttaaacactggcaatatccagtcagagcctccaagctgagctctagaaagagaaagctgcaaaaaacctgtgcaacaaaacttgcactcatattactgacaagggtagatataaaacagcgcattcttttccatgacactgaagagcaaagaagagtgtaacttgggggcaataagaaattggaggtcaccacctcccaaatcctacatgaggtctatttggaaaagacctccttttttaattcaaaaatccttcaacctccaccattctttcataaagcttcacattctcttggtgaagcccactgttaaaatgcacaggcgttacctggaaaaggaaacacatagccttaacaatattcttctgtactgaactgaagagtgagaaagagtctatggagctataatacggtagtgtatgaatctggtactcaaggaaagtctgttggataatggatggatggatggatggatggatgggtgggtgagcgaataaatgagtggataaatgaggggtcagttttgagagtgagagaaacatggaaattagactcaaatcccaaggcaccacatggaatagttccaggaatagttctgcaagagtttccctgatgagctataagcagcaaaaatttagtgagtgttcaaactgaaaggaggcctggaattgtggcttaatttggagggaaagagggagtccaagattcccagtgcttatttgttgatatctatctagtgctgaaaagaaaaaaaaatagccacaaatccaaaatgattgtgcagtcacatggtacccactgcccagttccttgaccagtgtccctcatacaaagggcccctgatgagctcagaatgtctttgttgtactgaataaagtttgaagaacaagggatccttgtggggacttggactttgcctgctcccttcttaggtcttctactgcatatctggatacttctctggttcaattaatagctacattttttatttgcttgtactcagtgcaacttatttcacctctgcaagcctcagttctcttacctatgaaatggagataatatctatcctgcctgccttgcaggacttttcatgaaaatcagttgaaataacatatatgagagttctgcaacctttaatgtcctgtagagaaaagctgccattatcattagatgattattaaaatgacgttatggcaagaagaaagaatggaggcagggctacgtgtctggttcagtgtgcattgataaaacacctctatgtgtaaggcactgtgcagtggctctatagaggagacagagatcaataagatgcagttcctggaggtctgtctgcccatttatctgtcaaaggtgaaacgtgttttctcatggtggatataaccaaagtactatgagggatttaaaagaggaaagttgtgaatcaggggatttttatagaaaagattgaaatggatctcgaatatacattgactttaataaacagatgagagagagggtggtctaggaagaagacgagtaaagaatgatagttgggtgtgttgtaaggacactggattatctagtttagccaaagcacaggaaaggtaaggagagaggactggaaaggcagatctatagtactgcagagggctcgaatgtcagagtaaaaagatgacactctctttgctgaaggacatccagtaaaagtttttgagcagaagggtgacatgcattgtgatttcggaaaaccaacatgacaacctatagataatgaattgtaatggggtgaatctggatatgagtgtattagtccgttctggcattgctataaagaaatactgagactgggtaatttaaaaagaaaagaggtttaatcagcttatggttcctcaggcagtacagaaagcatgactggggaggcctcaggaaagttataatcatggcagaagttaaaggggaagtaggcacaacctacatggctggaacaggaggaagtgtggggaggtgctacacacttttaaacaaccagatctcatgataactcactcactatcacgagaacagcaccaaaggagaaatccgcccccatgatccagtcacctcccaccaggccccacctccatcattgtggattacaatttgacgtgagatttgggtggggacacagacccaaaccacatctatgaggttgtgccagggtccaagtaacagatgaggagcacctcagtcaagtcctagggttgggaatggtgaggagggtaggatagaagaagattgggaaggcagaattgacagaatcaggtggctgattgagtaaaacacaaaggatgggtgcaaaagctcttagaaatggagttgccttggtaagtcactgaagccgggaactggaggggttgcaggagagagagagaggaacataggaacaaggaagaataggtaaagcagacttcagagttaggaaattccgaacctgtgtaacttgaaggactatggagcctcagtagaaatgggaggaatgtgttgagtgggagattattagtataagacatggactcattgactatcacagctggaatgggactactggatcacatagtgagtttccatttgcaatcatgtgtctaagcagagatatctagcaggccagttggaaatgtgggctagagaaacaatatccaaaggagtagggaaaaatgaggattttaaccaataattgcattaattttatgtttgtataagtatctttagaaacttaacaagaaaacaaagagtttttccttttgtacagttaattgccctattgtcctgggagtaagtcaacaggtacatctgctaagaacatactgtgaggtgacgtggaaagtcctgctataaatacagatattcctcccattaaacaaatatctaaagttttcaaccaaaggagaaatcaaataatggagcccagcccaagtccctggggcttcagaagcatgatcaagctgtgtgctttggtttgactcccaggtcccgcctagagtagtggtgctgtcctcaggataaacctgataagaaatgggtccaatgggactcagcaccaccagatgtcttcagagctacctccattttcttctgctttttacttgaagcccggtcagttgaatagctcaattccccttttttggtgagttgagcaaagccccctctaactccctattctaggtccccttctgaatctaatttatgacttagtcccaattcagtcagagaaggggccaagctggccctcaaatggggcctgcaatatgggagccagagtggacaaacagatgttccctctaaaagtgtctaataaccagagataaatgtgcagaaacagaccctacctcttagctcatctccttgtatgctgtttcacattaagaggtcagctgtaactcccttcagagtgctccatttgttggtgggatggttgggtggtcaccaacaaataacattccagggcctcataaaagttggtggagtaggtgcacatgtttccacaaggagagggccctgcctttattctgctacatagactggctcatgccttccccagatctgagcagtgcttcaagtcaacaatgccagggcactaggcgctaacactgacacttgtgtccattttactccctggactgacaccaccaaagcccattcttggggtgagagggatgactcaggccttgaaggtggactggttcatgaactgaagacctgtgtccccacccttgtttttaaactgtggcttgggctgtcagctgtgcagcatgaacaccaaaccacagtgagcagaggcatccagagtttagattctaacccagaaacagtgcctaaggaaagcacagctggaccaatagcccagctccaccaattctctctccattcctctgctttttcatcaggtggggctcatccaggctggtgccaaggtctttctggagtaatggagctcagtatagctccaggagacctaaagcctttgaagtgggatcagagctagagtcattagaacatttctataatcacatgggatgttggatgatcctggaaagaacaatagagagggccgactgctgccccatagctctgttgagctgaggctgggaaccaaggcagtcaatacttccctcctctcaaaagaagtccccgctctcaaattcaagcttcatcattcatgagttatttaacttcagaaaagtcacttgagtttcctaaccttcagttttcatcattaaaatggagatcaatgagaaaaataggttaagcaactctgagcaggaggagaaagtggccccatcttatgttacagagttgttacaaagattaaatgaggttaacatacatggagcctggcaaacagcgaatgaatgcatcgatggttttctattgacagaagtcaaaataaatgacgtacaattacaattatactcaactacttagaggaatctgaccacaacataatagggaataagaatgcaagtcctggaagatgaaatgcagtgccagactcttttgggttttttggtttgtgtttgtttttatttttgtttttgtttgtttgtttatttgtttgagacggagtcttgctctgttaccaggttggagtgcagtggcgccatcttggctcactgcaacctccgcctcccaggttcaagcgattcccctacctcagcctccagagtagctgggattactggcatgtgccaccacgcccggctaattttttgtattttagtagagatggggtttcaccacattggccaggatggtcttgatctcctgacctcatgatccatccacctcagcctcccaaagtgctgggattacaggcatgagccactgagcccggctgccagactcttttaatatagttaaaatcaagaacaaaatgctttgttttct

SEQ ID NO: 5660 - DNA, 189817 bp, Homo sapiens
  misc_feature (1)...(189817): n = A,T,C or G, or insertion/deletion polymorphism (see Tables 1-2)
acagatgtgcacacactcacagacacatacactcacatagacaatgcatacacacagaggcatacatgctcagaaatacccatacacacagatactcagacacactcagtcgctcacacagatgtgtgcacagtcacatgcagacagacatatacactcacaaatatatagccagacacacacagacacacatattcacagggagttgtttaatggaaacagagtttcagttttgcaagacagaaacattctggagatgggtcatacaataccatgaatagccttaacactactgaattgtaaactgaaaaatggttaagattataaattttatgtgtattttaccacaattaaaattttttttaagacagagatatttactgtaagaaggtgggtacattagttaaatctttctttcctaaggcgagaacagctttcttccatttgcctgccatgaggtgaggcagcccccagcaatccatcactgctcctcgggaaggtagattacaggtgatcgtagatccctggcaagagtgggctatgcccagggaagccaaagcaaagagaaaactcctgccatctgcacctgtccctggcatgggttttcatctttcctgaaagaagaaggaaaagaggctgtgggagacatggtcctgtcttagatcccacgccctattgtggtggcaactgcgatgatgctttataaattccttttaaaatgtcattgccagactttgtgaaaacgctcgtgaggctttgaaaaatatgtgaatggatacagagggccgcttgccttcccccactgctcactactgtggctagaacctgactacaaactgcccacccagcctcccttccatcctctcccccaggacacttccatctggagtggaaagttttctccagctcctacaggatgaagggcagtgcaggagaaagactctcccaagagacgaacttgggtcattcatgtcagagggtctggcatctttgaacaaggccagttgttatttatgtatctactcacctccctctggaattacatctataaccaacaaaatccaggtcttgttcagctggaaaaaaccagcagcgtccagacatgactgggttttttgtttgtttgtttgagatgtgaagttttgcatgtaaatcraatagagtttgccagaaaattcattgcctgaacaaatatggtctgctccttgggtattgccaagtaggagaaagatggtttgtctggagagactgcagagaaaagtgtcaataccatagaaatgaaaactcagaattaaaggatcaaggtaaggggatccggaatccctcctcccacgtattttctgtttactcacaactcccaaagtttactacatatttctgagagacgccaggatcccagagtgatgtgtttaggaatttttaccctgcttcttggggaggcaatggggtgagcccttcagcttcagaagagtgagaaggtatgcccaggcccgtgcagccagagggagttcacgtctccttggaggtctcatgctgagctggtaaggccaagaaagtaggggcagaactggattacccttgtgacgttctcattggagtctcctcgtgctccaggcctattgacatctcatgtgagggactggccatgccatgatgaaagagcacagtgtgttgtggcagtcctggaactgtttgcccagagagcctttcctcaccctttccctgtatggatgcagtaaagagttaacatagcaaacctgaaactggcttagaaagccctacttgcaagcttggcccttgtctggcatctgggaacttggacttcaggagtcttcccactgttccctaactgacaagtggggctggctgggcctaaactgtacaaaaattgtggctcatgcttaacacctgcttccttcagggagtctggaaaatggctatgagctaggtagagggtacctatgtgaccagccccccataaacaccctgagcactgagcctctggtgagcatccctggcagatgacattatatcagtgttgtcacaactcattgccagggttggtaggcacagcccatgtgccttgattaggacaggacctttgggaacttctgcctggtcctccagactttgcccaagtgccttttctctgctgatttggatttgtatcttttcgtcatgatttatcgtgtagtatatatgatatatgtacatttgtatctgatcatagctacgtgggtggccgagtctggtgagtcctcctagtgaatcacagaacctgggggtagccttggggccccagcacaggagtggtggggctaactttgcaggcggtattttccagagtcctttgtcaactgattctagtggagttcagcaaaacggcagacaagggagggagagggagcgggaagaaagggacaagctaggatcattcttccctccctcttgacctcagacagtgtttcttggaattatgggatctaaagctcccaccagacaggaccacacggttccagtgcctgacctaccctcagtcctcccgctacaacgacaccaactcctctctgctgttgctaattgtggagttgattcaccttctcgtgtttggtttcttgtctcttctctcacctgtgtaaccaatcccctgccttaaattccttcttttagaaagacctaaagtggtttttgttttcctggatgaaccccgtctgttacatgccttaaatatttacatggctccacttccatgccaggcagggggcattcagaaataaaagacaccatcccatccttaaggacctcagagcctatgcacctgtggaagttgcatccctagcacagttcaagattcactgtgtgaccagaaacctttgttctgatgtctcagccatataaccatgaggaataccctgtaaaatgaatgggcttcaaccgcattctagggcttggtggcttagacacatttttatcgactttgtttagcacaaggaaagccattgcatttatgatgctcttgaggttagtggtttgggggagtcagaaagccaaccactgtgtgtgtatgttcacaaagccaataattagtctaaggccaaaagtgacaccgtggaggtggttgtgagggtgacaatcctgttctgaatgcacaactcaaccccaagtcccaggggtacctggcatctgcgtaacctcatctgaagggtgcaagggtggctgctcatcctccaaccccacatggatgagggtatcttggaattctagacactcagatttgatgtttgccaggagaactaccagaatatgatcgttaaggattgggggagggtttaaaaaatactgaggagacctgaaattgtatgaatgctgaggggaagcagtgctagacatctttagggtctttctctagcactcagcaagggatgtggcaaagacggcctttggatagttaagtggtcagcagcctctctccagggaactctggctggagtccctacctttttgtactctagtgcaggtacagccaaggaaacagaaaatgatcatgcagtgtgaggagcactacaacaaggcaaactccttgcaagacaactggggagtcagtggagggagactgggcagggaagaaagatggcagaggaagatgatagggaagaaagatggaagccaaatggcagaagcttagtgatgaagaggaggagaggagaaacaacagtggaaggcagggagggtagattggtgttgggggaaggttttttaaaaatactggagacctcaaattgtatggatgctgagggaaagagcagtgctagaggcagggtccagcttgtataggccttgtcagtttcagcttgcaatttatccaaaaagcaaagagaagtagccatataagggctttgtgcaaataatttgatttcrgattttagccctgaaatgctcattctgactgcactgtagagaatggactggaaaggggtacatacacgggtagattcaagggctgtttaagaggtaggatagaaaatatttgctcaaggatcggatttgatgattgagggagagaaacaaggaagcctsaagaatgatgcccatgtgtctggtgtaccacctgcgtgcaaagtgatggtattcattgaggtagggaactcctgagatgcaccaggttttccaggaaagtgatacatctcatgttagacatgatgagcgtgtgttgtcactgggatgtgacaaatgaggatagccagtaggcacttagatacgggaatctgcaattctggaaaagatcttggctaaagacccagatttgggaggtgtcaggatatagatggaatttgaaaactatgggagttcctcagacaatcaaggaatattgcgctgcactggaggaaaccacagagtgttcaatgtcaaggaggcctaggaaaaataccttcaaagacagagttcaatgcttccaaaaggtcaggtaaataagaactgaatcctgtcttttggcctgagcacaggccttggagaccgtgacctccactttcagtagaatgatgaggcggaagccagatggcagatacttagtgatgaaggggaggagaggaggagtaacagcaggagtggggacataggttgggggaggtttttaaaaaaatactgaagagacctgaaattgcatgaatgctgagaagacccactattagcaagcaggagcttgaagctgcaagaggaagagtacrtaagagtcacagcaaagccccggagaacaaggcaacgcagaagcctggtttggagatgcagagggaggagggacctttccaacttcagtaacaagaagaaagaggaaaagatagataaggttgcaggcaggttcatagattggtagcagaaaattgagagaatttctaaccaatggcatctttttttttcttctttataacattgggagattgagtggcagggtcagaaatttgaagacagtaaagaaggttagaaatagccatgtttgactgggtgcggtggctcacgcctgtaatcccaacactttgggaagccaaggagggtggatcacctgaggtcagaagttcgagaccagcctggccaacatggtaaagccccatctctactaaaaatacaaaaattaggcgggcatggtggcatgcacctgtagttccagctacttgggaggctgaggcagaagaaycacttgaacccgggaggtggaggttgcactccagcctttgcaacagagcaagacttcatctgaaagatagaaagatgaaagaaagaaagaaagaaagaaagaaagagtaaaagaaaaaaattaaaattttagggggaaaattttctaatttttgaacatgcactaaaatgattttcagagaaaaccaagtgttattttctaatctgcatggcattattaaagatgtttactcatcttccttggggctaggcatcccattcctgcaggaagtcttgtggttaggcggtggctgtggctctgggatgattcaggaatgcagaccatgccttatttgcacaggagggacacgttgctctcactgcatgcatggtcacaactgtctgtgtgacctgtctgtgggagggcagacccccctcctgccaagccacagtagcagctgacctgccaggcaaaagcattcctttgtaaaggaaaccctcccagaccctctgaccaaaggggacgggtggggacttcctggcactgcagggccccttgcctggtactcccagcaactggttgcggtggggagggcagatctagggrtggggatggggaggagaagtgggaatgggaaattgggagtcagaggggcaagtgggagagaagggcgcacctgccgggataacaggccagatgaagtaaatagaaaatcctctgagctcccctactggctccagctgtggagaagggggaggagaaaaccctgtgggacaggggaggagggtgagggctcctcttaggaagttatttaagagccaactgtcttgtctttcccgagtccgtttgaggaagtccccgaggcgcacagagcaagcccacgcgagggcacctctggasgggagcgcctgcaggtaagccaccgmccctgcaccctatgagccagggmccgctgcgtccaccttctgcacctcggtttcctggttgaaccagcaagcggcttgctctgggccctgtggcgccggtcacaggcagctccacttgcccaatcctggcttcccgcccccaactccgcacctgcccagcccagcttctaagcgggacttctctcaggctctcgaggcagctctcccgaagccgttgcttgcttagaatgccaccaaatggggatgggggagttggaggtgcttccccaagggacgagccccctttcctcagggagcagattatggagctggaacacaaaaggtggagggagtggggccaagtgagaacagcctgctagactggaaccccgccggcttggctccccactcctgcgcgcctccccactcctgcgcatcgcctgcctccrtcccaatttggagctgaactcgagccacttctcctccttagacccgcccagaagcgagggctcctgcccgccgcactcacccagccaggcgtgcacctggggctccccccttctcccccttagcactgtgtctcccgacagcgygccacactgttctgcacccctggcaatgccrcagcctaccttcggtatttctcactagaggatggctctcgcagccttctccctatcattaaccctttttcgctcttctccctcccttcccccstcagctcaccaatgactgtaaatatatttatctatacttatggatacccattcacaccttatgcatccaaacactcctgtctccttctcagaccagacaccttaggcgtggttgtcttttctccagcatgttgttagtgctccacatgtctctggaaccatctctctactctggtggcctctataatggggactcttcacctcttgkgggtgtgcmtggtttttgaaaatagccaagtctccaggagtcatgactgggtaatccaggggatcaagggggaaccttcactgggcccagaaacaaagtcccccttcatttggtcatttggtcaacaagtacttactgggcactgaccgtcaggtgtgtgttgtttaaactggctcagtgcctgcacaagctccaagggaaggggaagcaggcttggggaatgggaaatgttggcaaccctgacttcttaagcctattgatagccctattgaaaattgcatgcccaacctctccacctccttatcctcytccatgtggctcaatttccaaagcagttcctacctcctcacccctaagtggatttacttayggctcttcttgggctccaccctaaccctatcagactataatctatcagagcaaacattctgttttgttctctgatgtatcccatgtacctagatcacagcctggcatgtcataggccctcaataaatattggttgaattaaattgcaaatgtaaaygctttagaagacaacatttrtctggacatgsttgtgtgcgtttattcttaaaagtgacttataatctcataaatctgtatgaaatgaacatagatacagcacatgcatataacaggaaacatttcttgcgaagatgctgctgtaggattatggagggtgggggaatctgggtctccaaaaatcttttaatttttaaatttctttgaataagccccttttcttctgctttccatatgttttgacacatacaaaaatctccccaagatccttggggaactgtattccatcattagactaatccttgctgccacttctcagtttttatttatgcaaacggcaaaatgtgttgctcaagtgctatcacacacagatatatctgtttctctattttggaatccttgtctcaaatgttactcactttacatgccttttctgttgtcttctttttttttttttttctgaaggaccttgtaaagtcaaaaatgtcagaaacttccaggaccgcctttggaggcagaagagcagttccacccaataactctaatgcagcggaagatgacctgcccacagtggagcttcagggcktggtgccccggggcrtcaacctgcaaggtatgagcataccccccttccccaccactctgggtccaggcacagccgggccctggcccctcttccctgcaggtaaacatcctctgtctccactggggttcccacaaaaggaagccccctgccaatctctggttttataaaggaagaaagcaaaagctttcttttaagtggtgaaagcaccgaagacccagagccttgtcccagttctgccccttactgaccttgtaacctcagagaagttgctttgtctttctgcctctcaactatttcctctacaaaaccagagtgctggattagctagggcctcttccagccctactgctcaatgctttagagaattttctctagctggaatattccacttccaaaatattgtggctgttttgattgtctggcttgcacctccttccttctccctcctccctcctccatccattgctgtgaatttcagagccggggagaagtgccagactctgacagtaatagagatagaagccctctatttctctccagagcagcctggtgagctggcaaggcaagctgcttccccagcctcttgcctctgcctgatccctagaaacctgttccgggtacagcagccrgcagctgacctcctctcagccctgtcagtggtgacaaggyccaggtgccagcactggtttggtgatacagacatcattcccctgggccatggsagggacattcagactcatgtccccgagtggcattgagcagggagtcttttttgtcaataacattcatgcaccaaaatctaattttactcctaagggtgttctgtgctgggttycactggggataarcamcyatttgctgggataggtgagcatggtcatgctggagctgtgtggtcgattcccctcattagaaggagacsaatgcctgaaagcccagattgatgcagctctccatatagcaaagggaaaggggaagtgcagtttatccagcaagccagacacttgcccaggtgttgtggactggtgtcattgtgttactgtcacactagatgatwtgatatcaaatagtgaaatcagggaggtatccagtaccatccaagtttgggaaaagaagttcacagaacagaagggcatcttcagtcaggtggtagagtttgaggggctaagacgaacttgtagttctgaaatctgtctcccagctggatgccactctctaaaaccccaccttgacagccacagaactgagtttaagaggacttgctaatcaatgaatcctcatccccatgttatatgttaggaaatagaggctgaaggtaagcagttgatattcactgcttacccagtctacgagtctttttctttaagaatgcaaataaaatgcaaaagcctacagatatcaaattattaagcaggttgcctttgtgtattccatcttctagcaaaattcccctgtggcccaaaagactctgggcccccggaaagggggtgtaggcactggaagaagtgggcagtaagaacaggaggagtaatgacacaaccgtccttgccacgaggagtcaggacacagccacccttgccaggattgggaaaaacgggaacctctacaaaggcagtgcagggaagcagggaagcagagagcagaggcagaagacctggcttcctgttccacatctgccacttcttgctcactctgggaaagtcatattggtgcccaagcctcagtttctccatcagcaaaatggaagcaatgcctacttcacagattgtcgtgagcatctagtgagcagtgtctgtgatcaagtctgacccacagcacgtgaccaataagtgttcattgactgggaatgtgcaacttatcataycccagcaaggtcaggaaagcactccagggaatacttgttcctatgaggaatatgtacgacctgtagcccccataaatctgacatctgaacaaaatgctgctagtaagacattaaaactgtcagagaacatgtgcaggtaggccaattaagaaaaataaaatctgggattactgcttttgttgatttctggaggcacaggtggggagcagcataactgaattactctgaaaaaatcagtcattatttacttggcagacatatgtgtccacaacccaagtgacattctgggatatccattagaggcactggcataggaatatgaatgtccagtgrctgtagaatgaatgaacgaacagtcaatcacttgtgaattgaatgactcatagctctagtggcattataatttattattaataacaagctacagatttcatacatatgcattcatttaatatttttcacagacaagataagtgttacatgctctggggatacggtttctgaagcccagaatcatgacagcaagtcccagatgagaaggacaggaaaaaaactatatatatatatatatatatatatatatatatatatatatatatatatatatatatatatatgcacacacacatagcagcacacaaaccatctgaacaaggaggtctatctcctggttaccttttgcatttcagatttatatttaattgttctaaaagcaggttttctggcactatatatcaagttttctccaagtcactaagggaygaaatttgctaagcgactaaaccttggaaagmacackcatttttaaaatgccatcttcatgcagttcacccagtggccactagtggcctctaagaggccttgtatccgcggttaccaatctgcggatgatgactttggctccaggaacaccagcmccaagttaaaytcttgtctccatttttttcagtggccactcttccagttagcaagctgctcttgtaatactgactgagaaatgcagagaggcaagaagaggaaaaggggggaaatggcggstttttcatttctaatagttctgtagcagtgagtcctgcccatyactgygtgtgatatayacagtgttctaaggtatactgagtgtatataacgcccttaagtcatggctttggtaacatttggttaagaattattttggtaaaatctrtattttaaaatgtataaactcatgtaagtttcctctcatacacaccatgatattcaagaaaaaraaatgaaatatttgaggtaggcacggaaatcccagaggtgggaccagccattcagtggtagcgtttgacatctttgcatgattttaggcatctttaatgtcaccctttgaattcagttgtagccaggaaaggtactgagacgatctcctcagatttggatttgtatcaatttctaatagactgttctgcaggcttagttggtgtttctgaaaaatctctccactgccttcctggtctgaaaggttatgtgtagctggaaatgtaatattccagaagaaaccttatgttgttggtctgctttggctctatattgttaacaataggcgaccatttgtagcagtaattggaatcatttaacagttctattgtattgaattaaaactggaaagcaagcctggccctatttaaaaactgggttctagtagtttttcaggctaatggggtcttatrcctttctaagaatctcctccatcccaccactccttgtcagaattaaatcaaccaattaatgataaacctcctctttgtgcagagtaaacctctctggattgaaggttactgagagactaagaggcattcagtgtatgactgagaaatgctattgtccagcagcagttcctcctttcattcagttcctggaaaaatatacactggttttcacatatgtgtcaggagctgctccaggctgtcccttgggacatgaagttgagtaagttagtccctggcctcaagaaactctcagtgtagaagacaaaataaataaaagatcattgcaattcagtgtrataaagactgtgactgtgatttatgcaaattgcagtgaaataacagaaatcaatgtctagcrgtgtggtggagtggggaagaggatgaggagggcttcctgatgcaaggatattggagccgagacttagaggatgagtatgagtgttcctgacaggcaagcgcrtggaaaagtgtttgcagtagagggaacagtatattgcaagtgaggagggactaaaagatgaaagagaagatataagcctgggaaargatggcaggcatcacaccataccaggccttggggatcttgctttcctcctgcagataatgsgggacttgagaaggattctaattagcagaaatacataatcagaattatgctttacaaagtggtagggagggctgggcacggtggctcatgcttgtaaccccagcactttgggaggccgaggtgggcagatcaccagatcaggagttcgagaccagcctggccaacatggtgaaaccctgtctctactaaaaatacaaaaattagcctggkgtggtggtkggcgcctgtaatcccagctactcgggaggctgaggcaggagaatcgcttgaacctgggaggtggaggttgcagtgagccgagattgtgccattgcactccagcctgggcgayaagaccaagactcygtttcaaaaaaaaaaaaaaaaaaaagtgtaaggagaaaatggagaacaggagatatgtttggaagctgtagagatactccaggctagaagaggaatagaccagagggrttttagcccctggaggtatggggctcatttctcttgttscagcttcctctgagcacctgagcaatccttcaacattataggttccaggatgtattaataacaacactttataaattaagccacttaagaaaatgcttttaatcattctaattaaggacatgttaaaattctgggtacccaaaagaaatgtgagaaagagttatttttcctgtttttttttaaataaataaaccagtttctcatggatagcatttatgcttatagttcaataayaatattaccaaaaattgcatggagaattcagttcactagggaattcctagtatataaacctaaacatttaacttatttcaagatcccatctgtgacaggtataatcattctctgaagaatattttacaacctagggagacaataatttacattttgttcatattagasaaaaagyaggaggacagggaggcagttgctcctccggagatttttttcttttctttaacagtccattttccgatatgtttggaattaggctaaattgtgttaggtagacagtttgaaagctgtcactttgaaagagcgagctgccaagtttctagctacmgtatttaaaaaaaaaaaaaaaaaaaaggcggcttagcaatgarctgttccattttgccaggaactaggcttggacaggggaagcaaattcatttcctgtttgtggcaaacggagtctggatgatgataagactttttccatctaaactgccttgtkaacccagtaaacaaagcaaaaatcaatatgctagattcatcaatgcttgctggaacacactccatggcaagggacatttcctaggcaaaatggacaatggaatgaacaatgatatttttatgtctatgttcatattttatacagtcatcttcagagtctttgatactatcagctgttataagaaccaaatacttggttgacctgtgtgtggctgactcatgggcaatgaaataaattttgttgaatcagtggtattggggacctcacctctatccccaatactttggacaacccattaagcttsctcatgtcttttccatttgactacagtctggaacattatttctttaaactctcaacctctctgtgtagcttttaatcttccccttcttagccaagttttattttttttttatgaaatgtctttctttgtttaaatcattttaagacagactttttttgtttttgttttgagacggagtccggctctgtcgccaggctggagtgcagtggcgcgatctcggctcactgcaagctccacctcccrggttcaagcggttctcctgcctcagcctcccgagtagctgggactacaggcgcccaccaccactcccggctaattttttktwtttttagtagagacwgggtttcaccgtgttagccaggatggtctcgatctcctgatctcgtgatctgcccctctcgcctyccaaagtactggaattacaggcatgagccaccgcgcccggcccccaagacgcacttttaagagattatacaggaaagttttacttatcactgccttagtttttccccacttatagtaccactgtgattttatgtttttcctgaggcattggcttgttgaagtkatattgcaacagagaatcaaaagatcacttagaaaaagtaacatgttagaaaacatcatgcttagaattaaatgtctaaagtataccagtatagatgatataatttaaaacaaytgataytatcagctgtcataagaaccaaatacttggttgacctgtgggtggctgactcatgggcaatgaaataaattttgttttatacgtataactttatatatatgtaactttatatatatawaaaaagtttgcttatatataatatatatacacatatcatatataaatatattgtttataatatgtaaacaatatatacataaataatatataaaaastatatattatatatgtaaacaatatatttttaaaamccaaactcatgggtttatagttttttcatagtgaaaacaaacaaatatatagtttgcttatatctattatatataaacagtatataatatataaagatataaataatatataatatataaatatatatttgtaatatattatttgtttatatccatcatataatataaacacatgtaatatatataatttatatgaacaatatataatatataaacaatatatgtttttatatattatatgtaaacaatatatgtttttatatattatatataaacatatatattcatgatatatatgtatgtttgtttacactatggaaaaactataaacccatgagctggggttttgtctttttttttttgacttaggttttctattctcaaaggcattaatcagcaccctttttctcacccttygttatcaacatataagcaggctagraagacagtattttattccratgtgaaacaaaactgctgatctggagktcttatgttataaattcccacatcataccttcaactatatatatgtcctgaaactagcatattttgagaataaaatggkaaatgacatttaaaggacacctatggttaatcctacagtaaatgagataatttattttgaaatgaatgatcaactctacgctccaaattttcacgtaaaaggtgttcaggtgaaaggaggcatatttgctgtggcatttctgcacactgccccaggcactatagcaagataattaagacatggtccagtcttcaaggggattacaatcccatggctaaaaaatcacctatataaagataatacaaagagacratgatacttttttttttttaaaaagaagacagatgtttcctgcgaatcaagaggagaaatgctttctatttacctgtggaaattcaaagcaagcctgtctgctcagaagayaaggagtataaaatggcatgcttccctgggaaggctggaaggccactgctaaaaagcttcccagggacmttctttaccttgtgacttccattgctcagattccagcctcrcaccatgccttctcagatacctgactacttaatgattggtcctaagggccaatccaaatgctcagtgctattatgattattattgccatcaatttctgagcatttaccatgtaccaggccctaggatagagcactcggtgcattttctcatttaatcctcacaccaacttcattttgcagatgagaaaactgaggcacaggacatttatgtaacttgccaaggtcacaaagacagtacgtgagagttgggatttgggttcaggcagcctagctccacagtctatgctcttactatgctcttctacttctcttaataataataacaacaacaataataataaacatttattaagaatgtacttgstgtcagccactctataagataggtacttcattcccatattaaagataagaaaactgaggctcagakagattaaataacttttctgaggctgcacaatwagtaagtagtgaagcatttccaaaaacatattctgaaaaatgcagatctccaaagaaaaaagtttccatagtcatttacrtttggaaaccattgcccctctgagatatctgtggtatacatcagcatattaaagtctcacatgaatgcttcagtaaagaatcctgatcagctttggttaggcyagcattttccacactggtttaaacatggagctctaattcttccaatacctgtcaatatcccataaaactagcactatgccatgatggactgactctaaccagtctcactagacattaaccaggtacactaggctaggaggtaaagctggaaagccaggttttcatttgcaatgagaactaggatggatgagacataccaatgataccaaagaaatactcgaatatttctccgtctccagccttactttgccttgtaggtagagctgcttgggaagccaaggcaggactcatttcagggacacattatcatgcagggagggagggtaggaatagagaaggcaaatccaggagtaccagaggagcagtgccttgaacccctacatgcaggctaaactcacgtggcccctcacccagaacactgcaacagcttcttaactgggttcagcttccagctttgccccttccaatcccttttccactctgccaccagaagcagtttcaatatatatataaatctaatcatgtcagtttgctgtttcagattcttcactggatccaccatgcaattaaaacccaaactccttcgcatggtctccaaggctcgtgtgatgagcaggctcctccttactcttccaccgtggctcccactagtacatttcagccaaccatcatctttcaatttcttaagcaactatgcactctcttgcctcagtcttcacctatccttctttctcygcctgaagcattcctctccacccccctttccacatggacaactgactcctcttttgctcactgcttatgtctcacttccttcagagaaattccttattttctaccccctaaatgtgggttaggggctcctccctgatactcccctcagttctctttacttcctttgtcagagatgtctgacactgtgtcataattatctgtccacattttagcatctactgctgtgcgtttacttagttagtagttattagacagttgcctaatcaacatttatacccatgtcttgagtggcaacataaaatagcacacttataacattcccagaggacaagaagctagggagaatattaaatatattaaatgcatacttaggggttaaaatgatcttaagagcatgggacagtgagccaaattcaataagaagaaatttaacccatgcaaagtcttaatatcgaactaaacagaagaaaacaattgcacaaataaatatagccaaatagcaacatgagtgggtgacttgtaggggcctcaactgaattttgatccattgttgctagaaataacattagaatgtgttttaagggaggctgaggcagggggattacctgaggtcaggagttcaagaccagcctgaccaatatagtgaaaccccatctctactaaaacaaaaacaaaaacaaamaaattagccaggcatggtggtgtgagcctgtagtcttagcaacttgagaggctgagacatgagaattgcttgaacccgggaggcagaagttgcagtgagctgaaattgcaccactgaactccagcctgagcaacagagcaggactctgyctcaaaaaaaaaaaaaaaaaaaaaaaagaatgtgttttaagggttttgctttatcagatgcataatataaatcaacagtgagttaagagtatccaagacactgacaatatcttgatktgaaataatagactgtttattttaaaagatgtaatggtctcttttttttttttttacagaaaaaccacaactagagtaatgtacttaattccagaaaataacacttcaaaagagaaattgacaaagtggaaaatattccaaaacagagcgttggataaaagttctagaaataacttcttaaaaacagttaaataggctggatgtgatggctcacgcctataatcttagcactttggaaagccaagccggcggatcacctgaggtcaggagttcaagaccagcctggccaacatggtgaaaccccgtctctattaaattttttaaaaatacaaaaattagcggggyatggtggtgagtgcctgcaatcccagctactcaggaggatgaggtggggaggattgcttgaacccaggaggcagaggttgcagtgagccgagatcgcgccactgcactccagtctgggtaacagagcaagactctgtttcaaacaagcaaacagttaaataaatgaagaatgttttactcagaaaaaaaaaaaatcctatgagcagtctttaaatacctagagagtgccagctaaaatgaataagaggacttattctatatttatctagaagtcagaacgaggacccatggttagaaaaattacaaggaagcagatgtcagtttatcttaagagaagttttcaaataattagagttgtttaaaaatggactgtttgccctatgaaaaaatgagttccctgttcaaatggaagctagaagcccaagtagtagggctctcatgaaaatgtttcatgcagggtatagtagttctaccagatggctgagaaaatgctattgctgttctgtgagattctgtaaggatgtaatatcagtatattccttccattggtgctggtaaacggagaactgatgaaacccatttctaaggactttggtgtttagctatttttaaaaaaaaaaytttaaagcccctgtgctaagaaagaggaccagaggagttgattgctaagctccttttcaacaggaacatttgtgctcctccagctcattcttgggctggtttatcacggrgattgtggtcttaataagaccagaggacttaggagaaaggcagcttggaatagagaggtctagagaattaaacatctttagctcacagcataatgsaaagaaagtgcccttcaggggaacatgtatacaacagggttctgagaagaggtaaaaataaaactgcatcctgcactttctgcttgccgtaatgctgcagtcagggtaacccggggagcaccacgccctgtgaaatggctgtcacagtttaggggcagtgagccacagtaagcctaggacccactatgtgccaggcatagtgccagacccactgcaccgttatctcattgagccttcatagaccttctcagggtattagtatcctcattttaaaataagaaaattcagattctgaaaggtaaagtaccttaacgcagtaattttgacacctgagattcaaactcaggattgcctgaactttgaattgctcagcagtgtttcaggaactcctggactttaggaccgaagaggatcttaaagagcccaacttcttggttttgactatggaacacaatggggtccaaagggaccaggcatcctgcacaggatttatgtgtggaggtaaaggaagccattcgactatggcaggagatgccccggcatgggtacaagctcagcaactgtgctttctgcgcacatggtgcttatagccatgaaggcaaatcatgcatcaggcaggggcagggagggggagggcaagaggccagggcacccctgccgacccttctaccctcccaccccaccttctccccaataactctttacaatgccaaatgcacatgcagaaaccagtctctagactagatcttctaaagtacagtgaggacagggagttaggatgacccccactttcagtcatcattcatagaggggaaggggaaaagggcaggaagagagctgactttcatgtgtcagaccctttgctaaatgcttgcatacgtgtcatctcatgccgtctcctgtcacattcctgtaagaagtggaacatgttaggctatgaaatgaatattagtgtctccattctatgatgaagaaatgaatttaagtcacacatacaaagttagacaactaagaaacatgtgatttacgtttacactcctgatgccacaaatcaaaagaaaaacctgtgaatgttggcatcagacagtccaggttttgacttttgaactggcccattagtagctaaggaaagctgaggatagtttctgtgtcactgaaaacaatcacacttayctcatggaaatcttagtgtcctttctccagacctgctccctctctttcctgcatttgagggatgagatctacttttagaattacagagggaggaggcatttgaccctttttgaggtaaaaggagaattttagattaatggctaactttgtccttcgaatgtccccttgaggctttgtcagatttgattccttcctttggaaagataagaaaattgaagtggctattccctgcttctgcctggttagtcacagagtgaggcagtgacatgatgggaagcttctaacataacgaaaactagcgtgagactgagaacctgaagacttcaactctggccctagcttctctgtatttggatctcccagacaggcatccatctatcccacagtgagtgccttgtggtctgaaacgagatcaaaggtggaaaaagctttaaaaagctctcttcaaaaacaagaatgtcacaagaggctgactctcgagactgtgttcccctacccctgcctcctacagagtttcattcagcagaccttgctacctgccttcttcagggaaaataatcttgtttttgagtttatgtttaaactaaagttagttgattattttcttcaacccttgtttttcttgttcatagagtttcttaatgtcacgagcgttcacctgttcaaggagagatgggacactaamaaggtggaccaccacactgacaagtatgaaaacaacaagctgattgtcygcagagggcagtctttctatgtgcagattgacytcagtcgtccatatgaccccagaagggatctcttcagggtggaatacgtcattggtgagtgccatgtgcaagctccagtcttgacaccatgggttgcattgtagagagaggtgggtacaggcacagttgtgtgatttcctagtgtcatatgtcaacagtgkcaggagctggaatgacatscagcccctgaattaccctgtgctctaagactggtctgtatagtgccaaatattgataacttgggcccacccaaggagaaaatctcatataaataaaagtaaaactggtataatgtgttgcttaactaaattattcttcctcaaacaaatggttttggcatcctatgattctaacttttatctccatgatttaattggtctcgtgctgaaaatgtttgtaaatcttagcatgcaatccaagtatgcattccgaaagttgattctgctctgatctagtcccatgggatggcccgtgaaaaatatagtccaataaacttcactaaacactttgtactttaatcacccttttttttttttttttttttgagacagagtcttgctctgttgcccaggctggaacagtggtgtgatctcagctcactgcaacctcttcctcctaggttcaagcgattctggtgcctcagcctccagagtagctgggaccacagttgcacaccaytacgcccagctaattttatgtatttttggtagaggcagagtttcaccatgttgtccaggctggtttcgcactcctaacctcaagttatccacccacctcagcttcccaaagtgctgggattgcaggcatgagacaccatgcccagcctttaacctcctcttgaagattaacgatgcacattagcttcaaaggtctggggaaggaccatttaactttggtctggtgcttcttaaattaatttgatcatggaacccttttattaagttatagctattaacttttgacacattttggtaaacatttctataggaatttataagattatcaaggaaatacatgcacagagaagcaggggtggcacaacataggaaatctgcccatataatcctatgcacaaattaaaggaaaaaattaggcaatcaaatcagyagtcacagaaaggtacatggtaaaattcagcatccagttttaggaagagtttaaggggaaaaatttagaaaaaaaacacctcaatgataataaagattgcttacatcaaaacaacaacttttgatatctaagtggaaaaaagttaacaaatttcactgtaatcagaaattagaaagaaatgcctgctatcatcattccctttttaaaaagaagtactttaaaggytttagtaaatgaacaatgtaagagatacatctgctataaatgctggaaactaagaagtaaaactatatatttgctaatactatgattgtgtatgtagaaaacccaacagattcaagggaaaaaagcactgtattaataaaactttgtaagttggctagatagaagataaatatataaaaatcaataacttttatcttccccagcactaagcacccagaaatagacataaaaaaatttcacatgaccaaaactataaaatgtaggactaaaacctgaacacgcaacctatataaaccagctattaaatcttaataaaaaacatgagaaaccaatgaaaagtcaaacatgttcttgagtgggaagtctttctgtatacatttttagtctcccaaggggttggtcaaagaatacaaaatttcagttagatggaaggaatgagttttagtgacctattccacagcatggtgactatagttaataataatgtatatttccaaattactaaaagagtagattttaaatattctcaccacaaagaaatggtatgtgaaggaatgaatatgttaattagcttgaattaatcaatccacaatgtatattttgatcaaaacatcacatattgatcaaaacatcacatcccaaaaccccataaacatatacaattatgattgtcaatttttaaaagcctcccaaaattaatatgtaaatttaatgcatttccaattagaatcccagtggagttttgagttgtctttggctttggttttggttttttggacttgtataaaataatcttaaagttcatttgaaataataattacctggtgataaccaaggaaatcatacaaagaaataataagtaagagtattttctttctgaagcggctatcagaacatactatgaaaaatatttagtaggacataatagagaatccagaaatggatttcagtatatgagttaatatgattgttggtttcatgaagtaagaagaccatatgagattttawctgtttgcttgtttgtttttacataaatgatgcagaaataactgactctccractggaagaaagtttaaaaattgaccctcatcttrtcccatatacagtagtaaatctcagatggaatgagtattaatgtaaaaaagacaattttttgaggaaatttaacagacttaactaaaaactggaaactctgacactgtagaagaaagcaagaaccatgtacagttatgtgccacatagcaacatttcagtcaatgacagatyatgcataggtgatcttatgagattctgatggagctgaaaaattcctgttacatagtgatgtcatagctatcataatagaatagtgagattacttatttttttaaatgtactgtagcctaagtttatagtgtttataaagtctacagtagcatgcagtaatgacctaggccttcgcattcactcaccactcacccagggctacttctggtcctgcacgttccattcatggtaagtgtcctatgcaggtgtaccattttttacttttyatattgtatttttactgtactttttctatgtttatatataaatgtttctatgtttatatataaatacttaccattgtgttacaattgcctgcagtgctgtattcagtacagtaaaacacactatgagtctgtaacctaacagcagtaggctctgccatatagcctaggtgtgtagtgggctgtaccatctttgtttctatgatgttcacacaatgacaaaatcacctgcctaacaacatattacatcccgtgcatgacaacaaattcacgtttgaagctctggaccacagttctgctgcaattatgagggaagttttatctccatctttaaagccaaatatttagggtggggagaagaggagagggaagcttcaattctgaattggacttgtctgaggtttgaaacactctcataggccgttcagaaaataattatgataatggaagtcttagaaaaactggtaagatgaatgtcttagatcgggttactaggaaataaactctgagaagaagacttgtgcgcagaaagtttactggggagatctctcaggatcaacatctgcaagggagtggaggaatcactgttggacagagggaggagttgaactgcagtgcagacagggcccccgtggatctcaaggtgaactctagctatgggttggatcttcagagttgtctcgccttgagccaagggcatgggcctgttataccttttataccttgactggggttacagccttggtgtaattggttctctgtggctgagggtaacccctgaaagcaactaaatgaatgagaattgtcagccaccaacactcccaacaatgggaaaggtccaggcagcccaccacagcatccattacagtgaacattttaagtcctcttttcttttttacacaagaaatactattacttttgttccctcaataaaagagggggaaaagcatagctaatttgtttttgagataaaatctgtatatttttaaaccaacatgtattctaaacctttcagaacccatgatgtgtgcgttcagagttaagctgtattctagtatgtgtgggccattacagggccacatgtatttgaagattttctattataggtcacacacatttgaagatgtttcattgcccaacctgttgtagatacaagaaaggcaagtgacaaaattccacactctactatttagtgtagaaattaagcacacttcgaggggcgtggaaggacccatggtagaggatttatcttgatcagagtcatttctgcatctcacatcattcaggaagttacatgagagcctcaacttcatggctgccatagttgtaagacaggaagaaaaaagaacattgctggggaaataattctcttaaaattcagtgcctgtttcaataggactgaataaagccaaggaaattagattttaaggctaattgctataatgagaagagacaagtatagaacgtgaactagaaatgaaattaagtgcaaaggtttctatatacaggtgcacctcaatttccagaaactcagaaggtaaaagtgatggtttaaaaacgaaaaagaatataatttctattcatttttaaaaatctggcaacaccatttcaagagaagatccattttagctaacgttttacaatcagctaaatgtctaaacatttgagatatcatttactattaaaagtgaaccaaaatgtaacataaattaaaaaaaaaaacagacgagaataaatactttgttaaaaataaagggcacttaaaagaatctcggggggaggagccaagatggccgaataggaacagctcaggtctacagctcccagcctgagcgacccagaagacagtgatttctgcatttccatctgaggtatggggttcatctcactagggagtgccgcacagtgggcacaagtcagtgggtgcgtgcactgtgcgcgagcygaagcagggcgaggcattgcctcactcaggaagtgcaaggggtcagggagttccctttccgagtcaaagaaaggggtgacggacggcacctggaaaatggggtcactcccaccccaatactgcacttttccgacaggcttaaaaaacggcgcatcaggagattatatcccgcacctggatcagagggtcctacgcccacggagtctcgctgattgctggcacagcagtctgagatcaaactgcaaggcggcagagaggctgggggaggggcgcccgccattgcccaggcttgcttactgaaacaaagcagcctggaagctcgaactgggtggagcccaccacagctcaaggaggccagcctgcctctgtaggctccacctcagggcacagacaaacaaaaagacagcagtaacctctgcasacttaaatgtccctgtctgacagctttgaagagagcagtggttctcccagcacacagctggagatctgagaacaggcagactgcctcctcaagtgggtccctgacccctgacccccaagcagcctaactgggaggcaccccccagcaggggcacactgacacttcacacggcagggtactccaacagacctgcagctgagtgtcctgtctgttagaaggaaaactgacaaacagaaaggacatccacaccaaaaacccatctgtacatcaccatcatcaaagaccaaaagtagataaaaccacaaagatggggaaaaaacagaacagaaaaactggaaactctaaaaagcagaccgcctctcctcctccaaagaaatgaagttcctcaccagcaacggaacaaagctggatggagaatgactttgacgagctgagagaagaaggcttcagacgatcaaattactctgagctacgggaggacattcaaaccaaaggcaaagaagttgaaaactttgaaaaaaatttagaagaatgtataactagaataaccaatacagagaagtgcttaaaggagctgatggagctgaaaagcaaggctcgagaactacgtgaagaatgcagaagcctcaggagccgatgcgatcaactggaagaaagggtatcagcgatggaagatgaaatgaacgaaatgaagtgagaagggaagtttagagaaaaaagaataaaaagaaatgagcaaagcctctaagaaatatgggactatgtgaaaagaccaaatctacgtctgattggtgtacctgaaagtgatggggagaatggaaccaagttggaaaacactctgcaggatattatccaggagaacttccccaatctagcaaggcaggccaacgttcagattcaggaaatacagagaacgccacaaagatactcctcgagaagagcaactccaagacacataattgtcagattcaccaaagttgaaatgaaggaaaaaatgttaagggcagccagagagaaaggttgggttaccctcaaagggaagcccatcagactaacagcggatctctcggcagaaaccctacaagccagaagagagtgggggccaatattcaacattcttaaagaaaagaattttcaaccccgaatttcatatccagccaaactaagcttcataagtgaaggagaaataaaatackttacagacaagcaaatgctaagagattttgtcaccaccaggcctgccctaaaagagctcctgaaggaagcgctaaacatggaaaggaacaaccrgtaccagccrctgcaaaatcatgccaaaatgtaaagaccatcaagactaggaagaaactccatcaactaaygagcaaaatcaccagctaacatcataatgacaggatcaaattcacacataacaatattaactttgaatgtaaatggactaaatgctccaattaaaagacacagactggcaaattggataaagagtcaagacccatcagtgtgctgtattcaggaaacccatctcacatgcagagacacacataggctcaagataaaaggatggaggaagatctaccaagcaaatggaaaacaaaaaaaagcaggggttgcaatcctagtctctgataaaacagacttcaaaccaacaaagatcaaaagagacaaagaaggccattacataatggtaaagggatcaattcaacaagaagagctaactctcctaaatttatatgcacccaatacaggagcaccaagattcataaagcaagtcctgagtgacctacaaagagacttagactcccacacattaataatgggaggctttaacaccccactgtcaacattagacagatcaacgagacagaaagtcaacaaggatacccaggaattgaactcagctctgcaccaagcggacctaatagacatctacagaactctccaccccaaatcaacagaatatacatttttttcagcaccacaccacacctattccaaaattgaccacatactgggaagtaaagctctcctcagcaaatgtaaaagaacagaaattataacaaactatctctcagaccacagtgcaatcaaactagaactcaggattaagaatctcactcaaaacggctcaactacatggaaactgaacaacttgcccctgaatgactactggatacataatgaaatgaaggcagaaataaagatgttctttgaaaccaacgagaacaaagacacaacacaccagaatctcagggacgcattcaaagcagtgtgtagagggaaatttatagcactaaatgcccacaagagaaagcaggaaagatccaaaattgacaccctaacatcacaattaaaggaactagaaaagcaagagcaaacacattcaaaagctagcagaaggcaagaaataactaaaatcagagcagaactgaaggaaatagagacacaaaaaacccttcaaaaaattaatgaatccaggagctggttttttgaaaggatcaacaaaattgatagaccgctaacaagactaataaagaaaaaaagagagaagaatcaaatagacacaataaaaaatgataaaggggatatcaccaccgatcccacagaaatacaaactaccatcagagaatactacaaacacctctatgcaaataaactagaaaatctagaagaaatggataaatttctggacacatacactctcccaagactaaaccaggaagaagttgaatctctgaatagaccaataacaggatctgaaattgtggcaatgatcaatagcttaccaaccaaaaagagtccaggaccagatggattcacagccaaattctaccagaggtacaaggaggaactggtaccattccttctgaaactattccaatcaatagaaaaagagggaatcctccctaagtcatttcatgaggccagcatcatcctgataccaaagccgggcagagacacaaccaaaaaagagaattttagaccaatatctttgatgaacattgatgcaaaaatcctcagtaaaatactggcaaaccgaatccagcagcacatcaaaaagcttatccaccatgatcaagtgggcttcatccctgggatgcaaggctggttcaatatacgcaaatcaataaatgtaatccagcatataaacagaaccaaagacaaaaaccacatgattatctcaatagatgcagaaaaggcctttgacaaaattcaacaacccttcatgctaaaaactctcaataaattaggtattgatgggatgtatttcaaaataataagagctatctatgacaaacccacagccaatatcatactgaatgggccaaaactggaagcattccctttgaaaactggcacaagacagggatgccctctctcaccactcctattcaacatagtgttggaagttctggccagggcaattaggcaggagaaggaaataaagggtattcaattaggagaagaggaagtcaaattgtccctgtttgcagacgacatgattgtatatctagaaaaccccattgtctcagcccaaaagctccttaagctgataagcaacttcagcaaagtctcaggatacaaaatcaatgtacaaaaatcacaagcattcttatacaccagcaacagacaaacagagagccaaatcatgagtgaattcccattcacaattgcttcaaagagaataaaatacctaggaatccaacttacaagggatgtgaaggacctcttcaaggagaactacaaaccactgctcaaggaaataaaagaggatacaaacaaatggaagaacattccatgctcatgggtaggaagaatcaatatcgtgaaaatggccatactgcccaaggtaatttacagattcaatgccatccccatcaagctaccagtgactttcttcacagaattggaaaaaactactttaaagttcacatggaaccaaaaaagagcccgcattgccaaatcaatcctaagccaaaagaacaaagctggaggcatcacactacctgacttcaaactatactacaaggctacagtaaccaaaacagcatagtactggtaccaaaacagagatatagatcaatggaacagaacagagccctcagaaataatgccacatatctacaactatctgatctttgacaaacctgagaaaaacaagcaatggggaaaggattccctatttaataaatggtgctgggaaaactggctagccatatgtagaaagctgaaattggatcccttccttacagcttatacaaaaatcaattcaagatggattaaagacttaaacgttagacctaaaaccataaaaaccctagaagaaaacctaggcattaccattcaggacataggcatgggcaaggacttcatgtctaaaacaccaaaagcaatggcaacaaaagccaaaattgacaaatgggatctaattaaactcaagagcttctgcacagcaaaagaaactaccatcagagtgaacaggcaacctacagaatgggagaaaatttttgcaacctactcatctgacaaagggctaatatccagaatctacaatgaactcaaacaaatttacaagaaaaaaacaaacaaccccatcaaaaagtgggcgaaggatatgaacagacacttctcaaaagaagacatttatgcagccaaaaaacacatgaaaaaatgctcaccatcactggccatcagagaaatgcaaatcaaaaccacaatgagatgccatctcacaccagttagaatggcaatcattaaaaagtcaggaaacaacaggtgctggagaggatgtggagaaataggaacaattttacactgttggtgggactgtaaactagttcaaccattgtggaagtcagtgtggcaattcctcagagatctagaactagaaataccatttgacccagccatcccattactgggtatatacccaaaggactataaatcatgctgctataaagacacatgcacacgtatgtttattgcggcattattcacaatagcaaagacttggaaccaacccaaatatccaacaatgatagactggattaagaaaatgtggcacatatacaccatggaatactatgcagccataaaaaaggatgagttcatgtcctttgtagggacatggatgaaattggaaatcatcattctcagtaaactatcgcaagaacaaaaaaccaaacaccgcatattctcactcacaggtgggaattgaacaatgagaacacatggacacaggaaggggaacatcacactctggggcctgttgtggggtggggggaggggggagggatagcattgggagatatacctaatgctggatgacgagttagtgggtgcagcgcaccaccatggcacatgtatacacatgtaactaacctgcacattgtgcacatgtaccctaaaacttaaagtattataataataaataaataaatttttaaaaaaagactaaaaaaaaaagaatctctaccagtacatctttaagagtgtttataacaagagacttaccaacaaagattgacttactgtcactcactatattagtcagtgttctcttgagggacagacctaataggatatatatatgtgtgtgtgtgtgtttgtacatatacgtgtgtgtatatatatatatgtgtgtgtgtgtgtgtgagtgttgtgtgtatatacatataaaggggagtttatttaagtattaatttatatggtcacaaggtcccacaataggctgtctgcaagctgaggagcaatgagagccagtccaagtcccaaaactgaagaacttggagtctgatgttcaaaggcaggaagcatccagcatgggagaaagatgtaggctgggaggctaggcccatctctccttttcaagttttkctgcctgctttatattcactggaagctgattagcttgtgcccaccagattaagggtggatctgccttccccagcccactgactcaaatgttaatctcttttggcaacacctaggattaatactttgtatccttccatccaatcaagttgacagtattaaccatcacactcactatatacttaaaaaaactttttttttaggttcgggggtaaatgtgcaggtttgttatataggtaaaaacatagctgtttcataaagcaagctattattatatttaaaatacagaaaaaataactttatacttagttgcttccaatttgcattcagtttttttgttgaggttgctctctcattccctgtgcctgtatagatgagctgagatatgttagtacactggagtttccctatgttgctgttctcagaacctaggtcatgggatttatttatgtgattctgccttctaaccaatttccttctctccctccctccctccctccctccctccctccctccctccctctctctctcactccctccattccttccttcctccctcccttcctcccttcctcccttctttccttcttccttctttctttctaaatatttaaataaatagggctcttggatggtgtgctgggctctgagtagagaaggtgagcaggagagctactgccttacctggccacggcttgatgagctgtgctgcaggggttctttgtgctttgataactgcgttcatgagttgctggcagagcacagctatctctgtgttaggtgggaggtgttaatgaatctgaggaggtgggtgtggctgaaaaatgccctgggagtctgcagggccttctctctctctcacctctgagcctgcagcctcgacaaatcatgaaaggcaaggaggggagtggtaatcacaggttttactaacctgtggctgagrctgtgaaagcttgggagcagcttctggtgttaatttgctgttactttgacatgggcccctgcttttttgatacccagttgagggtgaaatcccaagctgtatttcttaccaggtctccccctcaaaacggcagaggtttcactccctgaggagccctccgaagtgacagtagggtccatgagcaagtttctttctccctggagttcaaccacaggaacctgggggtgtccaggtcagcgctttggagattctcctgacctttccctcaattctatgatggccctcacagattcaagcttcacatttctggttacagcagaaagatgaggagaaggatggcattagcatgccccaccccacttatcaggaaaacaaaagctttcccaggcacttctggcaatcgtttatgtttcatttgctacccttagctgtaaggcaagctgtgaaagtattccctttttccagtctcttcagaggagagggatggggcagagctgaaagtgggtgctggtggacccgcagtcatgtgtgctgggcatcccccctagctgggccatcctgtgagtataaaagtgctgtcctaatgctggcagccttgaggcaggttgttcatcacccgctcaagcatttctaggactgggtcaactgcacatgttctgcatcacaaaccctataaaacatggaaatgtcatcagcaacactttaatatctttctttcacttatttcttgagtagcatttatggaaagccagcggcggtgttggatggtgttttcagggtgggagtgacatggatgattctcatttgagatagcttgctctggcccacttcagggaatcagggtaattcaggataggagaggagatgatcagaagagagaggatgagaaccggggttatggctgcagttgtagacatggacaggagtgacagggtttgagaaatayttaggaggcaaaatctgcaggayttgtgttggggagtctgtgaggggtggaagggaggagggtcaaggtcracttccaggtggctggcttatgtgactatgatgacagatgctagcacttccaaatgagataaagaatgcctggaattccagaggraaaaaatcgagtgtggaaaatgctaatggaggtagtagcttcattgataactcattggcactgktgctgtgcagaggtgctgtatgcctcccatttaattgttcaagcagccctctgggcattggactatggccatctccatttttcccatgagataatggttgaaaggattaagtaatttacccaggtcacacctggaaagtgctgggacctcaatttggacccaagcagcctcttctacttacaatgcttactacctccaccragggagcctccaccaaggagatggtggaggtatgaatatgcttctgtttgaattgatgagtgtgaattasttgagggactttcaggtaaacctgtccaatagayaatatgagtctgaagcttcrggaggaggtttgggttggacaggagataatttggatatcatacacacgtgggcaagctcactcagaaaaaggtaaatcaagtcagcagtggactgaggcttaagccctggggaaaacaacttctaaggcatcagtccagaaactagagcccctggaggagacaaagaccaaatgagcagataaacagaaggaaaataagggggttgcagtgtcactcaatccacgagagttgtgtgtttcaagaggaaagcatgaccaatgttattaaatataactaggagatgcagtgagataggaacttcccactggagtcaacagttgggggacactggttgaactcgggtagattccaaattttaatggtctaaaagtcaaggagatgtgaggaaatgggtgtagtcaatttggatgaatctttaaagaaatttgaaggagaggaaaagaaaatttgggtggtaactagagaggaatgtgggtgagaggaggggtgtttcaatttcagtatttgtttcaggattggagggactggaacatgtagcaggcagagagggaagaatcagtcaaggaagaattctgaagattcaggagggactggaggagaagcatagaggacaggggcacgggtgaggggctgagtaggaaggaaaattcctcatcttccaaggttgtcgagaaagaggtgaaggagggtatgactgccgtaggtggagaagtatgaactaagcctcatgcctgacaatctcaagttatttaaagatgtaggtggtgagcaggtgctatagggtcttagaggggcagatgagtacccttacatctgaaaacatcatccatatcctttaagactatgtcttcctatggattttgtttcagaaagtccaggtaaaatcatcatgctgatgtgtgattttcacatacataacatactttctctattgagaaatgtcttgccccaaactgtgcagcttgtaacgtgtagataactatttcttagcctrtactctttcaactattttgtgctgcattttggtgaaaatagacagcctatttcatcattttgaagcaacatttatatagaatgtcatttcagatttttgctcctatgggtttctgcattgatgatcaacgtgtttatttttaagcatctctgtgaagtgactaataatggcatctaagaaagtaggacagtgtttcccagagtgtrttctctatgaacacctgtcatgtgagattctccttgggggaaaaaagttccatcrtcaaatayagttggatcatgctgtgttttgtgtctcttctcatagaggcccaaggcacattaatatataaaaggctatgagtagacacgtagtcaaaaaatgaatcttgtttagcccaataattcccaaaattgttctactataaacactaccctaccacatttttatttttataataccattgaataaggtgcagaactcattccaggaaatgctgaactatagaggcatattacctctattccatacaacactgaggcaggtggctgacagaacttgaacagatttgtagtctatgtgttgtgataactttatatccattttttctttttgacacttaagattttgtgcaaacattgaaataactattaatttggcattcatatttagtaacttttcaaaaataattgttaagagtatgtttttatatttatttttcagatatttatttggcttctttcaaccataaagcctatttattttctttttgaatgtgcttattgaactcttatttaatactttgtatgtgcaaagcaccatattgggattagagtagtaagatatgttcatcccttgcctccagaggatttgttgtccagaggggacagtctgagtaggaaaggctgtgttcaatgccaaccttttgaacaaaatgcttagaagctactttggagggagtgactgatggcaagaatagttgaaagaatcctccagaaagtgctatttgaggcgggtctcaaaaaacgaatagaaattgacccaggggratggaaattgtatacattctagaaaaaaaaaaatagaaaagttcagtggagcatgacattttggaagcacactgatgtctttgtatgacttgataagaagtttagatgtaattctataaacagccagaagcctctgtagtagcattttaggtagagtattaagatctgatttttttctactttttagattactatagcagaagtgtggaagataaattggaggamcgagattttgttagggacattagtaagagactcaagggggaaaaaaatctcactaataaatgataggataaatggatgctgcatgagtttgtatgatttttcccctcctttttttcccccaaaggaacttatgtttacttctataactagaagtagtaaaatgtgtgtgtgcgtgtgtgtgtgtgtgtgtgtatttgcatagtaaaatgggactcacctgtagtgaagtaacacactgtggtctgaggactaacaatatgccccagtggctggccctctgccatttgtaggccatctcagggatgacagctcacgtgattaaagggctaaatgaagccctttttggtggggaaagaggsggcttggactcaaggcagtgcccagtcagaacccgagctccaccatggatagcagtgacagaatcactttaccccaccccccatcacattactgtttcctcacctgcaaataaggactatactatttattttaaacagccatttatgggttaaaggagataatgtataggaaaccacttttttattctcacaataaactgggaggcagggaaggtagaaataaaacttattaaaaacatggaaaccaatgttcacagggattaagtgatttaccccaggttgtgggcaaaggatctgagcaaacatttctcaaaagaagacaccaaaatggccaactggcttatggaagaatgctcaacacctctaatcatcagggaaacgcaaattaaaaccacaatgaggtgccacctcatacctgttagaatggttactaccaaagagaatgataacaagccttggcaagaatgcagggaatagagaaccctatacactattagtgggaatgtaaattaaggcagctgttttggaaagtcgtgtggcagttcctcacaaaactagcaatagaactaacgtgattcagcaatcccacttctgggtatgtatctaaagaaaattgaaatcaggatgttgaaaagatgtatgtagtctcatgttcatttcagcatcactcacaataaccaagatatgaaagcaacctaaccaatggataaagaaaatgtggtatatagacacaatggagtactatacagcccttagaagaaggaaaattctgccattctcaacaagggtagaactggagagcactatgctaactgaaataagccagrcacagaaagatgaatactgtatgatctcacttatatgtggaatctgaaaaagtcaatctcagaaacacagtagaaagttgtttaccagaggctggggcttgggggcaaggaatgaggaaaaagaagatgttgatcaatgggtacaaagtctcagttagactgaaagaataagttttagtgatctactgcatggcttggtgaccacagtttaaaataatgtattgtatatttcaaaattgctaaaagaatagatttttaatgtcttcaccacagttacctttcttttttccatgtacatagaaaagaaaggtaactatgtaaggtaataaacatgtgaattagctgattgaatctttctacaatgtatacatagatcaaaacttcacattgtatcccaatagattccccataagtgattgtctattttttaaaaaacatctacacacgcacaaagaaaatgcttccaaaagcaaataggagggcattgctctcatgtcttttgtctcctggtggcaaagacaaccatcactgaacctcccaacagaaatacccagtctccttgttacatccattctgacagcttcattagtcacataggggctctgacaatccacaggccaagttctgcctggaattatttgcccatagttctagctgaagtgacagaaacagtttaatctcaaagtaggtgggattgccatccatattttggtgccagagaccttaccatgtgcttcctcagccctgccctgtcacccacatcatgtctgcagagctggagtttcccagtgaagcttatggtccctagggtaatagagtcgctgatgtctttgtcacattaagggtgccacacagagcacttatgaagggccatgggtatcggaatgagaacactcagaacatccacaaacgcttcctccctgactgcctcctgtgctttctcccctctttcctattcccctaatttgccttcacccttgctcctatgtctgtttctctctgtcttcacacttgtatcttatgatgacctctttcacttacaagaattcataaacgtggctcatttgcacccacataattgaaactgtactccaccagaaagcgctggtctgaactcagggaggacggactgtgggcattccctggcttttccacataaattctaagacattcttgcagcatatgaagcaagaggtgaaaaaggtgggggaaaatatttaatgaaaacaaatgtgcccactgcgataacttgctcttgagtctctaatctaaaaagagagcatgcaagtggaattacagcccactaaagaaaggatccaaatggactaaatattcttcatctttgccctccagttactccagaagcatgttgtaaggattaatgagggaataactggaagctctttgaactgcttcgtgatagttccttcctaataagatgacccaattaccagscttattttcaatattgcaactatgtaggaaagctaaattcttatggtattccttaaggaaggataaccttcataaaatgctactataacagcagccagagccagacaggtattacacaaccataagacaggctataaatagctgtacctctctcttgctaccctcttcaccctctttcttctcagtatcttggcctcttttctgatcttttctcttctttcttaagatttctattactttcatcccggcctgtctgtttctgtcttgctcttcctctctgtctgtctctcatgcatacatacacactgtcctgtggatgcacgtctaggtgttagtggcagcaaatgtactggagtcccacrgcaccaaagtatgttagcagcagtgaatccayatggatctacagcagcctcaattcttgcctcctcataaggcaggagagactggggcaagttttagagcaggagtgaaagtttattcaaaagctttagaacaggaatgaaaggaaagaaaatacacttggaaaagggccaagtgggtaacttgaaagacaagtgtacagtttgactttgacttagggtttttgttcgtttttttgagacagactcttgctctgtcacccaggctggagagaagtggcgcgatctcagcttactgcaacctccacttcccaggttcaagtgattctcctgcctcagcctctccagtagctgggattacaggcacttgccacaacacacggctaatttttgtatttttaatggagatgaggtttcaccatgttgaccaggctggtctcaaactccttacctcaaataatccatctgaaagtgctgagatgacaggcatgagccaccgcacctgactgacttcaggttttacctgttggcatacttctggggtcttgcgtccctactyctgtgattcttcccttaagtggtgtgtctgcgtgtgcagtggcctgctagcgcttagaagcggagcatgcacagtgcgtttactastgttgtactcgtgaccacttgatgcattttttccttaccagttgagtgtccctggaggaaggccacatactggttaaattccgccattttggctcttagtgcgcatgcctgagcccactcacccaactgctgaggttttattgggaagctgctgatcaccagtttcaggtatttctgtttattgggagactgcccttccctagcactggctgggaccaattattattttagaaggacagtttaacaatgaccgtcacctgatggtcgcctgccattcctggtgtgtgcgtagtgggggaagccctctcctcccctactcatgcctgactaggtacctactgtagcataggtatttactcatttgttagagaagtaatgggagttacccttgggaggtgggtctgaccgtttttgtgtctgttcatgagcatttctttagccttcaggaagctggggctggatgtgctaaatgtgctgcccatctctggctaaagcctagcttagccattgggatgctccttctctgcactgttggaggttttgctttggcttcttcaacttccttgtctatttcctttccaattctgtttacaaatctctataacatcttgtcccatgtctggttcagtgaatttgtgatgcagaaacctctgctgtgtccagcagtttgtgacaccccagagggggtttaagaggaatgaaagaccccatctctgtcttttttctttttgagttggagtctcgctctggtgcccatgccggagtgcagtggcgtgatctcagctcactgcaacctctgcctcccaggttcawgtgattctcttgcctcagcctcctgagtagctgggattacaggtgcccgccaccaggcctagctaatttattttttgtatttttagtagaaacgggatttcaccatgttggccaggctggtttcaaacttttgaccatctctgtctttaaagagcttactgtagttggagtgagaggaattccacaaacaatgaacacagtcagagagtatataattgagctatactgatacagttgccttccagaaatgtgtgacacgactggccgaagtgactctgggcagtcaagagcaagaggatcagctagagttgaagggtaaaatctcagaaaagggcagggaggtcttgagatgactcttgaggaactgggagcattccaagagggctacgaagtatgtaccctccatgcaaggaggacggcattcttggtagtccaggagcttattgttctgctgatgcaaacaagcttctagtgagaaggaaatatttccctgaatcaagtgtctggctgcatttggagtttggacaccactcagtttcaaggctctggagttgtaagaagcttgcagcggcaggaaaggcccatcaggcaggcccatgaggaatgtgctcccctcatgcaatcagtctgctgttattgcttggttagtgcccagggtggacaggggccttttgtattaaagcaattaattttacaaaaagaggaagaaacccttatgtttctgtgactaaaatgacggaaatgaagtagtggagacagctgcagtggcattttccatcaaacagcttttctatttgtgcaacatatttctaagtgatagaaaatgacacactctctccattacttcacttccatcatttccatcatttcaaccttttctaactttcatatttgtgaaacaaattgctttaaacatgtcaaagacatttgagtggagtgttagccaaattttaaaaataaagatgattcataaagacagtgcttgtgtttatagccatcaagacaaaatttcaggaaaaaaaatcacagtcctaattactgaaggcgcatgcataaggtaatcatatttggaagttagaaacaaatctctttttgctctctgcctcttttcccttagatttatatgggttggtaaacctggccttgtggtactcaatcatccttgcttcagtgattcactaagtaaccccttgcgagttgatttctccagcctctggatttatttgcattgttatgcaatgggtggaacacctcactgctgttctgctcctcagcagttagttctatcttctcttacagctgatgcttcttgaggggaaaggccaccttgtgtcttttgttagagataggatgttgccaagggtagggcaaccaggagggtatcccttagcatgtaactttgaagaatcaagattggtgctccacacaaagttcgttcaaaaatgtttctcttaagaaacttaaaaacctacatcgctgatggaaaaaaaaaaggaaggacatgaatatacaggataattgtacaaaaattgggtacatgtattgttgttgtttaaaagttttttttaaatttcgaaacaaactccactttacagaaaatttacaagacaaaccatacaaagaactgttttttcccagaaccgttattagagttgtcaatctgatgtctcgtcatccctgaatactttagtgtgtactacctatgagcaaagacattcttctgtgcaaccatmaaaataaggaaattaacactgatatttgatggtagtctaatctttagaacacatttgagtttttctacttgttcagtaatgtaccttatagcaacagaagctagtccaggatcacatgttatatttagatgtcatgtctcatgtctttagttttctttaatttggaacagattcataatcttgctttgactttcatgatttgacacttttgaacattacaaggcagtaatttttagaatgcccctccatttgggtttgactgatgtttcctcacttgatgttaaaatcaagtcacrtatctttcacaggaagattgcagaaatgatgctgtgttcttcttggtgcctcctacctggttgcacataacttttacagatcccattactgatgatgttaacttaaccactcgattaaggtggtggcacaggttgagtgcccaggaagtagactgtgaaattagcatgcaagctgttgattagggagtgctgttgggatcaactcctgtggaaggaagcagtattaggtagtgggggagtcaggctgcaatgcactcacaccaaaggcctcagatgaccctctgtgaaactctggagctgagatagctcttcatagtgctcctgagatgaggacaaagggatggggctttgttcctccatagtgatcagtcactggatgtgagccacccctggaatgaggtgtgaccctggatgaggcagttttctyctgctaaggcaactcccaaggaggcctgaaccaccaaggactattttctgtcatcactcccagcagctgaggataagcctgtcggtcatttccgaaggtgtcttgggcagaacatcacagagcccaacacagaggtgactgttggggttacccctgcaaagttattctttgttccttttatagttaataagtactttataggaaattatcttgagactataaaatcccatttattaccaaaattattattgatagaatgattgattaatacctggatgaatcctgattttctcttttaattaaataggttacttaaatcttttattatcattaaataacttaatgttcaaacagcctcgattttgccagttggactgttccaactagtttcagtatccttacttcctcatagtctgttacagtaagatgtttcaggcccgttttgagttttccctgcacctaccctcaaaataaccatttatctaaggagaaacatttctccaaagaactccacttcattttaatagaaagtagtatttagaaaccaaggtctagatcctaggtgtgctcattagtattttacctcctttcagtatttcccaattcaacctaggtatatctcacttaccattcttttcacctctctgtcatacctatggtgacccctgattcatgactcttgtcctccatacatttttttttttttttttttttttgagacggagtctcactctgtcgcccaggctggagtgcagtggcatgatctcggctcactgmaagctctgcctcccgggttcataccattttcctgcctcagcctcctgggtagctggggactacaggcgcccgccaccaggcctggctaatttattgtatttttagtagaggyggggtttcaccaagttcgccaggatggtctcgatctcctgacctcgtgatctgcctgccttggcctcccaaggtgctaggattacaggcgtgagccaccragcccggccgtcctccatacattttttatctttgagcttgtcatttactgagtcttcacaatgtgccaacagtgtgctctgtgtttgcattagttttatgttgctgttgtaacaaaatatcataatcttagtggcttaaaacaacaaacatttattattttgatataaggtataatgatatataaaaggtgtaatgacatcttaactgagctcctcctacctagtgtcgtcccttagggaggaatcagtggaattcagatcctgattattctggctctaaatggtccagaataatcaggatccgatggctggtcctggtatacctggtctgacactgggcctgggatctggaaaggtcttagaagaaattacattgagactgtaaaatcccctgaggaagaagacaaggtcttcagaatgtgaagtaaagagcatgccctctcccaattttatgcaatgagtgaaattctattatggcaatttattcatttaagatatgaaggaattattttctacaaagtgtaaatatggaggtaagaagaagtattagcactcttcttagacattaacattttagcaaaatgaatttattagactcttgccattaactgttagctgagaccagttcccttagaacgagttgccaaatgaccgttttcatggggagccatgcgatgttcaatgactaggtgctgccagggaaggctggcccagctgagtcccaaagtgaggattctccagccactccgcaaacagtatgaaactccagggtacatgcttaaagcactctggaatttaagtagtggcagatgttttagaagaaattccactgtgccactttccaaagcactggaattaggtgttatttacggaaggcaatattgtaccccttcaagcccacaaataaagaggtactcagcagtgacctttattaaaggcaaatcagtggggaacacatgaccagaggaaatgagagaagattggaatatattctaaggccttaaaaagatgtcaagaacaattgtgttcccccacaaggcatcmttaggcaaggatggtccaacctcaatacggtttctttacatccctgtgtttcagctacatccgtggtctcytgtattgtttatctatgtcacttgcaaaaaactaggcttgaatacagttttttaaaagtgatgcttttaaatataagcggtaatcaacttatgaaggaacaatgaacatctatagtaagcaaataaacatccacacataaatatacatatgaataaacaaaatgcaaatgtgtgtcattctttctgccagtcctttgagttccatatttgttgtcatgtagttaataaagtcgttgacttcccccacggtctactactcttgctctgttattctcatgtggcattagtattatgaattaaattacagtctaaacttgcgtatttaattataaacccattgagcacaggaaatgtatcatatctcagcacattcaccaccctgtctcctccagattaagtggtatcactctgctcatcataagcactagtaaacatctgtttaaataaatgtttattgagtatgtattgtaaatatccacttgtaggttaatactagatggactgtaccatactccttagaatgttttctatgttgatttttgtttctccartaattgctttaatctctggcaatgcaaactcatttaacacttgcttttatatattgcattcatatatactccaaagacaaacaaatgctttatcagaattaccagtgatttattctcattattgttgccattcaattattaacaggaattgactgttttagcaaaaatgtcatcagttggcctgttttgtttggaagacattcagctaaactttttcctttgttggctaatgacactttattttttaagtcagttgccatgattttaacgaaatgagcctttcttgtaaaacctagaaggctcattctgctcatataatggatggaacacaagcaaatgagcaaatggtgctttggctccatagacttgccatttgctgggggaaattcagttgctgtaggagattctttacggcatgtgttctgagctgactgagaacatgaaagagatgggtctcgaagatgctaaatgcagtgcatctggtcagtgaccttcatgttcagtgcaaagtgtgcctccccaccaagtccctctccaccccttgggcttccagaccccagcacgaggggtcagaaacccaagaaatatggaaacattctttgtcagttgaaagaattgcataacagttggggtcagatggggcaaaaagctgggtatgcagtttggtttataactgtgaaatctggcaaactacaataaattagacattgtgacaccaacatcctatttctctgtctcacatctctagatcttaaagagtttagccttcatggattgatagaataacacagtcttgtttaaactcatgccaaggaagggctggaaactgccctagaaacaatggtcatgtagatgaactttgtgcttctggtggccacattttttataccatgtcccctgagcaagtttccctatttccaacctccactttcctccctatttccaacacccagttccagcttttaggaaaggtacatagtgcagtaaatttaagcaaacacattgcctttcccagggatataaacatttcagcatcatctctaatttctcttctgttggtaggattttcattaccaacaagcaaagggggaatattgagaggtcaagagatcttcatagcaatcctgattgctctcctgcagtcttcacagaacaaccaaagtgattttttaaaagaacttaaagcagaccatgcctcttttctagtgactgcttttctcaatcagaataagatccaaagtcctacaaagccctgcttgatctggctgtctctgacatcatcttccatggtttcccctgctccaggaactttctcgtctcccacaattcccctgctcaggcactgtcacctcccacaattccctctgctccaggcgtctaatctcccccaattccctctgttcaggcacctcatctcccacaattccctctgtcccaggcatcttatctcccacagttccctctgctcaggcacctaatctcccacaattccctctgccccaggcatcatacctcccccaattcccctgctcagatacctcacctcccacagtttctctgcttcaggcacattggcctcctcaagcatgccaagtaccacctcccacagggtctttgcactgatgacacctgtcccctgatatttgcactgctcattccctcacttttctcaagtctcttctcaaatgtctcctctggccactgtctctaaaatagcacccccagctctgaccctctctgtcctcttaagctgctctagtcattttttcatagcacttgtctccgtttgacgtatcatgtatttatttgtttattgtccgtatactcccactagactatacactccattaatctttatgtgttgacactgctgtattctcagtacctagaacagtgcctggcacttaaatggtgcttaataaataacctgttgacgaaaaagatcctgaatcgtgccacagcaacaattacttgttaattgaaaaatcacaaatctatacatttggaaaggagtctttatttcttataaaaggttacagcctgcagagtgactatccggacaggctgagaagcacagcctctggcagaggctgaaaggtgggcacttcaagggaaaggaagatggaacaggaatttatgctgagctggttggccaaatatacatattccacaggttacaggaggagctatgaacatttatgaagagggtcttaatgtatgcatactgaataaacatgcatgttatgtgtgacccatgttcgctttggggtgagacttaacatttatatgtgcttcagttaggccctatacatcaaaaggtgaagcagggacaggaatgcattgtagtgtgcagcttcggtaaatcgtccagaaccagtccatggttgatagtctcttaccaggagaaagatgctgaaatcagtctcttacgcaatcaaaactgtagttgtggctggtggaatgtgagttagttagtcagcatctggtgatggatgaactgtagttgttccaacattgctcatcttgagaccagggcttgtttagctgctagacaaaaagaaaaactttgtggcagttagaacatagtttattctttaaatgcaggggttcatgacttaatccttgcctggtgtggccttgggtcttgtttataattatatattttattgccacagtgtcagtcttatgatctctattttaacattgattctgttcaattttgtctaaacagcaaaaggaaagggaatatagtgaggtgtgtaccacctcccatcccatcatggctgcggctcagtttttaaggtttctctggggtccccttagccaagaaagagtctgtacagttggttgggagtggggtggggataagattttacttttagttctcacaccttattcactacctgtgtggttatgctcagaaataaaaataaaataagtttagtaagatttctttgctattatagccatcagacaccatataatacggagaataataatttgttcagtttatgaaatgcccttcacacacactattgtttaatcctcatcttctggaatgccaattttacagatggaaaatgcactgagagggttcattagcctccccagtcacagctctggaccaagccgacctgggttcaaatgattgttctgcatcctgatagctatgtagcctagagctagttacttaagttacctgagcctcagttttcccatatataaaatggacataacccttaaaggtgatagagcaaatagaaactgctctagatttgtaagcagtgggagcttactggaggcaattgggtacacaagcgagtgaatgactaagaagccaaacaaacgacatggtgaggcaacccaggaattaggaacagtagaaaactgccaccacaccaggagctggaggcacayggaggaggaggtcccatcagaacccagaaggcatcagcaggtgctggagccatggaggagactcagactctcacctcaagacagagagagcacaggagacacaccctgacatctcccctcctcctgcttccaatcctctctttggccgaacctacctcgaagtcagagagcagaggagcrtgggaacatggcttcctgtggaacctgacagaagattctaggggtgcaggcaataggtctgagaacagccagtctgtcaataggtggagttgctgagacaaactataagtggttgttattcccgaatggacaacaggaaacacaagtccagattctttgactcctgttcctcctggtccttcggaattgaatgggcaacgtgaacaaatctgcagtgtaatgttatgctctgtaaccaactttgtctacattgtagaacattttctgctggttattttttcttaaagactaaaaatatcctgtcttctcttaaatgaggcaacacacatgtgggttagggaatttctagaaaactagcttcctggagtaaatttgtatcgcagttaacaacaccaggtcctaacttttggagcaaactcctcataaagcagcatgttctcccatgcttgaagcttagtctggaatctttgggttagagggaatgactgtttggttcrtggctgtatctcacttaaaacagtgcctagggccaggcacagtggctcacgcctgtaatcccagcacattgggaggccaaggcgggtggatctcttgaggtcaggagttcaagaccagcctggctaacatggcaaaattccctatctactaaaagtacaaaaattagtgggtgtggtggcccacaccagtagtcccagctacttgggaggctgaggcaggagaatcgcttgaacctggaaggtggaggttacaatgagctgagatggcacccctgcactccagcctgggcaacagagcaagactccgtctccaaacaaaacaaaacaaacaaaaaaaataaaaaaaatggtgcctggcaccttgtaggcactgaaaaactctttcaagaatgaacaaaacctggggtcgcctatggctctgcccccctacttaatgccaacatcaaatacctgttgcgtctacttcctgcttccrctggcacccctccacttaccttcccccgagagtcagtcaaagacaccatcatgcctcccttgagcacttcagcaccctctgactggtttccttgctccactcttgtccctctcaaaccattttccatcttgcagacagactgatctttctaaaatgtaatctcaccagatcacttaagcttttcaatggctcctgccccatctccatcccctccctaggacacactctacatacctttgcacagcgttggaggtccctttgctttttaccctccctgggtcaaatgcttcttctgccacaggtatcctgagtttcctgccattccctttatgcaccatcctttccttattccctcagttggttactcccccagctgggaagacttttctctaccttttccacctttaagattgtatcccaaaaccacattctctgaggaatcttcttcaacttccacagacactgttagccacttcctcctctgggtttccacactgtgttcctcgtgaccagtagtcccaggaagaggctggcatgctgtaggaatgtttaaaatgcatgcacatttcactgaaggggcttcacagtcctctttctcagaaataagccattcttagggagaaattctcctatctcaatgctgttcgtattttctctgaagttcatgttatgttcttacttcctgtgaatgccactggcatcatcctgagacagggtgtcctcatgttcacattcctgccttggttagccatctaagtggtgcacttcttaaagccagggaccaggtagtcagcatcaggtgacagccttatgatttmtttctgattcactcaaaaaacctagcacgatgctggtttcatgtatatcccacaaaattacgccttacrtttactccaaaagaggctttaagtgatgtaggaagcactgaaagaaaagtaaaataaaatcaaggtagaaaagacaccttaacaagtacctagcttccatttgccaaatatttattgagcacctactacgttccaaacatcatgcaagctgctgggtatacaaagttaaacaaaactccatctctgtcttcacaaagtttccccccaaccctwcctaagtttgcctgagctagaataaacatggccaggaaggtctcttttctttaggaaacatctggaaatatgtatgtaatctgccaatggcaacttagcaatggaaagggcggatttctacagtcctcaaagagatgatttgcttttgaatacttgtgtttctctcctcttagttgctatcatccatgatttctgygcctttttgattgtttcttttttggtggtggcattttgtttttgtagctggtaacctggtatttctaagagttattyggtgacttattcccacttggtctcagcacactccctttccatcctaagactgttagcacaagttttgcttccttttccaaagcaactgtattcacacttccagcgctgccacatacatcatgctgttaccttcatacttcaagggcccatttggaaatagattgattattttgaacatgaaaggtgcgccttgggaaaaacaaatgaatcaaatggaaaaatgaattaacatcatgaaatttaccttctcagctgaagacatgatagattcctgtgttccttagagacagtcctcttataagaatgaactcttaagggaagtctgcaggtagatggagtcagggctcagcttaaaatgtgtttatataagaatggaaaacaccctctgaggaagaagcttagaaataaaaaagtttctttcttgtgaggggtgcttggattgaacacccagattgctgtgggcatctcattccagagcttctaacatctctatgatgatcttagtggggcttgccatttgcagagagctcagttcagcctcactgacatttattaggtaccgactgggtacaaaacactgtgacattctatgggagctatacagacatattagacaatgtcttcagttcagtttaacaagcggaatagatatctaagtgaataaggagaaaaatgtttgtttgggcttttctggcaaataattgttataggaaaaggggtctcgatgcagaccccaagagagtgttcttggatctcatgcaggaaggaattcagggtgagtcacagagagcagtgagaagagatagtttattaaaagctgctccattacaaagtagggtatcctcagaaagcaagtggaggaatgcgctgtcattgttttaagcttttcttacataggagtcttgtctatgtaaagactaaacaaagctgtgcttttgtgtgggtaggatgacagcatgacaaaatttattattctattgatttaaagaaaactatccttgacattttagtgtgtgagtatatcaaagcataactgtaattctcttgaaagtatatatcattatgggtattgggacatctggactttctgttgttgtaggagtttgtccttgcaggcattactaagttgtttccttagctgtcaacatcttaggaccatgggttttgactggcaaggaaagtgccttgctagttttcagatgcagttgatttaaaaaggttgtgaccctggctctcctacgttcgtttccctaacgatatggccagaagtcttcttattactaagtatagcatatgaggggcacagactgcagccactggacttacagatgacatgcccaaaagaggagagaagtgggagtgtcctgagttatcagcttctttattttggagcacgagagggagcagtgattgatagatgtgtctactcagtcactgataccaaccctccttgatggcaagtatgttcttccaggtcctaggcatgagagaggtggagtcagaacagttctattaggaacaatattcaaccatactgaccataccatgtgctatttgatgtcctttctagactacctgggaacctaatcaccacctaggacattgtatttttaatgtaaaaatatttcaaagccatcaactaacccaaaagattaattttttaaaaggcaatgaattcttctagtgggcactaccaatgcagggctttgcgtgcagtgggctctctggtctgtggaatgcattgaaaggttgagaggacattttccccagggtcacatagcactgaatttgagctgtggctagatttctctttcctatcttgtgaagaatactaatatcaagaaactgtgcacaaagctcaatcaagcctaggtagctaaggttggaaaagagtaacrtcacaaatggaattaaagattttcatcttcttcctcctacatcccagctggggggattaaggtaggtctgtgtaaggagagtgaggccctcagtaaagggacaatgagacattcgaatataggcatatggtccaagcggcttttgccttaaaaacattagttttgtggcctcaataataattcacaaatggaagcaagcactgaaactaagagcatatgttaatttctagatcacttgggaagatggcactagtttttgataagtgtgaaaaaatgcaattggtaattataatatttcctcatgtttagtagtccaatttcaaaggctgcaattattaaaaacaaaacgggattcctttcttggatgctgtctttcccgatgtctttttcttgccctgatgtttttaacgcaaagttgcatgatttgggggagaaaaacacatctatccaggcattatatactctaggcaaacacgtgcatggaggttccctgtatggagccatgttttccatccagattgggccaaggatagctgatgggcagtcatggatgttgatggatgggttttccmagggtagctggattgtggtctcgtaaccatgccgactcctggggctgagaagggctatttagtgaaatgaaatactactctgtcacaacttcctcactcacaattcaatcatggagagtacttccccagtgctgtcactgaaatcattacattcagaattaaacatgggtgtaatagagcagtccctgaggttctattggcacatcaggttccacattcctaaccagctttcccatacaggaatatgaaaagcctgccaatcaggattctttttccttcctttggaattaatctcaccactccctgtccctgataacgcttccataacctgttcccgggccacgtggcatcagcgtatcagcaggattgctcagccttcaccctttggtgtctgacattactttggaagtcttcccaatgcaaatcacaaaaaaatgagttggcccagagagaccctcatgcaggttctctccacctggtcttccttctcttcactcactcagttgttacctcctttgatccacatttctggctcacacaactcttatccayggcagcatattttctcaatgtcccttttcctcatattcctttggactttccagttttattcttctcttgtctcctttcatctccctagatcccttttgccattctccaccttcctccacagaggaagcatgacatggagcaaagagaacaggcttccctgtccccagttctgtctccacttctgcctagctatgtgatgtgcacacatgacgccctcaccaagcctcagtttcccrtctgtaaaaatttcctcacagaggttttgtaaggaccccaagaaataaaacttatttcctgtcactttatttgcatcactatgtgaactgccttggcaactctaaacaacttttgcaatcttaaaattgaatattttagccatgaatcataaaatcaataaaaagctacaaacttcctatgttttcaacaccccctgagactgtggggaatttaggcgactttaaggaaactaaaggttgacctactagtagtacagatgtttgcgaatagtttagaaacatatttctccttggaaggagaagctaggtgatggtattttcttcttaggctcaagtgttagacttcaagagtctgtaataaatcgctccttaaataaataaaatgtgaaatcctctaaggcagatgttggcaattgtttactgtaagggccagctactgtgttaggcgttgcagaccatagggactctgtcacaactactcaactctgctcttacaagagtagggttgtattgtagcacaataatacacaagcaaatcaacataactgtgttccaattaaactttatataaacagtaggtaggctgggcgcagtggctcatgcctgtaatcccagcactttgggaggcctaggcgggcagatcatgaggtcaggagatcaagaccatcctggctaacaaggtgaaaccccgtctctactaaaaatacaaaaattagccgggcgtgatggtgggcgcctgtaatcccagctactagggaggctgaggcaggagaatggcatgaacccaggaggcagagcttgcagtgagccaagattgcaccactgcactccagcctgggcaacagtgcaagactccatctcaaaacaaaacaaaataaaacaaacaaamaaaaaaacagtaggtaagctacatttggcccgcagactatagttttctaaccattgctctaaaggatgaatggagattacattgatcattaacaactcagaaaatcagaaattatgattgaatgggaggtttcaggtgactccatgatgattctggaattattaaggcttttggttactaataaatggcaacccttttttttttctttttttacttctacaagttctcctgatggaaaaatcagtcagctcaaggttttttagtttgggatgaattggcctttgaaatagatttgggctttgataggtttgttggcaattggtaaacccatcctaatttcccacagatggagcagagaaggatcacttagaggaatcagaaagcccaggacaacagggaagtaatgataactaccaattattaagctgccctccccatcacaaactatgaccaccatgatctccattttgtagaagaagcaaagttttagttgacaggggatgagtgctttgcccgagatcacacagaagtgttagagccagctgaattgctttccccttagccacaatatctcaatcaacacaagtaacgtactttccttgggacattcacctttcttcagattcagaaccagagagsaaaaaagaaatcaccccttcttccttctgcctttactttctagtagaagttatacttaaaaaaaaaaaacaatttgccaggcatggtggctcacacctgtaatcccagtactttgggaggctgaggcgggggggaacacctgaggtcaggagtttgagaccagcctgccctacatggcaaaaacttgtctctactaaaaatacaaaaagttagccaggcatggtggtgggtgcctgtaatcccagctacytgggaggctgaggcaggaaaattgcttgaacccaggaggcagaggttgcagtgagctgagactatgccactgcactccagcctgggtggcaagagtgaaagtccttctcaaaaaaaaaaaaaaaaaatgagtgccccctcagccagcccctactgtgtgctaagcataaagctttcattatattataaaatctattgtctttttatttcccaaactaaactgcaaagaatcaagaaaatggaagctaagacaagtaagtgatttgcctgaagttgcaccagtagttaatagtggagtcagaatttgacatggttctcatcaactccaaaacattttcaactcacacagctgccatagagcttagaacaggccgactctcaaaccagatggtctgggttcaaatctgaactccactatttgctagttgtatcaccctaggtaagttgcttaatgactcttagtttcctgatttgtcaaattaggatgatgataatggtttccttctcatcttttgttatagggaataaaggggtaataagaacatggtaagccacatgctttggctttttctgtggaatatcagctctatgagcacagaagttattgtctgttttcttcactgttgtatccttagcacttaggataatgtctagcacatagtaggcaatatcaatatatgaatgaaaaatgtcagaagtagtctttaaattaggttatgactggattcaaagtcagcatgaaaaagcatagctttccttttgctttactatttttgtataacttggatttgataggtgaaattcaatatgagtctttgaagtcttaatttaaagtgtaacagtggaaactagtgattgtcttcattctttccatgttcccaacaaaagtagaagttagtacaaaggtgaagcttttaaaacaaaagtggaagttagcacaaaggtgaagctgaggttgagcacataacaggtacaaagagtgctttcagatgtacttctctagttttttgctattccccaaagtgcatccttacataattagctttaaaattcctttcatcccttatttttttttaaatctatcattaacacgtagatttttatctctaagtttatttttactaaacttgcatctttttaaatacgacgtattctgaatctaaatcagtatttagtgacaacagctgctgggaaccactgtaataaatgaattatgggtcccatttacctggcaagattgcctttgatgtctacacgtcaacagtgaaaggggttccagagaaaaacaaagcctctggtaaaaagggcaagctcatcccaagattgagtatgcacgaagagggagcagaaacaggagatgggtgcctctggaacaaacatgcttatgcaggtgggtttatggaggggctcctgagagggtgagtcccatgagtcttcaagagcattacttagatgccatggcacctaggcagaaaacaatgtttaaatttgtgctggatttacaagtatatgtgatattcattctgagtggtataacctatatccctaatagcaaagtgttgaagttctaatctttctcagtggtttgcactgtgtaaattattattttcattaagattaagcatcctcacagaattgcacagcagtaacttatgtaaccacctccttagaatgttctctctctgacaatatgcctaccaaagactcttttaaagatctttgaaattagtaattagggaggttamaatggagcactgtttgcttgtcttaatgtggaatcctctacatgctttatagaaaacaaatgaagtgaataagttttgctcttgaaggttctcctgcttacaatcaaagtaatttgcagacttgcctgatttgtatgtttcttcaagtcaagaataattctaakggattactcctgtcccttcagctataagataacagagtgagaacaaaaatggcttgtgaaatcaacctaacagagtatttcttctctcttctcataggtcgctacccacaggagaacaagggaacctacatcccagtgcctatagtctcagagttacaaagtggaaagtggggggccaagattgtcatgagagaggacaggtctgtgcggctgtccatccagtcttcccccaaatgtattgtggggaaattccgcatgtatgttgctgtctggactccctatggcgtacttygaaccagtcgaaacccagaaacagacacgtacattctcttcaatccttggtgtgaaggtaagaggcagacatttagttttctcatttaaaaattcacctatttggcggggtgccatggcacatgcctatactcccagctctttgggaggccaagatgggaggatcgcttgaggccaggagtttgagacctagtctctaaaaaataaaaattaaaaattagatgggtgtggtggtgcacacctrtactcccagctacttgggaggctgaagtgggagaattgcttgagttcgggarttggaggttacagtgagcaatgattgtgccactgtactccagcctgggcaacagagcaagactccgtctttgaaaaaagaaaaaaaacaagctcatgtatttccaatacatctctttttgaaggggtagtaagattattctaaatacatatgcctctcctacatataccatctttaatgattgaaagagaaagatagaaaaytcatcctccatgtgtatgargataaaacctctatatgtgaagtcaatgctgctatacatttatttcgggattaattggagattgtctaaagttgcagttagttatttgtggagctattaattgcagttttgtaattaaaagtaattgcaaaaatcacaattacttttgcaccaacctcaccaacctaatatatgttgacagtataacctctgtacactattactctgtaaacaaattgggcttattaagcttgattatcaaaactattagagtctataactctgacttcagaaaaataaaataaagtcgacgctgttcatagtagaactaacctctctatccccctactttaagaacagaaagtctgtatatctaaaggattccacaaagttgtttatgtgcatagtgggtgcaaattttgcaaaccataactctggatgtgcaaagatgtagctgtactttaatataatataacttgatctctagtgctattttcagtcttcctttctgtctgcggcagaagcttaatctagttatattcaaataaaactcagtcaagttcaatgatttctctatcaattctgttttgtgcctcagtcacacatagcattttctcctcatcttcatctctgccctttcatacctctcccctgctcccacactttgtacgaagctgttttaagttccagaggcagatgcagatgttgcagcagcatcaatgtgggagagaccacttctaggtcctaggaaataaggcagtgaaagatatgaaagctcacatggggcaggagacttcccatggcaccctaccccatatgcactgctctctaacatcatccaaaatgagcccatattattgctgattttgaatgatccttgtatgtgaaagtcacatttgaatcagggttaatctgtcctagatatagataagtgcacaacaatatttgctactcatctagaacatacaccttggtcctactgatcttttctttgttttatatttatatttatttactttttgtagagacgtggtgtcactatgttgtccaggctggtctcgaactcttgggctcaagcagtgctcctgcctgagcctcccaaagtgttgggattacagtcatgaaccaccatgcccagcatggcttgggaattacctgttccactagtgttggcaaaaggcgccaagctattcctacactccctatacatccatcctcatcatattgtacccaacactcctatctatgagacagatattcaaggtaaatggtaacaggaaatgttaactgggccatgtgcagttcaaaaaatgaactcttgatagtaatcttaaaaccagatgtgaggcatttgcaactggttgatggggtgatatttacagagatgaaaaatactgagaggatcagagttacagatatataaattaagattttgaatatgttaagttggagataaccatagatagacagcagaaatgacaaataggtatgtgaatctggagaagaaaatcagagatatatatttgggagttatctgtacctagggagaaaatatagataaagaaggaaataggatatagtatctagccttcaggaacaccatcatttaggagtccagtagagaaggagtcagcaaaagagaatgagatggaagagtatgtaggaagcaacctattctaagaaaattgtatttaaaaattcatacttatcaatcaagagtttgttattgactttctttttattacaaaaagaaaatcctaggctacatataactgttcagaactctaggaaatttcaggaatgctataatttacccagactttggtttgtttgcaacttttctggattatatcatgtgtgtaaatgggatatgtgtctgcattcatttcaacttatgtgaccactcttcttgacgggaaaagggttagttaagttgcttgacatattaactttcaggataactactcaggaggtggacaatctaataaccttctaattgctgccttgatcttcagttgtatccatgatgagcagcttccagatacctctgttctgaaaaagtcacttaggtctggaggcgttcttgttctagaggctgtacagggacctcccctaggttttcagttcatggaaaggattggaggaaggtgggacaaaaaccagagaccaatttggaagctgtggtctaggacaaagatgatgataaactaaacatgstggtaccagtggagatgagaaggggttagattggagatctattttgtatttagaacaaaaattgcacagggattcaagatgagaagtaaagaaatgggaggactcaagaataactctagatttcttgttagaccaattgggttgatggcggtgccattttcagagctgggaaaactgtgggaagtggaggggaagcactgggggtgaagctaagagttacattcagaaatgttaatttggtgatgtctatgagacatgcaaatgaaaacgtcaagtaagcacttgaataaagtgaatctagaactcaaaggagatggctgagctagacatgtaaacatgggcacggttaggagcaataacggacacaaatgattcagggtcattaacaattaagagttgagacaaaggagaagtcaacaaaggaggctgagcaggagcagtcagtggagcgcaaggagatcaaaagagcccagagccagacacattgatagattcaagacagcagtcaactctgtttaatgctatgattagttgaataggataggggaggaaagtggccatatagtgtggaaatatggatgtcttcgatgatcttgaaaaggacggtttcactaaagtgatagagacagaagccagggagatggtcatgggctgtgttgtaaacaggaggcgagaaagtagagacggcrggagatggcacctttctcaagactttctgtagcacctagatgttgaagcgaaggtcaaaggagaattttttaaagacaagagagagtgggtgttattttatggtgayggagaggaaccaggaaagagagtttgcagtccagagagaggacggtggttcacagccttggctgcacgttgcaatcatctgggaagctttgaaactatggatgcttcagtcccccatgcaggcattctgatgtaattgctctggactgcagcctgggctttggggttttttaaagttctgcaggtgattcttggagctaaggttgagaagtttcaggagtgaaatccttgagtggttggaatccagggaacaggtgaagaagggcctgtgatgggtggggctatctactctctccagagacaggagtagagtagaagaagaggggtgcagattttccagtttaatggaagaagaatgaggtgattgccattttgtgactcctttttttttttttttgtcagtgaagtgtaaagcaaagtcatgtgttgagaagcagcagcaaggaagggcatgaaacgcttgatagggaagatgtgagctagtcatctggagggtagaaggtgaacttattacagggacatgccgggagggtgctccctgcttccagaacacagggcaaactagcacaatcttcttcattacttggcctgtggaggcccaaacatctctgcaaattctttagggatttctgacttcatggctgcctctgcctctaggagtcctactcacacttgtgctgctgcaagtgagaaacttgaccgtcaccttcaatttcaatgttggcaacaacaacaaaagcagccacacacaacayctgtgaatgcccagaccttaactgcagtttgggatggagggtgagagcaggaaggatgcactctgtggtcaccacgcttggagcacatcagaatcacctggagggtcaccacgcttggagcacatcagaatcacctggagggtcaccacgcttggagcacatcagaatcacctggagggtcaccacgcttggagcacatcagaatcacctggagggtcaccacgcttggagcacatcagaatcacctggagggtcaccacgcttggagcacatcagaatcacctggagggtcaccacgcttggagcacatcagaatcacctggagggtcaccacgcttggagcacatcagaatcacctggagggtcaccacgcttggagcacatcagaatcacctggagggtcaccacgcttggagcacatcagaatcacctggagggtcaccacgcttggagcacatcagaatcacctggagggtcaccacgcttggagcacatcagaatcacctggagggtcaccacgcttggagcacatcagaatcacctggagggtcaccacgcttggagcacatcagaatcacctggagggcttgttcagccacttctgtgcagcaccctcaggttgagtaggtctgaggcctggcctgagaatttgcatttctaaccagttcctgggagatgctgttgctgctggtcggggtcaacacttagcggaccactgnnnnnnnnnnnnnnnnnnnnaaaagcagccacacacaacatctgtgaatgcccagaccttaactgcagtttgggatggagggtgagagcaggaaggatgcactctgtggtcaccacgcttggagcacatcagaatcacctggagggtcaccacgcttggagcacatcagaatcacctggagggtcaccacgcttggagcacatcagaatcacctggagggtcaccacgcttggagcacatcagaatcacctggagggtcaccacgcttggagcacatcagaatcacctggagggtcaccacgcttggagcacatcagaatcacctggagggtcaccacgcttggagcacatcagaatcacctggagggtcaccacgcttggagcacatcagaatcacctggagggtcaccacgcttggagcacatcagaatcacctggagggtcaccacgcttggagcacatcagaatcacctggagggtcaccacgcttggagcacatcagaatcacctggagggtcaccacgcttggagcacatcagaatcacctggagggtcaccacgcttggagcacatcagaatcacctggagggtcaccacgcttggagcacatcagaatcacctggagggtcaccacgcttggagcacatcagaatcacctggagggtcaccacgcttggagcacatcagaatcacctggagggtcagcacgcttggagcacatcagaatcacctggagggtcaccacgcttggagcacatcagaatcacctggagggtcaccacgcttggagcacatcagaatcacctggagggtcaccacgcttggagcacatcagaatcacctggagggtcaccacgcttggagcacatcagaatcacctggagggtcaccacgcttggagcacatcagaatcacctggagggtcaccacgcttggagcacatcagaatcacctggagggtcaccacgcttggagcacatcagaatcacctggagggtcaccacgcttggagcacatcagaatcacctggagggtcaccacgcttggagcacatcagaatcacctggagggtcasccacgcttggagcacatcagaatcacctggagggtcaccacgcttggagcacatcagaatcacctggagggtcaccacgcttggagcacatcagaatcacctggagggtcaccacgcttggagcacatcagaatcacctggagggtcaccacgcttggagcacatcagaatcacctggagggtcaccacgcttggagcacatcagaatcacctggagggtcaccacgcttggagcacatcagaatcacctggagggtcaccacgcttggagcacatcagaatcacctggagggtcaccacgcttggagcacatcagaatcacctggagggtcaccacgcttggagcacatcagaatcacctggagggtcaccacgcttggagcacatcagaatcacctggagggtcaccacgcttggagcacatcagaatcacctggagggtcaccacgcttggarcacatcagaatcacctggagggcttgttcagccacttctgtgcagcaccctcaggttgagtaggtctgaggcctggcctgagaatttgcatttctaaccagttcctgggagatgctgttgctgctggtcggggtcaacacttagcggaccactggtttcataataatcacgaaacaataaagctgggcatggcccccagagcagcctgcggtcccagctacttgggaagctgaggcaggaggattgcttgggcccaggagttcgaggcagccccgccagcctgtctctaagaagaaagaragacaataagcaataactttaaaactcaagaggcagggccgggcccagtggctcacgcctgtaatcccagcacttcgggagaccaaggcaggcagatcatgaggtcaggagttcaagatcagcctgatcaacatggtgaaaccccatctctactaaacatacaaaaattagctgggcatggtggtgtgtgcctgtaatctcagctactcaggaggctgaggcaggagaactgcttgaacctgggaggcggaggttgcagtgagccgagatcgtaccactgcactccagcctgggccacagagtgagactccatctcaaaaaacaaaaacaaaacaaacaaacaaaaaacctcaggagattataatttactcttcttaaaatttcactggctctaccctgaacctaattccagtctctctcccttaccaccccttctctctctcctactgttctcctttattctctgaacttttctctcccattctgtcccaggagcaaattctccttccttaatgcagagggatccagtgagctttattatttttgttgcttgatctcttccaacaaccatgcttttgggccctgaacaccatttttttaaatgaagtgagagaaagagttcatctccccacttattgtgtggtttcccggcctagcacgcaaagcataacccaaaaaggggatgatatgatgaaccgctccccccaacacacacacaagcacatacactgtagcccagcagtcccctgcagttttatgcttgtgtgtgtgttaatgcataacaaargattcagcgctatggcctggtaactggaaagtaggtcaaaagagaggggtgagactgtcrcccaagtgaaaaagatagcagaagataagaaggaaaactgtttccagaaattgtcaaaagacagccaggtgaacaagattgtggyccgakgtggcacaggatgctgggctgaaaattacagcagcatgcacagcacttattgataggagaatgctcagctgtgctcctgagggcccttcagcctgctttgcattcataggcaatttatcctccttaatcactaaatcattaatggggatcaatagcaatgccacatcagwgaaggcaggggtgcatgcggggagaataattgcttgcttagtttttagtttagtggtgctaaccgggcttcgggtccattctgggaggaaacccttctcctgggtgttagagagaactgtacccacaaaggcagcaggagtgagacgggcagttattatgaattcatcatgtttttctaactactcaggaactctgaactattgaatgtatttcactatttaaatatagaatgttccagtttggtagtctagcactagtgccagatagtgggtcctgaaagatttagatttctgatatctgtgcctagtactctggagaagcagtgagcagtatttttgattgggcatcagttacctttaagggatctttctcctcttgataagttgttcccccattccattctccatcactgcttttccctcacctcattcgacctcatatccttagcctctggcacacttgaggtttaataaatgtttgctgtgttgatttaataatcccaagtaaatactctaggttcgccgcaccctgtcattacagataacttgtaaatgtaatctcagaccttaccatcttgagaaaagtcaaaaacatatctggtgtgctgggaggagtgtgtctgtgggtgatgtgtgtgtggatttctctatctcttagcatctgacaccaaattagcatctaatatttcctttttattcaatgtgttttttcacttttctttaaacaaataaatcaatttaatttaatatgaagaaatcaatatgttcccaatatcttggatgcttttaacagcaaataaataaatatgacctgcttgtattttatyattaaattcatccttagccwatttgctttgtatttatataaggtctttttagcccctttcatacagaatggagtaagtaaccaagactggtgtcctcagagtaacaatgacccacattccttctcttggagactcttgagcccagaccagcatttacgccctcaggctagagccattcatccatcaatccacaaatattgatagtatgtcgcatcccatgcccatgacaacacaatgacctgtgcacagtacgacagtattatgtattcattcagaaaaattcaaagtcaatactgaattaggtactgggactatggcagtgaaaaaggcagacacaatcttcgtatagcttctagcaaggattttacaaatgagctcctaataaaaaactgattacaattgtaaaaagtactaaaataagtcagtgcacaagaagaacacaaaactggggactccgacctatttggggaacgaggagagactggccagtggcttagctttgcaccttggctagcacccagaacagtatttgcataggatagtaatcaaatagttggttaattgaatttttatgaagttttaataaagcttatggaaaaattttaacctttatttactcaatattcctcttaaataaaatagtatgcatcattcttcctagtatctgagtcattagagacttattatgctttttatgccaagcgaggatcatttagtgtggccctgtaatcagaaaggatcccagagagctcacagtaaaccttcttttcaatggcatgtaggtgaccccaggattgaggtgcaaaggtctttacaaggtgtttctagaaagagcatggttggaagtgtctaatgcagagacacattcacccaccaattcatgtggtttacaattccttccttgtagagtctcttatatgcttcaaagtgtgctcatagtcagtatctccctagattgtgtgtttggaaggtgtaatccttatctcattcagcctttygtggtgcctggaattgagtcaatgttcagtaaatgtttgctgaactgaactgataatcaccattctgagaggcaaggagacgattattagactcagatttcaagagagaaagcaggttctgtgatgttacgtgcatttctcaaagtcctatagaaaattaagaaacaaactgaggctaaccctggagcatcctgactctgtcaaggtaagcacttatatttttaaaacaaaagccatcagtatctggcattgtgtaacaaaagaaaaaaaaccaatagatggccagccgagaagattctgtaatgacctaatcaacgtggaaatttctgccataataaataaatacataaataaataaataaattcaggttgatatttacaagatcaaatgaaagctttctctgggaaaaaaaattaaarcataccaacaagggcacaggctcccttagaggatatgtgctaagtaaagaagctctgacattttctttgtagaattgcttcatgaataatagtctatcttctgaagatatctcagtacactaaaaagcccttaaccagcaaaacaggcaaattagcacaaatccagtaaccttctcaagctggtgtgagctgtaatgcagcatgtttgtaaggaatgtaaactatgttgtactatgcacgcacggatgattgtgctgtcgtgagcactgtgggagatatactatcaatatctgtgaattgatggatgaatggcagtagcctgagggtgcaaattctggtctaggctcaagggtctccaagagaagcggtgttagtcattgttatttcgaggataccagtcctggcgaactactctactttatactgaaggggctaaaaggaaagaagcaaactcaactgactattgaggaamcatttgcttgtgcttcatagattgattccattccagtgttactagataggmaagcaacgtctctggagtggctatatgaaaccattttaggaaggcagtgcgtttggatccttccagaataaaaagctcagactctaaaaatgccattccttaatatgctcacaattgccaccgacaggaagttactcctggtatgccacagcacacacagcctgttagaatctgccaccccttttgatgtactttgtgatggaaaaacatatcatggtgacaccagtccggagtcacatttgctctgcagatcaagccactccctctaagagtgattacacactcccagcatgaatctttcctctttttagtggtgctcagcttttatataaagggggaagcaagtgtaagtgattcctaatcccctcgctctaaattccttccttccctaaatggtgactcattttgccttttggaagggccaaaccattattccttctaaaggattagaaacaacaccaaactctggtttaaactgttgaaagagaccatgtaggttagctgttctagcaccatagttttgtttaattcctgggctccctttgccagacttgagcctaatgaccaaggaaatggaacttgctctgactttgaaatagcatgtaaataagcagaaggaatgtatcagcccatgcaatgatgaatgatcttccttctcacaaagaggttatacagatactaaaatcagtaggctcagcatttgtttttacatgtttgttataaatccttaccttctctgggtcgggaggacagtgggaatgtcagagggtgactgaaatccaccscaaattttcttggcccactcttttcttttttaactacccttcyattcccaccagaggaacagtaaaataaatgaggtcattattcttcactacatgcctcttgtaaattgttagtcagcctgcaagggtggttatttacgaggcattttgaaggtctgttctggtgacagagttgctctgggcagtggatggaggtgctgtgtcacactcaccaatggtgccatgtgtaatctgtttttctcagagttttatcgtaatggtggttgtctgccagaggtcacctacgatcaaagagttgtcagttggtccaaggtgcagccgctcctactctgggagctgtctagaccttatttctcccctcagtcctcagttaagtatagtttccagctcccacattccacacaagcctcatacacgtctaccttctaccagtccaaattgttgggtttctagaatagtgagttgtttgttagtttgtttttcctattagtcgagccttccattttactaagtgaagaactagcttcccctgaaacttagtgaaaccccaccgctctgaagctaaccaaaaatttaaaaacaaacgaaaacactatcaaaaagccaacagcaaaaatctccaagggcaaatgattacatttttctatttttgttagccttccaaacatagggagtttttttggagtttccatcgtgatacaattttttttaaccttgctttggacaactatattttaaagtgacagatctgaataaaaacgggaaataaagcactgctttccaccctcaatcttctttttaaaatcataaataaatttaaaattaaaatcgagccttcccatttgacttccttgccatactgtggattcatgataatgtctgcctgtttgaggtgagatttaattcaagtgttggaagggaaagggtggcctagtctggagctccagaactcctctctatcatgctttgccacttaaatttatcacttcccatcaatactaacgcaaagcccaaaggtaaatccttcattttcttggacttcttccttactctctaagctccagacatcttccccatctctcattctttcagtacacattgattgatttcctaccgtgttccaaggcacagtgttgggggctggggacgcagtcatccgatcctttggacccaagagccatggactacttagaaggcagcttattcaaatcctagcttcacaactcactagctgcatgaccttggaaaagttatgtttctctctgcctcagtttcctcatcagtgaaatggggctactttcctcacaaggatgttatgagtgttgatgagttcatgtgtcttgttataaagcacttagaaagttcctggccataaataagcagtataacaatgcttatttacatgctactacttaaaaaaaattaagaagtaaatacttaaacacatacttattcaataaatataatcattaaacggcaatgtccatacagtgggataaatgttacccccgcctccatagggcactaagggaacaaggtttaattcaatctgtgctggaaaggaaagggttcagggagacttaaagaaggagaaaaaagttgtgttgaaggactctgataataaaaaagagcacaaccctatattgctcttaaagaaaaactaatgcacaaaagttggacttgttaatctctttttaaatgggtagcttcacttaaatggaaacacattttagaaaataactttatctgatggaaaagtctcattatagaaataaaaaataataaaagcataaaaagagctcaaagatctacaaattagagacactaacaattaacattttsttgtaatgtcatccatttaaagtattttcagtgcttttcatttttaattggcaattaattgaatatattgttcttttcaaataaacacacatgtacatttacatggctaaaagaaaactttccttttcaccaatcttccaatcctagagaatccccagggaaaaccaactttaactgtgtatatcattacagatactttgctatcattttatgtattgatggcatatatatacctagagaatttaggttttttaaaaccacaaaagagattgtgtcaacctgttgctctgtacctcattttctcactcagtatatcttggagcgttttctatatcagtacctgcatcttctttttaatggctgcttggtatggtcatatcatgttgttttggtgttttgtttacaactatttggattgtttcccatttttactatagcacgttatgccattttgaaggttgcacatacattttgtacaaatgttactgtagaatagacatctagaaatagcattgggcaaagtgaattcacattttaaatttgcatagatattgcctaattacccttctaaaaggctgcagtattttacactacagccatagtagatgagagtatccatctcttcataccctcattggcactggtggttaatcatttgttttaatatttgccgatatggtaggagaattatggtatttcattggtatttcatggttaatttggtttttatgtctctgattgttagtggagttgagcattttttcatatatttattgaacgttatgtttctctacctgcttatatctggaacatgtcaggtgaaataaagatcgtcagggagagacacacatgtgcctcttaaatctatggatacagtttgtatatagtaggataaagagatcttactgacactttttttcttacatagataaccagctgtcaaaacaccacgtattgatcagatctatttttacctattgattttaagggccatctttattatttactaagatttaatacacatctagctccttccatatatttgtccattactgtgctaatgtcagttttaagtgtagctttgtttcagttagctataatcacactaatgctacattaaaaagaaccagaaaatcttagtggcatacaacaataagcacttactcagggatctggggcttggctgggattgggctcatccagactgggcttgactagccagctctgcttccggtgggaacagctggagaggatccgtctctccctgagagctccggagaccctctgctctggtgcctctcatccttctttgaccagtgggcttgctgggtcatattttcctcagggtaacagcagatttgtatgatcacatgctcagctgcgcagtcatattttagacccctacttgcttctgctaacattgcttctgctaacaccccattagccaaaataagcctaaagttaagagaggatattccacatttagagggaagaactgctagttacatggcaaagggcatagatgcaggaaactataaattggggtccaaagtttaatttacctttgggcaagtccttcaatctttcttctttttcaacatattagtttttggctattttctctctctctctctctytttttttttttttttttttttgggacagattctagctctgttgcccagcctggagtgcagtagtgctatctcrgcctcctgggctcaagcgattctcctgcctcagcctcccgagtagctaggattacaggcacacaccaccatgcctggcttatatttttatttttagtagagatggggtttcactgtattggccaggctggtctcaaacttctgacctcaagtgatccacctgcctcagcctcccaaagtgctgggattacaagcatgagccaccacgccctgcctggctgttttctttcacattgttttttccagataagcttttgaatgagcatgcaaagttccaaaacttctgagtagaagtttggttgggttcmcattggtcatatagactaatttgggtagaatttatatctttacattastgaatgttcacatccaattggaaacattttgtatgtgttcattttgtatttcagttttatatcttttgacaaagttaatttttcttataaatattttcagatraactcaaaagcagaaagagtagcacaatgaatatctacttatatgactctcagagttaatggttatcaagattttgccacatttgctttatctatcccttttttccttattttttgccttagcattttcaagtaaattctagtaatcatattattttacctgtacatattttagcgtgtagctttttaaaaatagacatatatrcagtatacatagatacatatgtacatatgtgtgtatgtatgtgtttawgtgtgtttgtgtataattattgcagctaatacaaatcaacaagagctccttggtattatctaatgaaccatctttaatctaattttcccaatgtcyaaaaattatctttttagttagtttatttggattaaggtctgtagattaaatttggttggtatgtcacttaaatcttttcctctagagtaatyctcttcatctgtttcttcatgccacaaacttatggctgaaactgagtcattttttatgtagaactttccatattctgaattttgctgattccatcccccggtgtcatgaaatatttttctctaaccactgtgggatttttttttaaccactgtggcattttctgttaagcagctggttagatctacagactctgtcagattcagctccaagtggcattttttttttggaggaaggggcaaaaatatttcataagtcacrccattgcttcctaggacattcatcctggcagaagatacatatatttaggtttgtcaatagyatctggttcacgttttatcagtctcatccacccgttacgaagttctcttcttaacgaattatttctgcctcaattcgttacttcattagggattgcaagatcgtgacattctaattctaccattccttttgcatttattataatcaattatttcgttaccttgaggtagaattcgtgtaaaaacgcttagatgcctgtcccaaacacacacattttcctgagtgcgatttacacttgtagggtcctgtctgtgttaaagatgctttgctgctctcccaccaggcctgggaataagtaccagactgatgatagacggggaggatgatcctcctgaaattctagccacagggaagaaaagtccttgcaatgaaagacactrgccagggaagctggttggacacacacacatacttgcacattcacaagtatctttcattaaaaggagatgacctactgsttccctcctgccagtgatgggccacaaaacagacatgacacgtgggccttctcacgtgtcccagatttgttttaaaartcattttcaattcatctagttttctrttaatgttaaaaggttggaaattatattttaattagtgttagagaygtacatcagcatcatagaattctgaaactactgatgcaacagaatcataaaatgtttaatgagacatatcaatttaattctgctgcttggaacttaaaragccagagttcgtcagcattttgctaacaaatgtcatcatttacagactgaatttggtgctgattatgttcaccattactaaaaatattgggaaatgagctatgcttggtgaaacaaagggcattttttwaaaatttggctgattaaatgtagtttagaaacaaaataaacttgcataaacttgcaagtgtttggaaacagtctggtttggtaatagtcactatgtttaaaccctgatgcagatgatgctgtgtatctggacaatgagaaagaaagagaagagtwtgtcctgaatgacatcggggtaattttttatggagaggtcaatgacatcaagaccagaagctggagctatggtcaggtgagccacttaaaatttgttattgtcaaggacatttttacttcatattttttgtcacatgtatccctrcaggatcycatatatcgatattagacaagcayaatttcctgctttttaggatctgagactccwaggcagwgagcataggagtagggactcataaagacaactgcgtaatttatcagctgaaaccacatatctctggktattacagtgttacagaaatgagagattccatgaataatgtggcattctattgagaaatgctttggccacttagaacagtgaaatctcattagttcaacctggcttataaagaaaggtattttcaaagtgatgcaaagaatactgcaaggggtgtgcccaattcaaagaaatagcttctttttktttttttttaagtgttagcstagggtactgctaattagaaaagagtgttatcatttcatcaaaggaagggccactgagcttttacatagraagattttatcagctgcaagttgattgtctagacacaaagtagcaaatggcatttctttaagrtgttcagtcattcaaactatttcagtttggtatctttaacaatggagcaaatgaatgatattttaccaattttccataaatgaatgcatgtcctgtgatttcaaaatgatttttaattagcgacacaagcgggggcgaatgtcatttctcaggagttttggctgggatggctggaactgtgcatcattgcgctgggcatccagcagggagttttcayrgaatctggtggtcacagggtactttcttggctccrgatgccttgctttgacttccatatgggatctccctgtgttcctyacccactgctccagtaccygtgttatcctgcctacctggctttgtgaacagcttccctgactccggagaattacatgcccagtgctcaggctycccygcctgcatttctaatgtcctgccaagctacaagctagttggcaccccctgttcttggattcctgcctgactccctggtttcaagccatcccctcctcagtgacatgcaacctttgactatactgcctactgcctgatgcccttgtcttgggtccccaatttctagcctttagcctggtgattctatttatggyccaaatatgacaatctatagatagctaamaaggggaaaagtcatcaaggtgggcagcaaggaggtctggaaaagtgtcccaagcccagtcaggkcactcttcgccagcttgcctttgggtaggcaccctggagcacagtcacttgattgtatcttctgccactcaaagaggctattggtgtgtatcctttggccagaataaccagccaagcrtgtttacagtgatgcagggaatcaatccgttctatgactatttccttaactctccarttagttgctatcctgcccagcaaayacagctgagagaagctgcttaataagaaccaaaatactgagctatttgcatacctgaagaactagtgcaattacccattactgcatccatcctgtcagtttgggatacacccagagtgggtattctaactggactgaataaagaattgtgtggtaattagccattatgattgtggtttctgtcacaagcacttgggtggatagcacacaaggtttctctattcaggaaaatctcttactacagtgaggtacagtataggtaaaatcttcctgtcttgctatttgatctttattcctttttaagaaaattctggtattgcytgtggctagcagttctttctaagragactgaactggtaccagactcctcccttgatagygtaatctactttctgcagccttctgccctctccttgatcctggggtccaccttgtctcagaagaggggaaaccttagagggacagtcactatatgaggtctcctactattttgggtgcaaactaagtagtgtgaagcaccttcctgtgatacacctgagagctctttattttckaaatgcacgaggattcacattactttcgaggtcctaagactctggcctgactttggtaaatgattcattccttcttcttgggtacaggagccaatatgttgaaaagaccttctaaattgaatcattttctgaagaacttcaagtcagcttatgatccctgagtatatcaactctctagtatttctgtttatgtttctggcttgcttttatattcttattcactttaatgaaaaacaaaagaagatgtctcattccttctactttaatatttcatactaaagattatgggagatcactatacaggaaacacacatttctaaacattaggttgtggtttcatgttatttttcatcagagaatattttgcttgcagagtgaacactagtttctctttgtttttctttctccaaatagtttgaagatggcatcctggacacttgcctgtatgtgatggacagagcacaaatggacctctctggaakagggaatcccatcaaagtcagccgtgtggggtctgcaatggtaagcagcaattactgatacctaaaatctgttacacctgtcatttgcctcagtatatatgccagttcattaagagctgctgaaatgatgacttacacttaataaactttcatttgtaagattctagcttctgacacccagttatagctcctggaattttctgagcttatcatgtgctataaaacaaaattatcgtctcaatactgtatgtttctttggctttagaaaacaatgatagatataatgatactgtagaccagttattcttaagaaccccttgcctagagactgaggagtgatcatgacaaaaatgtcaatgactataatcaaacagttgatcaaccaaacatcaaggtgcacagaagatgtgcaaggcacagcttttctcaattttcacactgatagtaagagtgaagaaatgaatggctacatctcatcctaactcctgtcacaaggatgtgtcactgtagggctttctcacttacgaagtgggtattgattctttgcaggatcctgtgtggtaagtagggcagccattactcatgsacttttacaagttaggacacagggtaaggacagctttcagtgacaaagccacagctagaactccggtctgctgacttcaaatctagacattttctacttttcatgccgctctctgcaggatatcctaaaacaactttgagaatgcagagatcttgcagtggaacaactttctgagaaaggagatagaactcccatgagtgggaagggtgggccaggcataggacgtggattaaatgggatgtccaggacccatgcagtcctggattatatcaatgtacccaacatggagagccagatgttggtacagagaagtagacccartctggctgaagagtagattatttctgaagaaatgttaaactgggtggtatttcaaacaatcaaagactgaaaaaaagaaatacttatattaccaatttccctaagttttctaagaaatcctctttttgaaagaatgttatgtttgagtttggtttgtatattcttttgagctaaatgaaatcaatattgttaatataaaaatattagactgtgaatgatatgaaatataatttctggttagcttttaagaatggtggcttttattttattaataactaagctacatgtgaatttaagaaacagcagagcataaaaagtaaaaatagaaaccaacatgtaaaggcagttttgtttcctatgcatttacattccataatgggaagccaatgaattccaaagatttgggggaatgttgaatttgggaaatgtttaccaaagtgtcatgaccgtttataacaaatatattagacttgcatctgatcactatttttactgtttcgcccacaagatttctctttttcttctttgaagttaccataacaattttgcagtaagaaaggaagcaacagctagcagtggttaaatttaaattaattccttcttaagcattctaaaatggcacactcatcagcataagcttactcacacactgtgtgtacttttacgcacccagaagtcagaaatcactgcctarcagaagccagtgcaaaagagaagcagacaggaagcagttaacctaatgtgtctgtggtggcagctggctaagcggaagctgttaattattgaataagcacacatactcctaatgcaaattgccctgagattttattaatcatgtaaagcctatgaagttctaagtttgaaaatttatatcccaattaaaagatttaaaactagacagagaaaatccatttggaaaacggtttggttttatttttggagggggagaatttgggtgttaaggggtagaggtcctgacctgagacattttgagcaatatttccatttccgtcatacccttgtttatatacacaaaatrttcaatggttttcaaaaacactttcacctctattagctcctttaaaccttagaatacctctgtgaatctttccaaaatctgttccgttttaataattttaaaagctaaaatactgagcctccaaaaatcaatttaaaaaatgacacagaggaaagatcaagtgttctttggtcattcaggcagatactctcccgttcacaaatcctggaaatctatcatgaaatttctgaatgcagttaaacaaagaacaaagacaaaaaaaatctttaaatttctcaatgaatgatttgactttattagtatgaaaagatgtgcctagagagcccacaagaaaatgttctgaagttgtggactcttagccagaaccctgttgcaggkcgacagagctgtgtgtgttttctcaggggctgggcccaggcctcacaggtaaaacagaggctggtgcagagttgttctgaattcctctcaaacacctcccagcctggtcatagaggctagaaatcccattcgcaggttgcaaatgccagagcagcggtataggtggcatgtggactctccagaagaaatagcacatagatctcagttcatccccaggtgagagtgaaggaaggcagaactttcctgagggcacttgctgctgggaaacagtgaggatgagcagaccagtctttgctgggtatctggagagagtggagctgggtggggacaagatgcagagcacacgactggggccccaaagacaaatttgcttactgtggtccaggacaagtctagcactgaaggttggcaaggagttttcaggcaacaggtgggtgcatgttgaaaaaagcaccgataacccaaattgtgcaaactttcaatcataataagaatctgaatttgggccaggaacggtggctcacgcctgtaatcccagcactttgggaggccgaggcgggcagatcacctgaggtcaggagttcaagaccagcctgaccaacatggagaaaccctatctctactgaaaatacaaaaaattagccaggcatggtgatgcatgcctgtaattccagttactcaggaggctgaggcaggagaattgcttgaacccgggaggcagaggttgtggtgagctgtgatcacaccattgcactcaagagtaaaactccatctcaaaaggattttaagtgcacaatccccagataaaaatatttattgttcagtatatttatatttattgtatgtgaccttgggtaattgtttgttgtagaaggttgtcctgtgtagaatgtttaacgacatccctatcttctacctgggggatgcaagttgtcataactgttcccttaccagttgtgacaactcaaactgattccacatattaccaaatgtctactgggggtaaaaatcacccttagtgaggatgacagcactaaacccctctgtgactcagtttctccacctatggaatgtaagtaacactctcttctcacctgcatagcgaatctgtcttcctaactcactcaaaacctgctggttttcatccttgactgaaaagaaagtgaaggcagcatcatatgggaagcgactcagctcgtgtcgagggattggaccttgattctggttgtgctattaacttactatgtgacccagggtaaataactcacctctgctggcctcgcatctttgtctttaaagtgaaattttgtctctgtactcaaaccacattggcagcaagaatactcttttattcttcaaaatagtgctctcccttcttctattttttcctttatacattcagtaacttcccttgttcttatattgagttgctgttatttcactttgatgtaaaagtaggaaaagttatgacaatctggacagcctggggctattggagtttcccaggagaaagcaagtccaaaatcctgtattctcatcatctagagattaggcctgagatattataaccttacataagctaacttttgcttaggctcctttaaatactgagtggtgcattttaccaagctatactgcagattgatttaagagagaaaagaaaaaaaagagaagcaattagaaaaaatgaagaaacttgcccacagttatacttctccctttaaattgcattgcttgattgctgctttctttycaatgcatttctgatgtgacagttcccaccaggaaaattgccagagaaagctaaggagaatgcttaactttgtgccatccgaacacttacttccctcacatggcattaataaagcattctattgctagccccaagtttctgtgaataagccagacatggactctgagccctgagtcagactatcaaagaaggtgggccgtgacatattgtgacaagggcagcatggttctggggaaaagggaaggctgtgcaaccacctggcattactgcggcgtggttacctgtctatgcctgttcctgcctcccgactgataggatctggcagcaactatgggcagagaatttcccccaaggagatgcagctgcttctgcaaaggctgccgytactgcagataaaggctcgttattcactgtgacacacctacatgtaccacctccatccatatttgctccagtgggtcaaggcattaccagtggaggatctgtgtcgaaacacatgctgaaccagcgtgtgcaatggggaggactctccaagagtcttctgggtgaggaagcagaagcccttggaagtggtgtccctcactcaaagtcacacagcaaataagtggctgagctgaaaccagatatggtccttactctcagatcatattaccttagagggccactatcaacacgttattgccaataacacaataattatgtaagattgarttgccatttcctagaaaagaagagagccccaagggaatggagcccagatgaggcaaattattgaaaatggggaataagtgaagaaaggtatcaatcagaggattctaaatagccataggcactggggccctggagaatgagcttccaaagacgatcaggtaccaaatatgatatgataatggtggtggtgtttggtggtggtggtgatagagttagtgatgatggtggtggtgacggtggtggtgatagtgattgtgataataatggtggtgatggtagggtgattatggtggtgatagtgatgatgatggtgatggtggtggtggagatggtgacggtgatggtggtggtgatggtaggagtgatggtggtgggagtgatggtggtagtggtggtgatggcgtaatgtggtggtggtggtgatttatgatggtggtgatagtggtagtggtggtggtgatggtggtaaaacactcagtatttactcatttgtttgacaaatgtttatggcaatctaccagtctgaacactggagtacaattgtgaacaaaattaagtttctgccttcacaaagcttacagtctaacagagaacacagactagtaaatagaaaattttagctcagcatggcaaattctgtgatggaaataagcatagggttgtatgggaaagcaaatctctcaaatgtagctcaaaggtttcccaggactaaacattggatcaaaagatagaagaatgtctgaggtcccacagtaattaaccatgctattatttgaagaaaccctttctccatggtggaaattatatacaaacagctagtcaccaaaagcactgaagaaaaatgtagtagrgggttatttgctcttctgggggcttgtttgttttgcaattcagaaaactaaggttgacacaactgaagtttattccataggatctcaacatttacagttacttgatccatggtattctgattcagttgtagtaagaaaaaaggtaatattaatgagaaaattaggaaagtaggaggagagaaaaaaacgtcaatatagttacatatttttaaatttcagtgtttgtactgctgccatcctggactatccagcttcccttgagatgtatgcatttatttttaaccctggccttttgctaatatcgaaccacaatgccatcattaatccccattaatactttgctctgactatgmcttttgggaactaactcatgactaaacttttttaaccaatcgatgttcgatgtactctttagcattgtaaaaaaatcttgaacttcagctagtaaatcaaactgaccacaattcggagtaggtcctggatttttctaggacacagtacaagatgaatgactgtagacctttgagatgaaatggactttagtgcttctgatcctcatgcatctgtgatcctacagataaacagaaaataaagttattttccctttgtccatcttttcctccccctctttttgtcccagtatttagaaagatttttttctttccaygcatgaaaaagacagtaatgacataactacttttatatcttgccaagcagctcctcaaggggttaactataaaaccatgttttgttcattttctttcaattgtttacttggtcatcttataggaagcttcacgttgagcaaacctcttcatgcaacaaaccttaattataaatattcagattacatttaaaagttcactttgattagaaatttcacacctgagtcatcccaaatgaactgtaaagacagaaataaatatataaagtttgtatttatttctaaagtttattccttgatcatacagaccagtcacaaggtactttcgtaacagttttattaagaaaaattttaattacaaagcaatatctaacccatcctttggtttataaagcagcttaaacctctttttttggagtgaacggtcrtagatacatctgaggacccaggtgctcaatgggcattgtccttggcatttctaaatcaccaaggaactttttyrcatttacccatatggattttaatttttgaaaaagttcatctatcaaaacaaatcatgattatgtaataataccttgttaccccattcttgtgtcagatttatataactgccaatgggaacttctaatgatggtggcggtggtggtaatcatctctaccagataatgagtatgaccacactgaatatgattcggtgtcactttgtgggggtaaagatacaacttccatctggtcttttataaaagcgacaacagcctacctgcattactaacccacagatgcctagaggtcaaaattccccaggtggtgaccactgccagatgtaggttccatcatggacttgagtctccatccagagcttctgggtctccaaccctatcagcttttatttaaaagtgttattgtctctttctatgattcatatcaggaatgaaatttctcagtttggaacagcakaaaaaggcagaagcctccggtgttccttgcaacctttccaattrtaacgcatatcaattagtargagctctcggggtgacaactttgggagaatccactgatttatattaatgaagagtgttactgtagtccaacagagtaaagtactaaattaccaactctaaaaagattttttagaaaaccattaaagttaaagtcaaggtatttctaagaatgaaagtcatttctatgattctaaaatgacccagggaattcaatgatgaatgagaggtacagactcaaagcaattctctaatgtattcaaagtaaacaatacyataaggtcaccttattcaccagggattttcatttctgttcattgaagatttttwaaaaattgacagatatattggaagccagtgggaaaatagaatttatctaacagaaagtatcttcatagccacttttgagaaattgcataaatccattccataaataaccaaagtgcaggtggagagactgaggcatcaggaagttaagtaactttatccaaggttgctggtagcactgggggtgggtcatgagttgcctggccccactaattcacacacaatgttctatttcccctggatttgtcctctgtctgtcctctctccmggtcacatgagctccttggatacagatataatgccttttacatgtcctgtctgattcaatccttctctttcaggtgggggcagtggggggacgatgaactgctcagacattatcttttttctcttatggtaaaagccagcagtgtaatgaagtttccatttgtggtcaaacagcttggtttctcaattattaagcttacatttcttatgcctcttcaccccatatttttggagaaaaacagacatttattacaaggcatctctcgaatgtgataatcatgggcaatctaaatgtctgctttccctgaattgcttcctggaatgaggtttcaatgctgcagctattctgtaatcacacaggctatttctgaagcacagggatgctttacagcactccctccaagctgagcggttggtgctgctctggtctcctggggccagcatccccaggatagatggatagcaaaggagcaaagcaaagccagctcagccctttaggatatgcacagcttcatgcaccttgggttcccttcataccctctttctttcccctgtctcctcctgttacatccttccctttttcctcytcctgctctgcatttttccctctctcatacgtccattcctttaattcagatatttttgaggcctgttctataccagctctacaccatgcagcagtggtatggcaatgaaaacagcaggccacacttggagaccttgaaatctcagttttctctctcagtccacatttgcttatttctctcattattgtcaattagtaaaatatgttttggccaaatgagcatcctcagatactgagagagacaaggttaataatttcctgtggtcatagttatcatgaaaaatgagtctaattacccacccctatcagagcttgggtcatatatataccaaaggacattcatatatcggtagttatatgcttcatactattcattacagttagttacaggattttttttaattgaagtaaaatttacatacagtaaaaaatcatggatattaaatgcacaattcaatgacttttgattggggtaatcaccaccccaatcaaaatatagacatttccacaagctcagaagtttccctcgtgcttcttccggtcaatccccacctcattaggtagctactattctgatttcttgcaatgggttacatttgtctattcttcaactttacataaatggattcacacagtagaaatagggctggcttctcttactccatcaactgttacatgtgttttcaatgctttccttaccattactaagaagtattttattgcattgtatatcacaatttgtctatccattcacctattgatgcatgtttaagatgtttccaatgtgaagctattatgaatacagttactataaacattcttgtacaagtgtttttgtgtatgtgttttcatatatctggagtaaatagctaaagagagcatgcctagatcagaaagtatgtatatatttaactttataagaattggctagttttccaaagcagctctactgttttacattcctgccagcaacatatgagagttccagtttctccacagcttcacctattcttgatgtcttgaacctttttaattttaaccaatcaaatgggtatatagtggcatttcattgtagttttaattttcatttccctgatggctaatgattttgagcatcttttaatacatttattggctatatatatatatatatatgcagcatgttttcaagtctactgattttcttattcagtcatttgtacttttattattaagttatagttgctctgtgtatatacctctcatttgtcagatatgtatagaacatattttccccaaactatggcttgtagttatattttataaatggcatattttaagtaacaaaagtttttaaattttataaaatcaaattttttcattgttctttaatagtcatccccagtaaatgttctttccacatgaagactttcacatgaatcactatttgcccatgtttgccactatttctcctatgttttatttttgaagctttataatttgaacttttacattgtggtctatgatccrtcttgagttaccttttggtgttgtgtgaggtagggatcaaatcttattttttccaaatttatccatttgttccaccagcatttgttgaaaagactgttggaaaggctttcattcgttgcaaagagtttctttgttgaaaagactgtcattttcttcattgaattgctttggtgactttgtcagaaatcaaatgtctacatgagtatggatctatttctagactctcttttctgtttcattagtttatatgtatgtccttatgacaataccacactgccttttttactgctttcctctagtaaaccttcaaatcaggtagtcattcatttttgttcttctttttcaatattatgtttaattattctagatcctttgtattgctatgtaaattttggaaacaactttccagctttaatgaagtgcctattggcattctaactgtcccgttgtcttgatctattaaagaagtattaaaatgtagcctatagccatcttccagtgatagcacatccattcattcaacagaacttattgagttcccactctgtgctagccctgggaatataaagtcaaaacagcatagtgccttccttccttctgtgaacataaagtctgggaaaagaacaaggacagtctaaccaatgacacaatacaatgtgataaatggatagtactatgcaaagagtactatgtgatcaaagagtaaggacatccaaatcaaggtgataagtaaagattcccagggtgaaaccagctgagttttaaaggatcaatagggcaccaggtaaagaagaggtttgagtgtggatggacattccagggagcgagaataacatttccagcaacaacaaggcagaaaacagcttgttattaagcaaaccactatgaaaaaccaaagacatggtagatgattttcctttcctttcgaccaagtatgtgaccctggctgttgtaagtgccataaaagcccagaagaaaatcaaggatgaagagccaggcaagggaagaaatagaattgctgctaccctatttcttttttcttgtgcattttctgggatgcctgcccatggaataacctgagtacttgaccttcagctcatctcccttcctatccttacaacataacttggcaaatggcggagcaggcacaaaaacagatctctacattcccagaactgtgaccttttaaattttattttttagaacaattttttcaaacagcaattgaatccaaatacataaaagagaaaaagcagagcagctattattaaagaaaggtggtgactgcagccttgactatcaacattcaattctcacctgccccaccccacaacaccgtaactactgagtttcttttgcaaaaccctagcatgtcatgaagcacaatytgacatccaccacaccacttccacctgtgattaagtctggtcaccaccacactgtagctggggatttgtggttcacaaaacctggaaacgattttctacaggaaataattcttctccttgccaaacttaacgctaggcctttgatgttagttcgtgttacccaacatcaaaattcatttccaatggtctttgagaaaccattgtggacaaaattaggtataagactattttctaaaagagttatggaaatcctagcctttatgaggacataacttttaacaatgaaatttaacggaatatgataggtttataacagagaaaagtcatttcatcatagccatataaaatgcacacagaggagaaaagtacccttgcatatttttttaaaaagcagaaagaaatagtaactatacaaaatgtaaaggtctgcgctacaggaaattgaagaatcaagaaatgtcacatttctttatttttcagtatcaagttagaatctgctcatattccaatgaccaaaattaaacagaagtccagtacgggtcatgttttagggctatttctattctttgaattatacaggagaaataattttaaaatcatagataatattatactatagatgctggtttaatttaaaagtcttcattgattttcacagctttattgagatatagttgacaataaaatgtgcatacttaatgtacaattggataatgttgacatgtatatgtacccatgaaacgaacactaaaatcaaaataatgaatatatccattgcccccagaagtttccttattgtaatttcttccttaaaccactccctgctttgtgtaccatcccccatcactgctcagccttctgtcattatacattgatttgtgttttctagacttttacacaaatataatcatgcagtatgtactccttgtgaggcttcttttatgcttccttactgtattctgagcttcatccatgctgttttttgtttcagtagttcatwcctctttattgctgagtagtagtgtttcattgtatggatgaatcactatttgcccatgtatttacttgtggatggacatttaggccattttccgtttttgcctcttacaaataaagccagaaactttagcttggaagactttagtaaaagtctttgtatagacgtaagcttttatttctcttaggtaaatacctaggagtgaggtggctgggtcataagctaaacataggtttaatttttaagaaactaccaaactgtttcctaaattggatgggcattttacattcccaccagcagcatatgagagtctaaagtgttgcatatcctcccggacacttcatatgatcagtctttttaatcttagacttttaaatagatgtccaatgttaccttgctgtggttttgatttgcatttccttaatggctgatgatactgagcatcttttgttgtgattggccacccacgtattttctttgatggaatatctgttccaatatttttctcttgttttaaggttgtgtttgttttcttactattgagtttcaagggttctttacatattctggatacaagttttttctttttaatcagataaaggatttacaaatatcttcttccactctagttttattttttcattctcttcacagggcctttcaaagagcaaaggttcttaatttttatgaagtctgatttacaaatttttttatggatcatgcttttcatattttatctaaggaaactgcctaacctaagatcacacaattttctcctttgcttccttttagaagttttataaccctaggttttatatttaggtctaaggttcattttgagttcatttttacatatggtgcaaggtatgaatcaaagctcgtatttttgcatatgaatatccaattgatgccacctcattttttgaaatgattatcctttatccataaaatttcctttgcaactttatcacaaattagttaactgtatttgtgtgagtctatttctgtgttctctattgtgtcacattgatctgtttgtatttataccaaatggtgtcatgctacttaatttgaaagtattacatgtaattgtacccaaattctatttaattttaagttttattgaattttactttaataggaaagaaattaaattgcaacagaagaaattattaaacttcaaataaatatttcttcactacaagagatatcatttcttaacaggttttcctaaggttattaaaaattataaaaaccattaaaagaataaagtaattatgtacttttaaattatactttaatgttagatggtatcaattaactgagagacccacacactaaaacattaccattttcactgttcctctcctctttctcctatcttttttcttaggatgattattgtttttatattatcaagtcttaaaattcatctgtaactgtaaatcccaaagatgcttaacttatatagagttttctcacccctgaatctgttatcacagagtctctgttcctgggttctttgtttgactyagcccctaattattttgatatcactttcaagtattaatagtttggttatgataggtaccatattccctgaagtacttcatgttcgacaatgtgtgtaaaagggggctgaatgcttgatttgatgctccacttggtcactgttgatgtagagaagagctaatgatttgtgtacattaatcttgtatccagaaactttgctgaattcttttatcagtcctaggagctttctggaggagtccttggggttttcaaggtaaacaatcatatcrtcagcaaacagtgacagtttgacttcctctttacctatttggatgtcctttatttctttctcttawcttattgctctggctaggacttccagtactatgttgaagaggagtggtgacagtgggactccttgtcttattccagttctcagaggaaatggctttcaacatttcctcattcagtattatgttggctgtgggtttgtcatagatggcttttattacattaaggtatgtcccttgtatgctgattttgctgagagttttaatgataaagcaatgttggattttgttgaatgctttttctgaatctattgagatgatcatgtgatttttgtttttaattctgtttatatggtgcatcacatttattgacttgtgtatgttaaaccatgtccacattcctgttatgaaacccacttgatcatggcggattatctttttgatatgttgttggattcagttagctagtattttgtgaaagattttagcatctgtgttcatcaaggatattggtctgtagtttccttttttggttatatcctttcctggtttttgtattagggtgatgctggcttcatagaatgaatttgggagggttccttctttctctatcttgtggaatagtgtcaaaaggattggtagcaattcttccttgaatgtctggtagaattctcctgtgaatccgtctgttcctggacatttttttgttgataagtttttaattaccatttcaatctcactgcttgttattggtctgttcaggatatctaattcttcctgacttaagctaggagggttgtatttttccaggaatttatctgtcttttctagattttatagtttatgtgcattaaggtgttcatagtagccttgaatgatcttttgtatttcagtggtgtcagttgtaatatctcctgtttcatttcttagtgaggttatttggattttctctctttttggttaattttgctaatgatctatcaattttatttatctttttaaataaccagctttttgtttcatttatcttttrtatttttgtttgtttcaattttgtttagttctgctctgatcttggttatttcttttctcctgctgggttagggttttgtttgttcttgtttctccagttccttgaggtgtaaccttagaatgtcagtttgcgctcctttggtcttttttctgtaggcctttaggtctatgaactttcctcctagcactgcctttgctgtatcccagaggctttgataagttgtgtcattattgtcattcagttcaaagaattttttaattttcatcttgattttgtttttgacccaatgctcattcaggagcaggttacttaatttccatgtatttgcatggttttgaaggtttcttttagagttgctttccagttttatttctgtgtggtctgagagatggcttgatataattccaattttcttacatttattgaagcacattttatggcttatcatatggtctatcttggagaaagttttatgcactgttgattagaatgtgtgttctgtggttgttggataaaatgttctgtatatatctgttaagtccatttgttccaaggtatagtttaaatctattgtttctttgttgactttctgtcttgatgacctgtctagtgctgtcagtggagtactgaagtcctccactactattgtcttactgtctatctcatttcttaggtctatttgttattgttttataaatttgggaacttgagtgttcagtgcacatttgtttaggattgtgatattttcctgttggacaaggccttttaccattatataatgtccctctttgtctcttttaactgctgttgctttaaagtttgttttgtctgatataagaatagctacccctgctcgcttttggtgtccatttgcatgaaatacctttttccacacctttactttaagtttatgtgagtccttatgtgttaggtgagtttcctgaaggcagcagacagttggttggtgagttcttatccattcttcagttctgtatcttttaaatatagcatttaggccatttacattcaatgttagtgttgaaatgtgaggtaccattacattcatcatgctctttsttgccygtgtactttggtttttttgttttttgtttttgctttttaacttgtatttttgttycataggtcctgtgtgatttatgctttaaagaagttctgttttgatgtgtttccaggatttgcttcaagatttagagctccttttagcagttcttgtagtggtggcttggtaatggtgaattatctcagcatttgtttgtctgaaaaaggctgtatctttctttcatatatgatgcttagtttygctggatacaaaattcttggcygataattgttttgtttgaagaggctgaagatagggttccaatcccttctagattgtagggtttctgctgagaaatttgctgttcatctgataggttttcttttataggttacctgatscttctgtctcacagctcttaagattcttttctttgtcttaactttggataacctaatgacaatgtgcctaggcaaagatctttctgcaatgaatttcctgggtgttgtttgtgcttcttgtatttggatgtctaggtctctagcaaggccggggaagtattcctcaattattaccccaaatacattttccaagctttcagaattctcttcttcctcaggaacaccgattattcttagctttggtcatttaacataatcccagacttcttggtggctttgttcatattttcttattccttttcctttgtctttttggactgggttaattcaaagaacttgtctttgagctctgaatttttttcttctacatgttcaattctattgctgagactttccagagcatttcgcattcgtaaaagtgtgtgcaaagtttcctgaatttttgcttgttttttctttaagctatctatttccttgaatatttctcccttcacttcttgtattattctttggatttccttgcattgggcttcacttttctctggtccctccctgtttggcttaataactaacctccttaattctttttcaggtaaatcagggatttcttctttgtttggatccattgctggtgaactagtgtgatttttggggggtgttgaagagccttgttttgtcatattacagttccttctcatctgggtaggctctgtcagagggaaggtctagggctgaaggctgttgttcagattattttgtcccatgggatgttcccttgatgtagtactctcccccttttcctatggatgtggcttcctgtgagccaaattgcagtgattgtctctcttctgggtctacccacccagcaagtctacccagctctggagtgacactgggcattgtctgcacagaatcctgtgatgtgagccatctctgggtccctctcagccaccggaayagcgcctattcyggtggaggtggcagggggtacaatggacactgttagggttcttagctttggtgtttaatgctctatttttgtgctggttggctccctgccaggaggtggtgctttccagagagcagtagctgtggtagtatggggaggaaccagtggtgggcagggccccagaactcccaagattatatgccctttgtcttccactagcagggtaggtaggaaaggaccatcaactgggggctgggctaggcgtgtctgaggtcagactctccttgggcaggtcttgctgcagctgctgtgggggatgggggtgagatttctaggtcactggagctgtgtacctaagaggattatggctgcctctgctgagtcatgcaggttgtcagggaagtkgggggaagctggcagtcacaggagtcacccagctgccatgcaaaccaaagggccagtctcactcccaccgtgcccccctcaacagccctaagtccatttccaggcagagggcaagatggccttgaaaacctgacccggtctacccacctcccagctgcaaaagaaaagggtttggttcttccacacctgtggagtctgcacaccggatttgcaccctcccccaagttttggccaggaggcttctcaccccattcaaattgctacaaagttcagctagagatttccttctccatgtggagttttatcctctgctcctctgtccacctttctgatggatctctgtggtgccaggcagggatggcctgctaggggacctagcaagctcccagggcctttctgctgcttcctctacccctgtatttccctcagctctccaagttgacccagcaccaggtgaagtcggaaacttctcccacaaacagaccttcagcttctccagtggaggtttgtgttcgggagaggagggtctccctttcccacttgcatagttgggacactcacagtatttgggggggtctctcgggtcctgcagaagcagtctgcttccttcagagagtctgtggtcctctcaggattgctggtttgttcttgcagtcgacctggatctaaaatttacagcacgagcctccacatgctgctctgtccagagctgcaatccagtcctgcctcccatccaccatgatgatccaaatccttgggttctctattttaaggacactaatcatccttatgttgtatcatctttgttttccataactatggtactattagaatctctctaaataattcatcactttggttttttattagtattttctttgatatctcaagttttcttctatgtcattaatttttatttttaataatatgtattctgtttcttgcagtttataatttattattagctctgtaatggtatgatttggtcctcaatttgttgccttggtctgtgatctcctaaaaggttgtgagaaaaatgacttatgctccttaatttcgttttcttctatgtatattttttcatgatctctccctctctctctttctgtctcttcctctgcatgcagtttcttttccctatatttatgctcaaacttgcatcattcttgtctctagacgttctatttgctgtaataaatgaaattcttctcmatctaaggttagtttgatctcacttctgaactacaatttgaggccaatgtaccacattctatctactcttcagtactctgcaagagattggagtgaggactacagtattagaagatgaacaatctttggtatcatgcttagggtctgctctttcccttaagattctcctacatctgtcactccagaacccacccccacaactggaggcatatctcagttccattgggggatacgctcagcttgtattatttcccaattgtgttccagaatctctacctcttttaaggtgcagatactttttcactcgtttctccacagcaggtgtttccaccattctgttcagaacaataaaaagakcagcttttttttttttttttttttttgagacaggatctcactctgttgcccaggctggagtgcagtggtacaatcagctcactgcaacctctgcctccccggttcaagcgattctcctgcctcagcctccagagtagcggggactacaggcatgtgccactatgcccagctagtttttgtatttttagtagagatggggtttcaccatgttggccaggctggtcttgaattcctgacctcaagcaatcyatctgcctcatcctctcaaagggctgggattacatgcctggccaaaaagatcagcattttgattatatttattactttctagawtttaaaatataaattagaaatctcaggtttttgttgactagctggtaagatggttaaggttaggagctgakccatgttgcctctctgctttactccatagtcctcatgttttgttgggaccatgttttgaagtttattgcattatgctgataatgacttttaggggtttttgaaatttttttctaattttgtaggtattatgggagggcaatttagtgtagccttaatgaagttgaataatgcctcctgtaygtagtcctggacttgtattgtctacttgaccaccagtgactcaagaccaagacactttattctgccactggtcaaaccctgagatcatgagagggtgttaaaacagccaactgtggcatgaaaaatgacaaacatgtcctccaaacatatcttgttgcttatgaggggagatattattttaaccctttacatctgtcactaaaaacttacctctttcatggcctgagctccctagaaatcaatgttctaattagaaaacagtagctaatctgcccaaatgctaataaatgagggttgtgatttatctagcaacaggggaacagctcagcattaacaattaaaaggtctgtagaggacagagctttttttccttactcttcyccttagctgattgagttcagccctatgctataaatagcccttgtaattaatggctatctgtttgaaaatcagttatcaggaccacagtttaggagcctttacctctgaaattcatagagcctattttatgtctcagtgataagggaatgataatgtgagttcaaagctaaacctacctacccacaaagaccaaaccacatcatagcctaccaaggcattcttcaatcttcacgataatggatacagatttttaaataatcaatccaactgcaaggagaagtactgatctttaatatagccataatgtttggctaaagcctgctgcactccagtcatttcatgactctataagctaaagtcaaaatttatatcaaaggcatgagtttgcaattagctgagcaaggtcttttagagacccccaaagagttcattttttcctacattgaacaaattaactgtgtggttcataaagttcttcttcactttaacctgactggacacagagttaaagggggaagatagcatgtctaaaccaaattgaatagtgatcttctagacaacactccccagaagggaccctccttgggaaataccactcagtgctagagtaaatctcaaatttcagtgaaggctttgtcattcacagtaaaagatgcttgcacatcttgcatgttttcttctagtattttttttatttcgttcggtattgcctacttacataatacccatgcagagctcctagaaggtcccagagcctgccatattgtttcatgacactacacatttattaaaactgtttccactatgtagatggccttttctggccagtttgcctgtcatctccctctattaggccccccagcatcaccaccaccaccctccaatctaactgataactcccttcctcaggttcccactctacctctacatttttctgtcttaataccagtaatctttacatccacttgattggtttcttgaccatctctctccaggcataaggtcttattcttactcaaatatacatttcctatatgtttgttgactatataagtgattattgaacaactacakagcatccagtctttgctaacacttggtaraactcagaaagacggagattttttttctttgttcccaatgaattgataaaccagcggggaagacagacttctctacaactagacacagcaagtcaaaaagaggggtctaggcaggtgatgaggctgagttgttagttggtgaggcagcaaacacataaaagctcaccatgttttaatgtctcttctgtgattttcataatcaaaacacacatgcttcaatcatatgtttcacattgcttactaatgtctttgcattataactcagacctgtgcttctaaacgaatgtgcacacaaatcacccagtgatcttgttaaaatgcaaattcttattcaagagttctgggaggggcctsagattctgaattcctamcaagctcccagggaatgccaatattgctgatccatgaatgcctcaagtagcaaggctccacaccattgtaatgtcaatgtaaacattgttgaaatggcaccagtttttggaaaagctcctggactccccacctaaactcttctgactgtaattaaacatgatcaacrttacaccaagagaggtagattcagcagtgcccagaaaaaaactggcaagatgccttgaaactgttacctcttggcctttgttttactatgtaaacacaaaaggtctttgctcctgcactttaggtctgctgctacaagatgaatgtagtctgaaggtgtggcaagttttatccagatattcaagattgcctttctctgctaaagtctcttccatatttaaaccataacatcccaggttctttatggaaacagaaataccttctaagaaaactctaaaactttaatctgtttaaacaatcataagaaagaatacttaagtgaattttacaaagggaaaaagaagctctgggccaggcatggtgacttatgcctgtaattccaactctttggaaggctgaggcaggagaatcacttgagcccaggagktcaagactagcctgggcaacatagggagaccctggctctacaaaaaaaataaatttaattagccgagcatacacctgtagtcctagctactcgggagcctgaagtgggaggatcacttgagcctaagagttcgaggctacagtgaaccatgatcgtgccactgcattccagcctgtgtgacagatcgagaccttatcttagaaagaaagagagagagagagagaaaagaaaagaaaaaagaaacaaaaacaaaaaacctctgtaagcatcccatgggaatctattttcttaactcttaatgattccaagacaacatctgttaactttttcaattcattagagtctaccactcaaaatgacaacatctgttaactttttcaagtcggtagagtctaccactcaaaatgaaagtcaaaatccattagaccactaatttctcatttgtgagttttgagttatctttccaccaagacaagttccctacttgagattttatcttttgtaggtcttcttcctctcttccccacatcattcttgagcactaacctagcccaaaccaagtgtcctatgtatgtcttcttccaatccggtaggtgtcacactcctcctatctgccgttcaactttgccttgctataatatgcgatttaacaggcaatcttggttacttggtctcctcttgcgtatttagtttttgcatcttttttttctaacaatgtaatggtaaaccgaacagaagtggaactcttttcactgggcacaacatatagaaggcaatggcagccatagcttgcgccatgcatagcctggagtagacaaacctaaatgaactttcttccttctcacttctcayggactcatttaggtgaatgccaaagatgacgaaggtgtcctcgttggatcctgggacaatatctrtgcctatggcgtccccccatcggcctggactggaagsgttgacattctattggaataccggagctctgagaatccagtccggtatggccaatgctgggtttttgctggtgtctttaacacatgtaagtatccaactgagtaatttctttttaatataaaggaaacttcactctaagacattttttctataacctaacaaagagacatagcagcccctgttgacactatagaatttatgggtgagccattctgggatgtagtcaatgcataattaaattgtagtgggccaaatatgctcatagtttctctttgactgcagaatctttatagaaagaatgatagactatatcctgtgtaatccatcacttaacacccraagaaatagagggttacagtaaaaatayagagaaaaaagccattttctttycagccaccacattttaaaaaaackaaaacagttaaaactaaaataataaataacaaaagatatatattgcttatttatcattgagaagttgtataaatatgcrtatttatttattattgagaattttataaatatatmcacttaatttttatcccagttatggaaggtattatagcaggtggtctcatattcrtttttccacatttctcaatgcccctgagcaattagagatcagaacataatgaacaatctttccctctccagtttcccctctggtttttaatccacccaacatccaatctgtagaggaaagcatatgagaacagaattattctcttcagtgtcaygcatcatttttcagaggcatttgcctctctagacccagacgatattacaattaattcagtgaatatttttaaaaatacatttatttcagtatgtcttcatcactggtaatgattttcattcacaagtcatttctacagccttggagaaacattaagctcaagttggggtgtcctttctgcctgctcattaataaagaatttttacctagctaacattttttaaatcaaaaacaaagggaggggttggaggctggagggaggtcatttaaaaaaatgattacaaawcctatttgttttagctcaaagtctcaacagtctaagacttggtgatctaaatttaaaamaaaaaagtcatgagttttgttttgttttattttcccatagtatcaaacaggataagattattttyttagccatttaaatataacccagggaagaaggaatacatatttcttgggagcaatgaaaatcaaaagtatagtcccctagaagcactggtctctgaagttccagatagaagccggaacttcatggtaggttaaaggttggaggtcatcccatccctcgaggctcccaaaccaagacaaggtaaaagatgcccaacagaggcaaccactcttgtgaaatgattttagaagacagaaaggacccaagttctccccatgcctacaatttcactatcccagtgtaattccttccggctcacaacaagataaaatagtgaacaccttacatcygttcgtgtctttggcataaaaaggttatccaatctatgcctgaaaacaggctttggcggtaaatcaagaaaaggcagaaacacacagtggggaagtcacaacgagagtaaacctgaagatggaaattgggggaaggaggaacaggtgccctaaagtcaagcctcactttcttgaaattatgagtaaggcagagtcttgaccaagtcgtgtctgggataatgtgaattagtgttcakccagaaacagaatgagagtggcaatcgttttattgataagaccctgggtgaacagggctgaaaatcaagaaaggaaratgggaacgggaggcccgtgrcagctgccactgttgtttggggcattaagatcargtcctttaaggaggrggacccttgaatctctaccagactccagtttggacttccaaggttgttctgttgaaggaggtgggtagtctttggttaaaaatgctaaactattctgaaggagaaaataaaaaggcaagccaagtcattaatcttaaaattgtcagctgaattattttcaatgagccctgatgtctggtgtcctgggaggcakggagggcatttggattaagtttaatcagtaggtacatatggcaagaaaggtattcagataatttgttatctattaaaaygaactaaaatgaatctgtggtgtcacccaccaatgcatgtcacaggagcaaattctggccaagacagcaaattccaccaaggacctactctgtaaattcctaacttcctattagtgggtttttaaaattgtattttcrggaacatagtcccattcatgggactaaaataatactacgttgatgatcaaacgcttagaaacgaaacaattagaaccctgttgggattctactctagttggcttcacctgacaccagctgcaattctgaaggatcacacagcaagatttctctctaccgcccccatggggttgaatgaccacccttttccagcatggaacatttgagaataacatgtccaaagggcttttcatgttgggtcaggaagaaagtcccctacaagaagggttttttcactctgtgtttattaaatgctggtgatgtgtttagctgtggtctgtcctttcctgtagttttacratgccttggaataccmgcaagaattgttaccaattatttctctgcccatgataatgatgccaatttgcaaatggacatcttccyggaagaagatgggaacgtgaattccaaactcaccaaggattcagtgtggtgagtttgattgacartggcattggctgatgtcacattatagtaatgttacacatttaccacaagatagactcaatctgatgtttctgttctattttgaggaccattcaacagcacaggcagaaaactctgattgtcaaagaatgttctagcaaatgattagwaatgttactgaagagacagtttgggttcctagtgataaaaatcaatcattccttataatagcaaccaccaaaaaaaggtcatagttttagctgctgcatatgcctatactagttcctctctacyttgatatattaatattacagttaatagcagaagtattggagccaagcrttctctgggtcagtgccctgggactaatagagctaacatttatttagtatttactatgcatcggtcttggtgtatgcatgatcttatccagttctttttagttgtatcaggtggatgttattaatatcgccatttacaaatgaggaaactgaggcccaaaaaggcttgctcacggtcatacatctgttgagctgggaataaacccaaatgcttctgaccattaaccacaaccttttaaatgacttcagcagtataggttttcttttcgaatgtaaagatgagattctccttgattatattgtcacctttcattgagatatagaaatgggagtaaagctgaaattgttccccaaaaccagctgtggggttctctcactgccctgaacagctttgttacaagctggctagagggaacttaagatcccagggaaattccatttttccttgagaccccctaagtccaaatcaatacactaagaagaaacgraaaaaatcctaagagtttaagtaggaagaatttttatcaaggtctgtgtgggaggaaattggggcataagttcctctgtggtcaggcattgagctaggtagaacttctaagccaaaaatgagtctcatgcacaaataataaagctaaaacactttctgttatacaagcatccaaatggggatggtaggaagttacaagttcattttaagcaaaactaaaagttagaagtgcctgaacttcatgttacaggaatggatcacagttgtagcagcagtattaactcaccagtaggggcacacattcattggagaatgttgaaatgaaattgctgaatgagtagcaaagtgctaccatgaattaaaaatagttcggttcattggaagggaatgagctgagccatagtaagctggagggcacgtgtaagacaaaaccttgtctctgtaaattgaacagaaatttaaagaacactttaagcctgcagaattataatatagcagccctgcatgtatatgggatgacaaaacagaccaaaatagtcaccccaaaaactcattgcaattgttaaaaatgacaaaaagatagttatttggcattctccatatctcttccttaaaaacacacagacacacacacacacacacmgacagacacacagacacacacacacagcctttgtagctaagtgcagttcaaagttatctttcccagctccttgattcaggtacctcccatcatcaaataagtccctatgaggcactcctacaaataaccccacaggccctaaacagagttaatacaaaatagcgaaggtagatcttgcccttggtaaccctgtcctcwttcaggtccctgctccaaattacttccccttttcctgacaccatttgttcctttggtgccttactcaaatatcccatcaccctgagactgttcttcctggcctgggaccctcacccaccctccactgcagaccactgcccgagactcctcttcccttcctttgcctggcttgtagtaggttttcaacgcatgatgcctgatcagatgctctgactgactgcggggctgagaccagcacaactcaggacgtgcccagaccatgaagcacagggattaaagggctcagtgggatctgaggccaagacttggctctgctactgcccaagctgtgtgactttgggcaaggcacaacctctctgtgcctcttttctcctctaaagtggagagaacaatattccctgcttcactcatcacagagccgagcataacaggtgcctaatgaacgttagctgctattattgccttcattattagtcacacagctggaatttcttagaggcaatatgtttccatcaacccaagtacatcaaagcggtcagaaaaagagggatgcccagtgtcctaagatgactgygctatttctgttactttggggtatttttaaagaaaaagcagacacttggcctcaccagtgcaaacacccatgcaccttagaagttataggtggtccaggaaaacaagagtatggctaagactctcctggattgaggaggttagtgcgggctgtccccagacagatcagccagtgcatgatcaccacagccacactcctatgtcaagctctggcttgggcagctacttgctgtgtggctttgagaaaatgacttcacctctctgagcttcattttcttcatcagtagaatgaaagtaatcttagtagttaccatttcccgatggagtgrctataatgattaaatcaggtcatccaggtagagtgcttaccatagaggtaggcctgatgctgatttaattattattggtcactggtaagaagcaggggctgcctgagcatagggctggtgaggaagggtgagggtgagggtgarggtggaggctaaacaggggctgaggtgggggtgggaatgatttgctgggcatcagctgacctctgtgaggtcagtgcggtgtagactggcgacacatggcctgatggatttcctagcaaggatctcaggagctattggcctcatacttacctccctccacaggctctggtcaaacacacccacctcaacctgtcttccccgctcctggttggtttgtggctggggcccctctcctctccaagtaaaggagacctgagaacaatctctcatcctccaccatctatttcttcttcaacactcaggtcccaatggtccacagtttgtgatgaatcagtttgtccagttaggtctcagtgactcagggtgtcctcttctccatgactcagccaaatcccagcctgccgaaaccagaaatcagccagcagggaggctcagaggaaaagtacaagagggtgtgagaggtgtattctgctcgccacactccagagccaggagtgacaagtttggctctgtctcttgctgtgacccttctcgccttactactgcagaccatcaaggacagactgcttcctggtttgccaccgtaggtcccctgcatgaaggatgtttccttccaagagggagcctcacctcaggggggctacagttttgcacagagcggccccactgttgacgccaacagaggccatggtctgagctccttagctgttcaggagagggmtggggactcaggaacctcagaagggcagagcagggcagagtaattagatcccagggtagcaaatgaaaccccaagtgggcaaatgcaaagtagcagatcccagaaggagcaatttcggccgcctgtccccagygtgctgatgagttctgaattatgtgtaacctctggggggaaggcagctatgaatcactggacagtttaatgaagacgcttgctcaatgtttagctgcagtccaaacagcaaatagaatacgagggctcagtgaggagggagtcagggctactcagaggggcagggggacagcaatggtttggcctcaccttggaagagctcagcttgatcacctcattatacaaaggtcacagtcaaaatggaaacaattttaaaagacagagacgttggcacttactaggatcaagaaagatttttcaatgaaaggcttcgctccttctaaatgaagaagcctccctgtgttcttttgctggagagagtgtggtctgataggatgattctgggtgagggttggtgtcctcctctcagcttttccccaccggaatgcacccacccacagggggagcagtgtctgatctattttatttttgttgttttgtcagcatgtaacagtrtgcagggcatagagcaagcactgaataaacagaattgcttggaaaaaatttttaatgcataaaaactccatgctgcaatgggtggtcttaatctataaacaaasctttttcaaagcacattttagagcagaaattaaccagctttcacacctgggacactgccctaatcagtgtataatcctaattctcattatgtcctcagtactcatatggtgtttyacacattgtaggtgcatttttgaaattgagattgttcttctatacattattttatttttatttttatttatttttattattatactttaagttttagggtacatgtgcacaacgtgcaggttagtaacatatgtatacatgtgccatgctggtgcgctgcacccactaactcgtcatccagcattaggtatatctcccagtgctatccctcccccctccccccaccccacaacaggccgcagagtgttatgttccccttcctgtgtccatatgttctcattgttcaattcccacctatgagtgagaatatgcggtgtttggttttttgttcttgtgatagtwtactgagaatgatgatttccaatttcatccatgtccctacaaaggacatgaactcatcattttttatggctgcatagtattccatggtgtatatgtgccacatattcttaatccagtctatcatttgtggacatttgggttggttccaagtctttgctattgtgaatagtgccgcaataaacatatgtgtgcatgtgtctttatagcagcatgatttatagtcctttgggtatataccaagtaatgggatggctgggtcaaatggtatttctggttctagatccctgaggaatcgccacactgacttccacaatggttgaactagtttacagtgccaccaatagtgtaaaagtgttcctatttctccacatcctctccagcacctgttgtttcctgactttttaatgattgccattctaactggtgtgagatggtatctcattgtggttttgttttgcatttctctgatggccagtgatggtgagcattttttcatgtgttttttggctgcataaatgtcttcttttgagaagtgcctgttcatgtcctttgcccacttttcgatggggttgtttgtttttttcttgtaaatttgtttgagttcattgtagattctggatattagccctttgtcagatgagtaggttgcgaaaattttctcccattttgtaggttgcctgttcactctgatggtagtttcttttgctgtgcagaagctcttgagtttcattagatcccatttgtcaattttggcttttgttgccattgcttttggtgttttagacatgaagtccttccccatgcctatgtcctgaatggtattgcctaggttttcttctagggtttttatggttttaggtctaatgtttaagtctttaatccatcttgaattgatttttgtataagctgtaaggaagggatccagtttcagctttctacatatggctagccagttttcccagcaccatttattaaatagggaatcctttccccattgcttgtttttctcaggtttgtcaaagatcagatagttgtagatatgcggcgttatttctgagagctctgttttgttccattgatctatatctctgttttggtaccagtaccatgctgttttggttactgtagccttgtagtatagtttgaagtcaggtagtgtgatgcctccagctttgttcttttggcttaggattgacttggcgatgcaggctctcttttggttccatatgaactttaaagtagttttttccaattctgtgaagaaagtcactggtagcttgatggggatggcattgaatctgtaaattaccttgggcagtatggccattttcacgatattgattcttgctacccatgcgcatggaatgttcttccatttgtttgtatcctcttttatttccttgagcagtggtttgtagttctccctgaagaggtccttcacatcccttgtaagttggattcctaggtattttattctctttttagcaattgtgaataggagttcactcatgatttggctctctgtctgttgttggtgtataagaatgtttgtgatttttgtacattgattttgtatcctgagactttgctgaagttgcttatcagcttaaggagcttttgggctgagacagtggggttttctagatatacaatcatgtcgtctgcaaacagggacaatttgacttcctcttttcctaattgaataccctttatttccttctcctgcctaattgccctggccagaacttccaacactatgttgaataggagtggtgagagagggcatccctgtctgtgccagttttcaaagggaatgcttccagttttggcccattcagtatgatattggctgtgggtttgtcatagatagctcttattattttgagatacgtcccatcaatacctaatttattgagagtttttagcatgaagggttgttgaattttgtcaaaggccttttctgcatctattgagataatcatgtggtttttgtctttggctctgtttatatgctggattacatttattgatttccgtatattgaaccagccttgcatcccagggatgaagcccacttgatcatggtggataagctttttgatgtgctgctggatttggtttgccagtattttattgaggatttttgcatcaatgttcatcaaggatattggtctaaaattctctttttttgttgtgtctctacccggctttggtatcaggatgatgctggcctcataaaatgagttagggaggattccctctttttctattgattggaatagtttcagaaagaatggtaccagttcctccttgtacctctggtagaattcggctgtgaatccatctggtcctggactctttttggttggtaagctattgattattgccacaatttcagatcctgttattggtctattcagagattcaacttcttcctggtttagtcttgggagagtgtatgtgtcgaggaatttatccatttcttctagattttctagtttatttgcatagaggtgtttgtagtattctctgatggtagtttgtatttctgtgggatcggtggtgatatcccctttatcattttttattgcgtctatttgattcttctctctttttttctttattagtcttgctagcggtctatcaattttgttgatcctttcaaaaaaccagctcctggattcattaattttttgaagggttttttgtgtctctatttccttcagttctgctctgattttagttatttattgccttctgctagcttttgaatgtgtttgctcttgcttttctagttcttttaattgtgatgttagggtgtcaattttggatctttcctgctttctcttgtgggcatttagtgctataaatttccctctacacactgctttgaatgcgtccctgagattctggtatgttgtgtctttgttcttgttggtttcaaagaacatctttatttctgccttcatttcgttatgtacccagtagtcattcaggagcaggttgttcagtttccacgtagttgagcggttttgagtgagattcttaatcctgagttctagtttgattgcactgtggtctgagacatagtttgttataatttctgttcttttacatttgctgaggagggcttttcttccaagtatgtggtcaattttggaataggtgtggtgtggtgctgaaaaaaatgtatattctgttgatttggggtggagagttctgtagatgtctattaggtccgcttggtgcagagctgagttcaattcctgggtatccttgttgactttctgtctcgttgatctgtctaatgttgacagtggggtgttaaagtctcccattattaatgtgtgggagtctaagtctctttgtaggtcactcaggacttgctttatgaatctgggtgctcctgtattgggtgcatatatatttaggatagttagctcttcttgttgaattgatccctttaccattatgtaatggccttctttgtctcttttgatctttgttggtttaaagtctgttttatcagagactaggattgcaacccctgcctttttttgttttccatttgcttggtagatcttcctccatccttttrttttgagcctatgtgtgtctctgcacgtgagatgggtttcctgaatacagcacactgaagggtcttgactctttatccaatttgccagtctgtgtcttttaattggagcatttagtccatttacctttaaagttaatattgtcatgtgtgaatttgatcctgtcattatgatgttagctggttattttgctcgttagttgatgcagtttcttcctagtctcgatggtctttacattttggcatgattttgcagcggctggtaccggttgttcctttccatgtttagcgcttccttcaggagctcttttagggcaggcctggtggtgacaaaatctctcagcatttgcttgtctgtaaagtattttatttctccttcacttatgaagcttagtttggctggatatgaaattcggggttgaaaattctttctttaagaatgttgaatattggcccccactctcttctggcttgtagagtttctgccgagagatccgctgttagtctgatgggcttccctttgagggtaacccgacctttctctctggctgcccttaacattttttccttcatttcaactttggtgaatctgacaattatgtgtcttggagttgctcgtctcgaggagtatctttgtggtgttctctgtatttcctgaatctgaacgttggcctgccttgctagattggggaaattctcctggatagtatcctgcagagtgttttccaacttggttccattctccccgtcactttcaggtacaccaatcagacgtagatttggtcttttcacatagtcccatatttcttggaggcttttctggtttctttttattcttttttctctaaacttcccttctcacttcatttcattcatttcatcttccatcgctgataccctttcttccagttgatcgcatcggctcctgaggcttctgcattcttcacttagttctcgagccttgcttttcagctccatcagctcctttaagcacttctctgtattggttattctagttatacattcttctaaatttttttcaaagttttcaacttctttgcctttggtttgaatgtcctcccgtagctcggagcaatttgattgtctgaagccttcttctctcagctcgtcaaagttattctccatccagctttgttcctttgctggtgaggaactgcattcctttggaggaggagaggcgctctgctttttagagtttccagtttttctgctctgttttttccccatctttgtggttttatctacttttggtctttgatgatggtgatgtacagatgggtttttggtgtggatgtcctttctgtttgtcagttttccttctaacagacaggaccctcagctgcagatctgttggagtacccggccgtgtgaggtgtcagtgtgcccctgctggggggtgcctcccagttaggctgcttgggggtcaggggtcagggacccacttgaggaggcagtctgccccttctcagatctccagctgtgtgctgggagaaccactgctctcttcaaagctgtcagacagggacatttaagtctgcagaggttactgctgtctttttgtttgtctgtgccctgcccccagaggtggagcctacagaggcaggcaggcctccttgagctgtggtgggctccacccagttcgagcttcctggccgctttgtttacctaagcaaacctgggcaatggcgggcgcccctccgccagccttgctgctgctttgctgtttgatctcagactgctgtgctagcaatcagcgagactccgtgggcataggaccctccgagccaggtgcgggatataatctcctggtgtgccgttttttaagcccgtcagaaaagcgcagtatttgggtgggagtgacccgattttccaggtgctgtctgtcacccctttctttgactcgggaagggaactccctgaccccttgcgcttcccgagtgaggcaatgcctcaccctgctttggctcgcgcatggtgcgcgcacccactaacctgcgcccactgtctggcactccctagtgagatgaacccggtacctcagatggaaatgcagaaatcacccgtcttctgtgtcactcacgctgggagctgtagactggagctgttcctattcggccatcttggctcctccccctaattattgtcacttctatacattattttagatgctgtgtatgactcatctagttggacttttatattgtaaaattatcttcaattttaatcactgtctgcaaagcagaatgatctaaaaacgaattccaagtaaaatagtagagaagaaaaattcagaatgtagaccaaattgcttaaagatgcttaagggtttgtaaaaatatcccatgatgcattgcagttgccaattctggacagttatcagagatkcttattttcaaacattttcttgttaaccatatttctggccaagttggttttaggaaaatcacctggagttagaccatgagccttagcattagaggactgagaatatacactgaaggyacacaatagtgttggaaaaaacattatttgccaccttcaaagaataagagtagctcatgttcacaaaaatacttttttttgcaatgccctgatttaagtgctgacatgtaytaatttacttctacctcttaacagcatgttaaggtaattactgttagtggcacggtaacttaaccaaggtyccagccaataagtggcagaacctgaattacaaacccaagggggctgaccccagagcccactctttttaaaatgacatccttattgactgggcgtggtggctcacacctataatcccwgcactttgggaggccgatgcaggagkatcacttgagatcaggagtttgagaacagcctgaccaacacggtgataacctgtctctactaaaaatasaaaaaaattagctgggcgtggtggtgcatgcctgtaatcccygctacttgggaggctgaggcaggagaatcacttgaacctgggagacagaggttgcagtaagccaagatcatgccactgtattcctctagcctgggtgacagagtgagacttggtctcaaaaataaataaataaaaataattaacatccttattaaaatatgcttcacggcctggygaggtggctcacacctgtaatcccagcaatttaggaggctgaggcaggtggatcacaaggtcaggagatcaagaccatcctggctaacacagtaaaaatcccgtctctactaaaaatacagaaaaattagccaggcattgcaggctaactgtggcaggtgcctgtagtcccacattgcaggctaactgtggcaggtgcctgtagtcccagctactctggaggctgaggcaggagaatggcatgaacctgggaggtggagctttcagtgagccgagatcgtgccactgcacttcagcctgggcgacagagcaagactgcctctaaaaaaaaaaaagaaatatatatatatatatatatatatcacatgctacaaaatttacaaaattcactcctttaaagtaaagtacacaattcaataatttttagtatatttttatttatgtattattattattattttgagacaggttgtctctcacccaagctggattgcaatggcaagatcatgactcactgcagccttgacctcccaggctcaagcaatcttcccatctcagcttccctagtagctgggactacaggcacacccaccacacctggctaatttttaattttttttttttgtagagacaagatctcactatgttgcccaggctgctcttgaactcctggcctcaagagattctcctgcctcagcctcccagagtgctgggattacaggcatgagccacggcactaggccatttttagtatatttgtggtcttgtataaccatcattatcatcagattccagaacattttctctcccctctgccatacctattagcagtcactccccatttctccaactctggcaacctcgaatctactttctctctctatggatttgccagttctgatcatttcctataagtggagtcatgtaatatgtgaccttttgtgtctggcttccttcacttagcgtaacgtgttcaaggttcgtccgtgttgtagcatgtatcagtacctcattccctttcattgatgaatgatatttcattgtgtggataaaccaggttttatttatccattcatcagttgtacatttgggttgtttccatttttggctttcatgaataatgttgtwatgaacattcaggtaaaagtttttatgtgaacatatgttttttatttctcatgggcatatatttagagtggaatttctgggttgtatggtaactctatgtttaatttcttttgatgaagtgccaaactgttttccaaagcagctactccattctgtattcccactagcaatacacaaaagttccaacttcatattcttgcaaataacttttattttctgttttttttttttttttaattattattgtagccatcctaatgggtgtgaagtggtatttcatggtgggattaattttcatttctctaatgaccaatgacgttgaacatctttttgtgtttttcttggccctgtgtatatcttctttggcaaaatggttattcatatttttgtcccattttaaaattgacctacttttgtattgttgaattgtaactattctttatatgttctgcatataagctctctatcatatatgtgatttgtaaatattttctaccatccatgggctctcttttcactttcttaatggtgttctttgaagcactaaagaaattaatttttataaaatccaactttttaattatttctttggatgcttatacatttggtgtcatatctaagaaaccataacttgatccaaggtcacaaagatttgctcctctgttttgttctaagtgttttacaatcatagatcttacatctaggtctgggattcattttgagttaactttttatgtatgtatgaagtataaatagaaatggagaagagagaaaaataagagagcgaataagagagaaaactaaaatcatcttattgattatctcttgtacatggtaaattatttttttaatgttgtcttaaagattctttgtttcactcaggtctgagatttgaaaaagaaaaaaagtaaaaaagagattctctatttgtcttcagcttttgacagtttgaatatgatgtgtctaagtgtagatatcttaagtttatcctacttggagtttttgaactttttcaatgtacataataatatctttcattgaatttgggaaatttttggctatcgtttcttcaaatattctttctgctacttgctctctttcctcttcttctgggactcccattaggaaaatgttaatatacttcatcaactgcataagtaacatctcacctgtttctggggctttgattttgttttagttttttgcttctgttattcaaattggataatttcaattggcctaccttcaagttcattgattcttctttctgcctgcttaactctactgttgaaactagtgaatttttcattttggttattgtacttttcagttccagaatttctatttggttccttttcataatttctatcttttcattcgtattctctatttgatgagatataattctcatggtttcccttcagttctttgaacatatttataatggctaatttaagatctttgtcttgtaagtccaatgtcttagctttcttaataccaatttctcttggctgcttcctgtgtatgggctatacttttctgatcctttctgtgtcttataatttttgttgaaaactgaacatttaaaataatataatgtggcaattcttaaaatcagatttcctgttctctagcacctattgttgatgtttgctgttgttgttgtttttgctgctgctgctcgtttatttagtgaccttcttggactaattctatgaagtctgtttttcttgtcatgtatggccactgaagtgagctgagttagcttagtggtcatataacaattggacagagatttccttaaataccttgggccaaaagctccccagctttagccaagtagcgttgtgtgtgtgttggggaaagtctttaattaacccgcaggcagtttaaaattcttcattagccttcacttcctgtgtggacagagcctcaagatcaaccagagatgagagatgaggaccttcctggggcttttcttttgggcatgctcacagccctgcacatgtttgtggctatctatgtcagagtttttcaaagcctcctatggacatcttattccctgttttttctttcaaagtgttttggatagcccttttttagtctcaagtggtattgccccttcaggcattatgatgttaaacatttgcttctattttatttttatacattatatgaatagggctgattcagaatgagctgtgaatcagatcaaataaaaacaagccctgagaatggagcttttcagagagctgccaggcaagttaagcagtggcaatttggagagaaagagctttcggagtgttcaaaactcattttctctccttcattggtttctaggctgcaagtttgcaaagctactgaggctactggtttttaagactactgtggaggtggggtgagaataaggcaaattaaaactccacaaagtcactcttcttactgagatttatgtttgtttgtttttttccttgaataaatgcccctcagattgttgtttgcttcacttccagagttctggaaaggtcagctgtgatcatatttgcaagtgttctcattgctctatggaggagcagatttccagtagtccttactctgccactctggaggtgtttcccagagcccactcttaaccactacacaagtgcttcctaccacactgctaaggtgctttacattttgtaagaatatttttggcatctagtagagtcttcctgacatatatctgctgaaacacatattattgtatgtatatccttttatttctccatttctcccatacattacggggcatgatattgatcttttagaaaattatgtatgtagaaagccatctatggatttagtttcagcctaatgaaggaatgtaaaaaatatttgcttaaaaacaagaagggggcattgctctttgaaggttggaaatcactgccctacactctcctcccgttcctctcaggtacccatccattcctgctgctggaatgtctccaaagagcgcctgaagccctcattccactcaagtctcacttgagagtaaaccaaggggagtttgggggtaaaatgtcagaggtcattgtaataacttcttgggaaattaggcagaaagggaaaaaaagtgggaatcatttaataaaccacatagaaaacactccatatggcaatggaatcatgttctggttaatcataatttttgcctacaagagtcatcatatataccgttagaaggttactagttttaaagtaattagaaactaataaagtatgcaccgcctaggctatactgaatgtaatgtaattccttttggtaattaataatacctctaggaacacgttacaaaaataagagccatcagctgtagaatatcatattcataaatagtttataatgcaaaacagtaactttggtacctactgggtctattggttggaattcttttaacccttttcaataattatggagacacttgtccagaatttattatataaacttttttatacattagacttttacaaacaaatgctctcaaaattcaatattttcttcatgttcagtcaggatattaattcctagcttgctatgccagagtggtaaaagggggtagggcttcattttcaaaatgaacccagcaragggaacccagaagtgctcagaaagggctttctgctaactaatgatggcaaacgtggtctgtgtgatggggtggcatctactttctgaaaatttttaattttaatttttgttgttttcgttttgttttgttttataacttgtgttttatttttgccaaatttggtttcattccctgcctgttccatttggaggtactacactaaaaaaaaaataataaaacacgtaatcacaccatggggaaaaatgaaaggagaagaaaaaaagaaagctggataatcagcccctaattttctaaaaattgctattaacaaagctgctktacaattctcttgataaatatccaagaaatctgttcttggaagcttaagaagagagtggaaaggctgtactctcaggactaaggaaggactcactccctaaagactttgtggatggaaatttgttcagtactcctgtagtgtgtatgtgagtgaggacatctggactggtatctagccaggatgccctggtagaactgcatttagcgttgatgtcctttccgatgggttgcaacatccatttggttcatgcctgtgtctgagcacttattaatggttttgactatcactcctactacacatacacctcatagtttaatggtggaagctacagcacctgtccaagtgcacccygccatctgcaaccccctccattgaggtctcttgtgctatatcagactgtatttacacgtgacttctcagtgagacttgcaaaaccccttgccttcacaggacaagtaagaataaacacattcatttcttcttttttcttggcggtcagttgattcctacaacagcatcctttactgagctgggatgcccatggcgccctccatttatctcccatatagcattgctatgcaaatgaggccattcatgactggctacccagggcttccccaggtggctcccagccagagggatctgaagcagctgagcctcagagaggacaggggccctggcctagtctccacctgactggactgctggcctttgacatgacgccagttaacatccaaatgccccttgctggtttcagcactccaacaggctcaaacaatgaatagctgtattctgaaatagtgtcatgctcgcagctccatcaaagattcctgcagcatgcctctttcctctgaataattcctttctgtcatcttccttcattatatttcctaacaagtttttttctaagtccaggctttcatttccactttgaaatgtcttgttagacaagcctcagagtccaccaaattgttcccacttctttccaacaactcccaccccatcctatccccactgcccctgaaatggccagagcttaataatccaggatgtcctgtcattattgtcaacaatattgttgtctgtattcggaatgtattagcagaaccagagaggtagggctacacccatctgctacaaatacacaaatgatttgcaagatagacagtgcctttctttcaccccctgccagttttgctatgaaagaattcaaacccttggtttacagttgaagttggtccaagacatctcctccagggctttctcttgatcttatttgtgctctcccctgagccctaataaagctgcacaaacaaaattacaagcccatatctctttcttcccttttaagaactccttttctctgaaacatttctggacagatagattgtaaatgagatgaccctgtggactgtttaagcagttagttagccaagttaaggtcagtaaaggactccttgtttaaattaaccactttattttcttcaaacacatagcaccctgaagcccatgttggtctcagctgtgttctctgtccagctcttcaccaccccataggctcctatacctctggatatgaccttagccagaaccaagacagattttgaactactgtgctctactgggttttggtaaaataaatacataaataaataaatagtcctcagtgtttcggagggaacctaatacatgtttattatgcagtattttaaatgttgcagaaaaaataccaaagtaagaagtatcyattttctaactactcagaacatctgtaacatttccttaacccttctgtaatatgtctctttgtgtgtcgtatgcatgtttttaatgctgcataccaaagtaccaaagtaccacaacgtaacagcttaaaaaaacacaacttatcatcagacaattcctgtgggtcaggagtttggtcactggttgactgggtctctctgctcagggtctcagataactgcaatcgatcagtgttggctgggactgttgtcccatctaatgctcagagtcctcttccaaattcattgaggttcttgaaagaattcagttccttgcagctgtagaactcatagatgcttctatcttctttgaagccagcaggagaatgtctctgctgctttgaatccctgacttgctctgtctctgatctctagacccagacttaaaaggctcatctgatgaggccagacccacctgataatctaccttttaattaactcaaagtcaacagattagtaaacttaattacttctgcaaaatcctccttgacacataaagcaacatagtcacaggagtactagcctgttctgtttatagatttcacctacactcaggggagaaaattatacaaaattatgcaaaaggtagtgggagtcatttaaaattctgctctgcatgtgattttgaaacactaatatgccatggatgtctttcytgcctagtcaatatagatctgcatttttatggctgaatagcattctattctgtttcaaaatacttgatcacatgttggacagttaggctgcttccatgcttccactttccctttcttacaccatgatgaacattcttacataacacacttgtctttgcatttgtatgattatttcccgtgtacaaattcaaagcacatggatttactgaatcacaacataaactatgacgtcccatgtagggtcccccagcaggggatggtgctgctgttctagtgaagtactgcctttggtgaaggttctctgagtcctttgtaccaatactgctgaattattagcatccttgaaaggagttctaaaaattactagctgtcactgcacggaacacacaggaagaaacataaagcagagatgtgttcttcacttgtcatctccatcgttatcctcccaaaggttgttctcatcttgattaaacaagtctcaatgaaatgaggcctttattttgatttctatactgcttctatagaaagaggcaacaaggagatttagaatttttttactttaaagggacacggtaccttttgactgtatagtgagaacttaagtttcaaatgaaggctccgagaacataaaaaaccatgaatcttaaagagaaacaaacaagcaaargtttaataagaacttccttgctagatgtcctcatgatttatttagccaacacttactgagcacctcctaatgactgggccctgctctagtgctggagatgtgtagaagaataagaccaacagagctcccaaagkagatttatgcactctacaaatgcatgatggaattgcaagatgaaaacagaaaaactcttatggatctagataaagaagctttagaataaaaagtagcatttcaggaatcagttggtattttccaacctggagaatcagtagatgaaattaggaaaagtctgtacggaaggaataagtgtttgagatcaaatatacaacatgttgkctatagttaattatactatactatatatttcaaaattgccaggagagtaaatttcaaatgtttgcaccacaaaaataaatatgggaggtaakcgatatgttattaacttaattatcctgcaatgtgatttgattttatatatatatgtaaaatcatcactttgtaccctataatatatacaattatacaattattatgtgtctatttaaaaaattaaagatatgctaaaggaagttttccaacacaaagggaaatgacactactgtatattgaaaattagatcctctgacacgtatgaattgcagcaaaaatgctaaatatctgagaaaaatgctcacgcctgtaatcccagcactttaaaagactggggcaggaggatggcttgaggccaggagttcaataccagcctgggcaacatgagaccctgtctcaagaaaacaaaacaaaacaaaacaaaaaacaggaaaataaatgtctgtaaacattagcctctttcatggaggaacttgggatataaaaaactgagcatgcttaaatagaattgtgtaatgtcagccaaatggaaactcttgaggcacgggtggcttaggacacaattcccctagtcattcctgagtagagaggattgcatggtgaaagagatccccatggctgtggaggtagcaccctctcgttctcttcatgggctgtctgggagctgagccattagctttccacccattgatggaggcccagccctactgggagcatttgcttcctccccacctcacccactgcctgcaagttcctgaccctgttatgaaactcccaccctaaatacacagataacgtctcagccatgagtgaaactagaagagatcatgtgtaactaattagatgtcagagtgagagaaaagaaacttttccccgggtcctggtcatttgaaaagaaatattatcctcaaagaaaagtctttacttgagatctgaagtgcaaagcatatttatcttgttccaggctaaccttgccaaggatatttgaatttaaataaggctattctggagcctattaatctagggtgatggtgtagcagtgaaagccagggggtcactaaacacttcgggtcgtataggaagcaggacggcgtccattcagggttgcaaatgttttattgctgtttttccctgggtccttctgcctgatggggcaaccttcactgctctggagagaggctagcagagtcattgtctaacatacacagtgacctcccttccagcttccaagcaaagatggaggctctcaggtgggaactgacctcatgttcctgctcagagacctccacaccttcaccctaatccacatctgtacccttctctccctgcagaccctgccttgcttcccacatctgtccagggtgttgctctcagcctcatcctcttgcaaccttggtatttcagctcccttttatattcccactgtctctaccttcctccattcctccatgaacatgcctcagtctcttttaatttgaaaataaccgaaacagacttccctgcattgcattacatgctagcccctgccctatcttttcttctgtcttacaacctagatcacttttttttttttttttttagacagggtytcactctgtcttccaggatggagtgcagtggtgcaatcatggctcactgcagccttgatctcccgggctcaagtgatcctcccactcagcccctcaagtagctgagactacaggtcagctaacttctttaactttaatagagacagggtttcgccatgttgcccaggatggcctcaaactcctgggctcaagcagttctcctgcctcggcctcctaaaatgctgggattactggtgtgagccactgtagccagcctctaagtcactcttaaggaagaagctacctctttcttccctcctcattcatttgtcagctggctttgcccagccctcctccaccacccaccaatactcccgcaacctcctcctccgcttcatccaatccagagcatcacaagtgtagacaaaaatgcctcttaggcctcacctcctgggtttcccacaggcactcaagctcatcctgcccagaattgggctggtcatccacccatcaccaccagtcccaacacagactttcttctcttccttttttattcacagtcttggtaaacaaaaccatcatactacttggacaggcaaaagtcttccccaactcatccgagtccctcacatctccctaaacctgtgggttgtatccccaatggcttctctccctctccatggtgctggccacctgaatgcctttctggtccactattgcagttcttcaggggtgggggacagccggggaggactcagctcaatctccagccttgcctctccatccatcttccacgaacagagatttgcaaatttagatcttcttcttaaattattccaatggctttttatagcctaagaataaagcatgaatgtttartttgatatcaaaggatttcacaatcttatcctyacctatatcataggtcagtgttgaagagtgtggatttcagagctctatcactaactagctgtgacctcagcaaggttcttaaccttcctgggtttcagcttcctcccctgtaaactgggggtaattataatagtactgttctttttttttttttctgagatggagtctcgctctgtcgaccaggctggagtgcggtggggtgatctcagctcactactgcaagctccgcctcccgggttcacgccattctcctgcctcagcctcccgagtagctgggactacaggtgcccgccaccacgcccagctaatttttttgtatttttagtagagacggggtttcaccgtgttaaccaggatggtctcgatctcctgacctcgtgatctgcccgcctcggcctcccaaagtgctgggattacaggcgtgagccactgcgcccgaccaatagtactgttcttatagggtgctagggacatcagatgtgttaacatccatgagggttttagaacaccacttcgcactaaggaagtgttatatgtatttgttagtttcgtgcattgcctgccatcaccgttctcctatgaacctgaatgttcaaacacgctatgctccagccacaacacacagcagacagttccacaaacaaaccatgatggctatttcatgccgctgtaactttgttcttcctccttttcttgacctcctaaattcccatttatctttcgagcctcagctcaaacatcacttcccaaatacctggagactttgctccactgagactccatggcaccccaaatcaacacccgttttaccagggatcatttaaattaattatttttcaaagcctgagagttaccatttttgagcacttaacacatgccagtctgtgttcgaaatacatgtattagcttatttaagtctcacagcaaacctatgacagttttgataattggtttacaggtttgtcatttctcctagaagattaccctttatgggtaagaatctatgttttgatcatctctgagtctccagcacctaccaaggtgcctggtgtgtagtgggtacatagtgaaattaatatctcttgaaccaatcaaaaatgggctgcactcagagaaagatgggagcatgggcaaacagctgacatygaagggcgtctaggcacggaacccgtggtagttgaacctgaaattcatcagtgtcataaacaaagactgctgtaactacctcaccacattattaaayctttctttattactatatgaacattttctatagtgctgaggggttaatgtgctctcatttgattctgtactgtcatataatttcaggtcttttcaaggacataataatacaattcatgatggcattttattccatgctcttgcttccagggtcatattcaaatttctgagaagttttccatgacccttagcacttttaataaagggtaaagagagattcaccctgacaacgtattcttcttgttggacacgagatggaaattgtagagaattatagtcaggcataattgttgtagtttctacagtaatagtctaagaccacaaacacaagtattttttgcttaattgctacaaaggaatatgctttttctaaataggaactatattaaaaagttcaaaataaatatttcagttttggttaacttttcttccccaccctgtcggyacctagtaagttctgtttcgttagtsagcagaaaatggttaagattaaaactgttcaatgcactgattcaaatatctttgggtggccttgaagctgctcttagcagagggaaagagacatccagccatktgagtgtcctgagggatgccaatgagaatsaatctgcccagaaaacccaagtctagagccccaggatatctccaggagccctcagatttggcttaatccattctaataatctgtagatagcatatgcacaggatttggggtcacttttttttttttttgagatggagtctccctctgtcaccaggctgaagtgcagtggcacaatctcagctcactgtaacctccatatcccagattcaagcgattctcctgcctcagcctcccaagtagctggractacaggcacccgccaccacacccagctaatttttgtatttttagtagagacagggtttcatcatgttggcaaggctggtcttgatgtcttgaccttgtgactcacctgccttggcctcccaaattgctgggattacaggcatgagccactgtgcctggccgtcacttcttgatctcttggagcattgggtgtgatgggaagtttaacctttctgggcttgtgttttctaaggaactaccactgctggaatgaagcatggatgacaaggcctgaccttcctgttggatttggaggctggcaagctgtggacagcacccccyaggaaaatagcgatggtaaaactgtgtcctccctctgggaacttgcttcattgctgatytttgttttgcttttatgcttgcatttgatgtgtgggaaccacgcccattgggaggcaacatctgaagtgtgcttcctgggcacatgtacagtattagctaccttccaatcaggtttaatttcatttccattgtcagctttaccctgattattttacagattttagagaaagaatataaaacaacgtataattcatccattcttgctttgctaagcagttttgaagacaggagagaaaatatctgtaagcatttttactaggctataaaatatacttcagccctttgtggtatgcactggtaagatataaggcaggagagaaaatagagaactcgaaaaataattatagatcatcctttaaattgtttttccagaacctrgcctccttttatgtcatgtgatttcctccaaagcttcagtatgtgggtatttgtcttctaacttgccaactatgctaagcagctgcagctctgacctcccccagatttttataaaatcacatcataagcctccatctctctttaatatgataatataaagaatcagtagactgtggatattatgtttatttcctcaggtgttgatatatcgatgggcacacacaggaacatgcataaacattcaatggatattcatactgaaaccatattataatcctaggctttaaggaagaaagtttagcactttctggtgttctggtatatatatcatggggacattttacaggtgactaatagcagctaatctcttattaactatatagataggtggttaaaatttaaagcattttagaagagtaacataggccytctgacttcctaaatgcatggtgggcatggccaaaatgcacaggcaatgtccaaattctccagttaaacttgacatatgttcataatgtccaaaaacaaaagacaaaaagcaaaacaaacagcaacagcagcacaaccacagagcacacatcaacatttccaacatttcagataccacctgaacaagagataaatgctgtgtaagccacctgcttggcatcaacacatctgggtatgtgtctgtaggtggcagagtagatgcaggaatagtgttgccttgtatttatttccatggcttcaatttttggcttgagggggcatagccaatggaattctcttcagccttggaaagcatctgggctaaatcagcaatgaagttgggaacactggtctttacagagtcaccctcagtgccatgaatcttgcagtatctggacagaattggagatgacaaactcacayygcccttcctctgtgcaatgcaggcatgtatcrgtgtggccccgcctcggttcaagccatcaagcacrgccatgtctgcttccaatttgatgcaccttttgtttttgcagaggtaagcaggaagctggaggaaagtgctgtttttytccccaacctcttaacacatgaaagagtaagctaaaagttgttgtttctaagttttccaggtacatagcrtatgcttcgtgttgacaaaggtaactaggcattattccaacttccaggctattaatgctaaatgcagttcttgtttaacrtttttctttccttgatgttttgggattccctactcccaaaagtaaatgctttactaacattagcttagttctctgcacccattaagtatcaactgctccagagaaattatatgactaatggatctctcaactaacctcattggaagagatgggtcatgaattgaaatttcaggacatgccacttccctctgggactagtccagcaatccaggtaagacaaaatccacatacacacacccaaccatggtcttaccctggcctttgcaatctatgtcctgccatcccacaccatcacctgtggccagggagggagggttgagttgccaaaggaggaaggggagcctggaggctactctaagagaggaatacagcccacctacagggttgatgggaatgcctgggcaaaggctctgccatttcagaagaactaggcagggactggaagcagaacaggctgttaaaggatactcaaggagagctctgaaaatcaaattaaatgtaagagatgttgggtaaacgagaaggctgggctgccggcctaggaagacttgaaagactgagaggcaggacttccccagggtatatttgcaccagtaaatacactgaaataatgtctttcactttgcctaccattggatgctcttagcaaccttctaaaattgataattcttcccattttacagaaaataaaatcgaggcaaagagtgattaagtgactttctcacaaccatctagctaataaatagcagtgctaagatttgaagccaggcagatacctgaatgcayactggtaaccattgcactctagtactccaggaggaacaaatagttattattaatgtacaccaggcattgtactggggggaattctaaggttcragtctttaagaaacgtatttctagatgccaggtgacagggcacaaacacactgaacatgaaataacaacaatacttgtcaggtgggccatgtagagagcacagatctgcattcatatgatgcatgagttgggaagtagaggccaagaactgaagcaggatggcaaagaccacaagacaccatctaggaaggaagggcgacctgggaacagacagtgaggatgcctgtggaagtgtccccaggtagtaagagcagagaactgtgggaccacatgggaaggagggatgattaggcaaaatgattagaaagaagccagaggaagggaggagtgcaaagcagggggatgagttgagcatctgaaagctttgtgggggcagttgaaagctgtgcagactcactagaacgccaaggatgcatcaggggtgttggaaggtggaggctgaaggaacgcagtgcagaggacctccctgagagacttgctccttgtccctcctgtaagtgagggagagttttcactgggtgggaacttgggcaaggtgctgacagccttgtggaacacggattggaggggttgttatgaagttgtggggaacatctagagggctggtcatccctccaagccagagatggaaagggcatgagctagacaaatggcaataatgaggaaaagaggaggcaggactgagaaatgttaatatttagaaagcaaaacgaacatcaaaattcagacagcaagatcaggaatttgaaacacacaaaagaccagtgttcatctcatcgtacctgcygtggcagtttacagaagcctttggagaccaagcttactggacttggaattttatcccctcgttttcactttgggatttgaagatttccacaaacctcccagctgtcatttgatagtttatgatgctacgagagcccctaatgaggagatcactctgaaatccacaaagccttgttttcagctttttattacactttattgctgcaaagaaggagaagraggacctccctccacaagcaagctgcctaatagctgtaaatgcaaacactttttgctattattaaatatagatcggggtgttatgaatgtcatcaggatttgcagattataattactcctttctcacccactgcagaggcgtgtctgacagagggtacaatttgttgctttggcatgggctgcgctccaggggctgagccattttkaagagatgtttgagttgatgaaaagtgtatgaggaatcttttctcaagggtgcctgcagtgggaccccatggggagtgtcatatgagtcgatatgactcaggttcgagtctgtggctctctctgctctccctcgtccttgctgcatcagctcgccttctcttccctcccagcatgctgactttcttggtcattccttactcatttccaggcttgatcaagcatcatgttcattgactgttttttagtgttcccagggccttagtctccatgagtgaaagcagagcctaaaaagaagaggggtatgcctggaaaatgtcttaccttctgttccttttttctctcctcctccactttggaagttcaccctccacatttctgggtttctgccagggcttgaagcttatttctcttacccctcccttcccatgtcctccctgctgcagtgggttcctgtggatctgaagccccatctgcctatctccccagcttatggtggcctagggcttccaaataggtgagaggagatgagagctgttctaagcgtctggagtcgtattccaagattccatgttcacgaagccctcaggggttcttagtgaagaactctctccttcttgccaaagataactctcttctgtcctaacttctcattaactctgctgccctctttcacaccactccaccccaaactcactcacatacacacacacatgcatgcacacactcctgcctgccctcactggcgctgagatgattttgacaggagcaataactggctccctgggaccacagcaaccatctcatcactcaagaagctaagccctcctctgctgtgggccagcagttctcttatacaacgtgtggagatgttttcctgtagattattcattctcaattcaaacttatttattttgctactatcttatcagatgcagcctatttttttggcatctcctacttggctataaaataatccagtcatttattcaaatagcatacaaaactytggaattattttagctttccttcttaacctcccttatgcatcttgccaaaaataccttcccaaaattatcataaatccagccacttctacaatctctatcgttaccctctgagctctgtacaacactgagctccataaagttacctcctaactcctcctaactcatctccctgatccccctcttgctccttttctgtctattccccacagagcaagagaattattctttaaatgtaaatacaaacatcacactcctgccccaacccttctggtggagttccaccacccttacaataaaactgaacataaattcctacaagattccatggcttcccttccacttcatcccttgtttatttccctccagccatactgagatttttctcttcrgaaagcatccacacatcctcttgtgtcagcacttttagacatactgctccttttgctaggaaagctcccctcactatctttcactctgtgtaggaagaatgctttgcatgctttgttccctctctgcattcaagtctctgctctggtcacctcttcaaagaggccttcgctcacccaactscacctaaaatatcaccatctgccctgttgttttcatcctccaaccttagtgtgtactccatttctcccttctagaatatgagctccatgaaggtagaagctcttgtaaccgcattgctgagagcaggatctagggtccagtgccaggaaggcattcactgcctccatatgccctctgagaagcagcattttctctgcagagcctgcagacaaggttatctccacttggaaacaaataaacaaaccaaagcaaactctgtccagggtcctgaaagcaagagcacgtctctagcctcagtggtgaagagcatatcttctgccacctgtggacaaatgttcacattctatgggcccaggtggacatttgcagagagcagcccccaagcctgctttccaccccacctttactgagaagctagggccctgaccaatggtagaggctactatgtaggaagtgcctgtacttaagaggcaagggtgtggtgttgtgaaaaaaatatccaatttcatgcaccaatgcccagattttgtgtgatgataacccttcaagtgtagggatagaaaaaggggatcactaacattacattcaaaagaaggaagaaaaattagccgtaaatgtagggctttcacaagtagtaccaatctatccaccagcccgacaaggaaggtaggctcagagagattcagtaactcggagggaggagccaagatggctgaataggaacagctccagtctacagctcccagcatgagtgacgcagaagactggtgatttctgcatttccatctgaggtaccgggttcatctcactagggagtgccagacagtgggcacaggtcagtgggtgcrcgcaccgtgcgcgagccaaagcagggtgaggcattgcctcactcgggaagcacaaggggtcagggagttccctttcctagtcaaagaaaggggtgacggatggcacctggaaaatcgggtcactcacacccraatactgcgcttttccgacgggcttaaaaaacggcgcaccacgagattatatcccgcacctggctcggagggtcctacgcccacggagtctcgctgattgctagcacagcagtctgagatcaaactgcaaggcggcagcgaggctgggggaggggcgcccaccattgcccaggcttgcttaggtaaacaaagcagccaggaagctcgaactgggtggagcccaccacagctcaaggaggcctgcctgcctctgtaggctccacctctgggggcagggcacagacaaacaaaaagacagcagtaacctctgcagacttaaatgtccctgtctgacagctttgaagagagcactggttctcccagcatgcagctggagatctgagaaggggcagactgcctcctcaagtgggtccctgacccctgacccccgagcagcctaactgggaggcaccccccagcaggggmacactgacacctyacacrgcagggtatwccaacagacctgcagctgagggtcctgtctgttagaaggaaaactaacaaacagaaaggacatccacaccaaaaacccatctgtacatcaccatcatcaaagaccaaaagtagataaaaccacaaggatggggaaaaaacagagcagaaaaactggaaactctagaaagaagagcgcctctcctcctccaaaggaacgcagttcctcaccagcaaaggaacaaagctggayggagaacgactttgacgagctgagagamgaaggcttcagacgatcaaattactctgagctacgggaggacattcaaaccaaaggcaaagaagttgaaaactttgaaaaaaatttagaagaatgtataactagaataaccaatacagagaagtgcttaaaggagctgatggagctgaaaagcaaggctcaagacctacgtgaagaatgcagaagcctcaggagccgatgcgatcaactggaagaaagggtatcagcgatggaaaatgaaatgaawgmaatgaagcaagatgggaagtttagagaaaaaagaataaaaagaaaccagaaaagcctccaagaaatatgggactatgtgaaaagaccaaatctacgtctcactggtgtacctgaaagtgatggggagaatggaaccaagttggaaaacactctgcaggatattatccaggagaacttccccaatctagcaaggcaggccaacattcagattcaggaaatacagagaacgccacaaagatactcctcgagaagagcaactccaagacacataattgtcagattcaccaaagttgaaatgaaggaaaaaatgttaagggcagccagagagaaaggtcgggttaccctgaaagggaagcccatcagactaacagcggatctctcggcagaaactctacaagccagaagagagtgggggccaatattcaacattcttaaagaaaagaattttcaacccagaatttcatatycagccaaactaagcttcataagtgaaggagaaataaaatactttayagacaagcaaatgctgagagattttgtcaccaccaggcctgccctaaaagagctcctgaaggaagcgctaaacatggaaaggaacaaccggtaccagccgctgcaaaatcatgccaaaatgtaaagaccatcgagactaggaagaaactgcatcaactaacgagcaaaataaccagctaacatcataatgacaggatcaaattcacacatgacaatattaactttaaaggtaaatggactaaatgctccaattaaaagacacagactggcaaattggataaagagtcaagacccttcagtgtgctgtattcaggaaacccatctcacatgcagagacacacataggctcaaaataaaaggatggaggaagatctaccaagcaaatggaaaacaaaaaaaggcaggggttgcaatcctagtctctgataaaacagactttaaaccaacaaagatcaaaagagacaaagaaggccattacataatggtaaagggatcaattcaacaagaagagctaactatcctaaatatatatgcacccaatacaggagcacccagattcataaagcaagttcttagagacctacaaagagacttagattcccacacattaataatgggagactttaacaccccactgtcaacattagacagatcaacgagacagaaagtcaacaaggatacccaggaattgaactcagctctgcaccaagcggacctaatagacatctacagaactctccaccccaaatcaacagaatatacatttttttcagcaccacaccacacctattccaaaattgaccacatacttggaagtaaagctctcctcagcaaatgtaaaagaacacaaattataacaaactatctctcagaccacagtgcaatcaaactagaactcaggattaagaatctcactcaaaaccgctcaactacgtggaaactgaacaacctgctcctgaatgactactgggtacataacgaaatgaaggcagaaataaagatgttctttgaaaccaacgagaacaaagacacaacataccagaatctctgggacacattcaaagcagtgtgtagagggaaatttatagcactaaatgcccacaagagaaagcaggaaagatccaaaattgacaccctaacatcacaattaaaagaactagaaaagcaagagcaaacacattcaaaagctagcagaaggcaagaaataactaaaatcagagcagaactgaaggaatacagacacaaaaaacccttcaaaaaattagtgaatccaggagctggttttttgaaagaatcaacaaaactgatagaccgcaagcaagaccaataaagaaaaaaagagagaagaatcaaatagacacaataaaaaatgataaaggggatatcaccaccgatcccacagaaatacaaagtaccatcagagagtactacaaacacctctatgcaaataaactagaaaatatagaagaaatggataaattcctcgacacatacactctcccaagactaaaccaggaagaagttgaatctctgaatagaccaataacaggatctgaaattgtggcaataatcaatagcttaccaaccaaaaagagtccaggaccagatggattcacagccgaattctaccagaggtacaaggaggaactggtaccattccttctgaaactattccaatcaatagaaaaagagggaatcctccctaactcattttatgaggccagcatcattctgataccaaagccaggcagagacacaacaaaaaaaagagaattttagaccaatatccttgatgaacattgatgcaaaaatcctcaataaaatactggcaaaccaaatccagcagcacatcaaaaagcttattcaccatgatcaagtgggcttcatccctgggatgcaaggctggttcaatatacgcaaatcaataaatgtaatccagcatataaacagagccaaagacaaaaaccacatgattatctcaatagatgcagaaaaagcctttgacaaaattcaacaacccttcatgctaaaaactctcaataaattaggtattgatgggacgtatttcaaaataataagagctatctatgacaaacccacagccaatatcatactgaatgggcaaaaactggaagcattccctttgaaaactggcacaagacagggatgccctctctcaccactcctattcaacatagtgttggaaattctggccagggcaattaggcagaaggaaataaagggtattcaattaggaaaagaggaagtgaaattgtccctgtttgcagatgacatgattgtatatctagaaaaccccattgtctcagcccaaaagctccttaagctgataagcaacttcagcaaagtctcaggatacaaaatcaatgtacaaaaatcacaarcattcttatacaccaacaacagacaaacagagagccaaatcatgagtgaactccyattcacaattgcttcaaagagaataaaatacctaggaatccaacttacaagggatgtgaaggacctcttcaaggagaactacaaaccactgctcaaggaaataaaagaggatacaaacaaatggaagaayattccatgckcatgggtagsaagaatcaatatcgtgaaaatggccatactgcccaaggtaatttacagattcaatgccatccccatcaagctaccagtgactttcttcacagaattggaaaaaactactttaaagttcatatggaagcaaaaaaagagcctgcatcaccaagtcaatcctaagccaaaagaacaaagctggaggcatcacactacctgacttcaaactatactacaaggctacggtcaccaaaacagcatggtactggtaccaaaatagagatatagatcaatggaacagaacagagtcctcagaaataatgccgcatatctacaactatctgatctttgacaaacctgacaaaaacaagcaatggggaaaggattccctatttaataaatggtgctgggaaaactggctagccataggtggaaagctgaaactggatcccttccttacaccttatacaaaaatcaattcaagatggattaaagacttaaacgttagaccttataccataaaaaccctagaagaaaacctaggcattaccattcaggacataggcatgggcaaggacttcatgtctaaaacaccaaaagcaatggcaacaaaagccaaaattgacaaatgggatctaatgaaactcaagagcttctgcacagcaaaagaaactaccatcagagtgaacaggcaacctacagaatgggagaaaatttttgcaacctactcatctgacaaagggctaatatccagaatctacaatgaactcaaacaaatttacaagaaaaaaacaaacaaccccatcaaaaagtgggtgaaggacatgaacagacacttctcaaaagaagacatttatgcagccaaaaaacacatgaaaaaatgctcaccatcactggccatcagagaaatgcaaatcaaaaccacaatgagataccatctcacaccagttagaatggcaatcattaaaaagtcaggaaacaacaggtgctggagaggatgtggagaaataggaacacttttacactgttgatgagactgtaaactagttcaaccattgtggaagtcagtgtggtgattcctcagggatctagaactggaaataccatttgaaccagccatcccattactgggtatatacccaaaggactataaatcatgctgctataaagacacatgcacacatatgtttattgcggcattattcacaatagcaaagacttggaaccaacccaaatgtccaacaatgatagactggattaagaaaatgtggcacatatacaccatggaatactacgcagccataaaaaatgatgagttcatgtcctttgtagggacatggatgaaattggaaatcatcattctcagtaaactatctcaagaaccaaaaaccaaacaccgcatattctcactcataggtgggaattgaacaatgagatcacatcatcattctcagtaaactatctcaagaaccaaaaaccaaacaccgcatattctcactcataggtgggaattgaacaatgagatcacatggacacaggaaggggaatatcatcacactttggggactgttgtggggtggggggaggggggagggatagcatagggagatatacctaatgctagatgacgagttagtgggtgcagcgcaccagcatggcacatgtatacatatgtaactaacctgcacaatgtgcacatgtaccctagaacttaaagtataataaaaaaaaaaaaagagagagattcagtaactcatccagagccacacagcctaagtccaataatccttgccatacactctgaacttatctattgttctaccatagagcgtcaattgattttgggtggggccaatcattccatgcttttttaagctcctagatgattccctagtacaaccagaatagagaaccattccactacaggccgaaaccaaaaagaaagcttgctaatgtcgcttggaaagaataatttccctccacatcccaccccaacacacatatacaaaagccaccccatacaggtgtttctcgtctcctctctccgcaaaggacagtgctgttggtctgtcctgagatttyagcctacaggaatttctgaagccatattcaaggtgggggggcaggaatcagccactttcatattttgcttgtttccctggaaaaccacaagctgttataaggattgttattaagaagttatttatcattattgttgctacgatttgaaagtagagggggtcgctgtttgtacttacatggcttcctccagagggaatkcccgaattctcagacagctcatttaaagcttccaaaatgacaaatattccacaggtatctgctgcgtcctctcctgtcctgattcctgacttcacatttcagcctttcacaacatgtggctagcacccctgagttctggctgctctgctgaggggcagggccaccgtttatcaccctcagaaatctgagccgcaagtgtggaaccatctcaccactcaagctggggctcatgctcccgcagggtggtgtgggaaaggcggtgtgccgtgaaggccaagggccaggttatgggctgtcccagggcttgagctgcttctccagcagctcctagccatgaaaccacaaacactttgcctcccccttctgagtcttggtgccctcatccataatacggttacaatatatacctcacaggcttgttgttgtgaggttcaaactaaatcctttataaaatgtccctgaaacaytgtaggtatgcaacaaatgttggctatctcccccttagtagaaatccgacttcatgtgcactcagaacattctgtgagaaagtaaaattgctctctttaacctcaactttaaaacctagggatatatcttcaagtttccccattacctaatgatgactattatatttttactcaattttgaaatttacaagtcatgttcacatagatcttatctcactctggcctaaaatgctcccataaaattggcagaacaaatttaatcatttttattttatagaatcaggaactgaagttcatagagattaacatgcactttctacaaggacacacccactatcggaacccaggtttcttgcagcaaatctagtattcctctcaaatgccatctaggtttcaccttggctgttactttctagccaacccttgactccactgccccatgtgctcccaaagtatcttgtacttattctttcatggtacttatcgcactgtattgcagggcttctcaagcctgactatctaacagaattatgtgagactttttgtaaaatataatggatttagggcctcacgtgatttaggtcccacctccttaatcaggcgtctatttttgtttaaagttctccaggtgactctgatgcacagaatcatgcttactaaagcataaactctctaatggcagcaaccaaatctattttgttcatcattaggattctgaatccttaaacaatatctggcaatactattcaatattattatcaataacatttactgagcatttactctatgccagacactatgataagtaatgtgtgtgcatttgtttctgttaattctgccaatcgtcctatgaagaaggagttattatcaccctatttaaagagtgggtaactgaggcttggagaggagcttgggaaacatttagtaaatacatcaatgactattagcagtacaattcatgcttcctacctgcttccatgataataactggaaccttcaagaaagtgattataaaatatgtaataaaggactctggtacagtcagctttcaggcacacattagtcattgtctctagaaagtagaatagtaaagcagagccttgggagagcttgggggcagacagcatggccccaagacactatttctgagtcccacaaatagcacattttagttgctgaaccaatagaaaatagcctgaattcctcctagatcatctaatattattgttcaatttaaatacttttggcttcaagtagcagaactaatgtggctgaaacagatggggactgattttctcatataagaaatcctgaaataggtggtcctgatgcgggcttagccatttaacagcatcattaaggcccccaaatccccaaacgcctctcagctttctactctgccaccttctcattgtcagcagtgtttctgttcactgtctcacgatggccacagcagcttcaagcatcccttcacctgaaaacacctgaaaacagctgaaagcagaaggggaaggacaaactcatccatgtacctctctcctttttcaaaggggaaaaatgtttcccagaagccacctagcagacttcctcttcctcctggcagtaggtcacatagccacagttagcccaaaagaagtccagggaagcaagcgatgggcatggtggcatggcattgtcttctctcctrtgagaggtaggacttatcacaaggacagaggagggagaaaaatggttgcttcttagacartttattatctcagcctcaaataatctttatttaaagtactactaaatcaactagattcgcctttagaatattttcaaaacctgtttggccctatgatacgaatccartgttgttgaagaaaggggcatgtcagctccagagatctctagacgactgctctatggacagttaaagactttggcaacagcagacatgtgatgatggctaatgctctcctctcctgtttccaggtcaacagcgacctcatttacattacagctaagaaagatggcactcatgtggtggaaaatgtggatgccacccacattgggaaattaattgtgaccaaacaaattggaggagayggcatgatggatattactgatacttacaaattccaagaaggtaatttactaccactgaatgaagatttatttgcccaagtccattgagtacttattcattgtcactcagagatgagttccagagaatgcactggcatttgcagcatttggtagcaacagcagaagtataaactttcacrtgtgaaagacacgtcacatatgcaatttttcattgtagttttctttgctagcttgctttgggcagaattctcattcacstggcttgtaaaatgatttggtttaaagtcatacctaatttaacagaatatagaatatgttcttgctcacaagaaccttaattttaaataatcctattagaaaacactgtataactaatgtaattttagtccaataatagaaattaaaataactacttcacatttgtttagtactttaccaattatttccacatacattgttctattacattatcatggaagactacaacgtagayaatacaatattaataggacaatgcaatctctctaactcaggacaattaggtcgaaggccagtttcaattccaaaataatgtcatggtgggtttttgttaacttttattgcatagaatgtttcaaatggcactactgagtttaattctatctcaatcaatgcttagtgtccgstcyatgcctgcaattggtttggtgctggcgattccagcagtgagcagractcagttcctgtcctggtccragtgacaggattattgtgcagaggggtctttggaaacaataagtaggggcatttagtccaactgattcagaaaaagacttgagaagagaagtcgtggacctcggttaaagaagctggacaggggtttccagacagtgtgaacatgaccaaagttacagggcgtgcagcagcccggtatgtttagggggatcctgcaggctcagaatgcccagtgactgaagacaaagctgcccgaggccagcagtggccagaactggaggaccgtgagtgtcctgatggggaacatgcaacatattttgcaaatgattcactgccagaggttcttaggagtatttatttttagtaaatggataaaaatgacaagtaattagcatatacctaaatattcattggaatccatgaagtgctaaggagtgcagaatttattttaaatagtttagacagtctccctgctcttatttacaaaagtaatttgcactacaaagaagaarcttgctgaattgagaacacttgtgcatagtctcagaaagtcagaatttttgttatctgaactagtgaattttcactgtattttttaaatgcttcattttcctcttctgttggttatcatccattgcacaacacagatacaaaggtggtatttttttgtcatttggatttttccttaaaggaaaatttaaaacaatataagtgcaaataaaacaaaacaaacaagcaatgccctcttactgtagagttataagcaaaaaaaggtttggagaaacaaaaaagcaagttcatagaaaagttagctgcaacatccactcattcatacatacatccacacgacagctggctcttaccatctgccatcttccagtgctgtgtagagctggatacatgtacagccctgccttcccatgcagctggggagaaaagcagaaggcagccctcactgtgctgggtgagaattgctctggcacagggtggacgggtgctgccgggcacagagaaaggctctcagccaagaatcggcagttggggaagacctcgtggaggaagttagtgatgggctcactaagcccaaaggacacacaagaattggcagatgaagctggggaaagaggtccccaagaaaaggcagtaaggcaaggactgtggtgagaactctcgtatttggaagaagtcctgaccagacagagtagtgaagaaaagttgcacctacaggcagctaggggcagcaggaagcgagctgtccacatgacagatgtctcttggaaaccatggagccgagcacagytgccattagctgtcagcatggaggtgacagtgaaggccaactcaggaatgggacagaatcagatgccacgagaggaaagactaaaacccagtccacgaaacaggagtcaggggcttggctgggggtggataacaaattaaaacaaaatgtgtccgcactgcatgaggaagacatctgaggtccaggcctctagagtttagcaaggaggcaaggctgagggagagggacagtgtggaggtctggtccaactagaagaatccctaaatccacatagatggttgtaagcgacgactcatcctgcttcggggctggagtttgaccccaagtggatagtttcttaatcaagggtggcatacacatttcaractggaactttggaagtgaccaagtagaatgttgttttgagaagaacaccaagactgcatctgaatgtggcgggtagaaggattgatggccgccattggccactggcatgcagtgaggactcgtcatatccgtggctcagtacttaccaccctgattctcaccgttgaatctcttataatttctctgatccacaaatgctgagtgtagataccaaaatatggaaatgagtagaatcacaggaaacaaattattactagatttaggacttaactattttaatgaattaaatcatggaaagatcaggttcacttcaacttactaaagcttattattaactttataacttttttcaagatatataattaagaaacgataagactttgaaaatcagaatttctgaagacttctcctgtggcaatatatcttctttgataacagtgtcttgattccattccctctttgctccttcagttacttccagggtcactgttatttccacctctccctctctattttctccttccaatcagcatttaagcaggctcaaatatctgctgtgttaaaaacaaaaattacaaaaatctttttcaccactgtctcttcctcctcgcctccttgccgtcctggagygctgcctggacttgcgtcctgctgtgttccttctccactccttccgcgcacactctgtcctgatttctgctaccagcacttccttgaagttgttctcaaggttgccaagaccacccaattgtcacagggaagaaacattttgcagacttcagcttacttgaccttcctatacttcctggtgctgttgttcactccctttgcttgcaattctgtcttttctttgtttctacaatgttactttctcctggttccaccccctcctgcctgaccctcttttcctacctctttttgactataagcttttcccctttcttcacccttttcaaattccatttcattctaggcatctatccttgggctccattcccacccacctgatgttcttcccacatagctggtgttaatgttcacatatgtaccatcaccccatgtctgtgtctccaccgggactttacctaaatgtcctacagaaacctgacacggaacttcccaaatgacacctctcactctctccctcacctcaggtccgtttctcccactccccctactctggtgaagagaaccaccatccactcaaatttagctacttaagaatgagttaagcaacaaatcctctaaatgtcccctctgaaattgttctcgaatgcatcccctcccctccagctctgtagcctaaaaattaaatattatctggtgtgtacaactcttaatatagtgcctgacacataataagtgtccaataaaagtttcccctattactagtaattctgttattcctgccatactactgctattagtttgggctatgawtagttttctcctggaaaaatacttgctctagcttcccaattccacctcacctcctcaggccctccttccctcagtctagcccctgccttgctgccaaagtaatatctgaaatgtaaacctgagcctctcccagcactgcttaaaagccccacccccccccccctctccctgtggcctccagggcatccagtcctaactcacaaagcctcttgctaagtggcttttcggcacctggtcactgcacctcctgagcatgcccccacaggtattgtatgcagaggccagggacctgccagcagttcctccaacaagccaagccccccacctgcatccctggtcttgccctcgctccaaaaactccgagaggcctcccatgccccttcctttccccatgcactgcaggccaacctccgtcccagcatctgtggtgagcacctgtgtgctgccattgctcttcacgtgttccttctgcaccagtgagggaaagactgtttctcctctgtgcctagtgcctagcacggtgtttggaacattatggggtttccaacagcatgagatgatttgaatgaatggttactggggaggcactttcacagctaggcttagttgaacataaaatgtcctaaactggactattatgaagaggaaagttttgtctctggctgaaagcaaaatgcttctccaaacctcaatccttcagatcctctgtgccaggctgggtttcagggcctggggatgcagaggtggacaacatgtctctgttctcatggagcttgcattccagcaaggaagataatgtcacacagtaactagtactgtgacaaggaagaggaaataaaaccaggtatgtgttagggagagccgagaacactagggtttgaggacacattacacaaggtaagagggggaggacaggggaggtgacagtggagctaaagccagaagaatgagaggcttcgtccaacataaaagggctctcttattacatcctagttaatggaaagatatttttgactttgcacccagaggctgcagaagaatctcagaaaatataatctggctttggatatgtctctcactgcactaaaatgttgcctgtggccctgaattatgtaagatgccagagcacgcagcataactgtagagaaacaggaattactctgccaggctctgggaaagccgtgcagttgttttctcctctctgggcctgcgcttcctggaacagccccagcctgcttctgtttggcggtctccgctcacagaggacagtgcttccccagaaggaagctccaggttcctgcacccatggcaggctgtgaagttgcttgtggctggcttcaaggcttcttctcccattcacctcaccttggccagctcagctcctctctgatgtgttmctgatgctcgaatttscctcctgcattttgcctcaatgcatctctggcccgcatccaaagtgatcatcattaatgttctcttctcatggatctattggccagatgatttctgctaaaagatttcactgcacttcccttgtcctcactcctccttccctttttcttacctccctccgagtgctctagctgatgcttgtcctagaccaactgttcctggcacattcttgcagtcttgacaatcagggaaatcgttaatacacacacacactacacattcacattcgtatgcaatgccttctggcattttttctgtctttgcagagtagcttccatttattatatatctacttcctctaattcacctaataaacctaggatgtagacacccttattttacaaacaaggaaagtgatggtaataatagtgtctgtcttatagtgttgttatgaggattaaatgacacaatgcatcataagcacttatgccagtgcttggcacagagctagccctcagtgagggttctgatgattcattgacctctcagtcaccattgcattttattattaactagataaagtagaagacaatacctttaaactagcataattataaaagctaggattcttattttaaagtgatttttttttcactagccattctcaagcctagtttttacaagccaaggaatttgccttcatcttctcatctctatccttagggatacacaaagataaacccaaaggtatttaggatggaaaagaggatgatgaccatccctcacatctgcatgagccctgtttccaagccaaagccttttgtccaaggctctgtaaggaccgttctcccaccttcccagtgtctgaggcataagctccttctgaggcctgacttgtatctgtattttctgcctcatcacttagacaaagctatgtttttcttcttctggaggttaccctcctctttttcctcccttcatctccaccacaaccactttgcaaaccctgcacaaaacattttcctaaaagcagcacacacacctcgaactgcattagaacttaggtgcaccacygcctgtcaacagatgtccctcaaaaaactgccctccgtgtcagatgagtttgggaaaccttgtgtaaagaaaggcaaagaggtgtccttgctgctgggcttcacttagaacctctaatttgctaattaaggtggagaacatctccaggaggcgctggacaactagggcatctccaagggatctgaccggagcaccttgggcagggtcgcctttttaatgtcttgccagagcccagcatccttggggactgggggatgcaagttttggtagaaccttctgccatggcatgggtgttggggrcaatggcaattgagtgagatagggaagaacggggcaggagccctcaagggtcagctcagcaaacagcaagtgggacaggcccargtggaaggagagatgaggaagacaggtcttattggggggcaggtattcacaaatcagagagaaaagttacattgcaggaggtggaatggcaagaggcaattatttccaattattagaggtccccaaattctagccacatggctgggactaagaaaagcaagcaaactgacaccacagtttaagaaaagatagacattgccaattttacctcccaccccctgaaatagtggccccggagaaacccctttctggatagatcccaacactgtcacctcctaacttgcagcctaggctggtcactgactgtctggcaatctgactttgcagaatttataacataggaataatgacggcaccctcctcctggggaggtctgaagcttgtattatagaaacaccccaacaagtgcagtacacrgtgcatccattaatgtgactttctctctggtggattgtatttttgcctgtcattatctctggatctcccccaggtcaagaagaagagagattggccctagaaactgccctgatgtacrgagctaaaaagcccctcaacacagaaggtgtcatgaaatcaaggtccaacgttgacatggactttgaagtggaaaatgctgtgctgggaaaagacttcaagctctccatcaccttccggaavaacagccacaaccgttacaccatcayagcttatctctcagccaacatcaccttctacaccrgggtccygaaggcagarttcaagaaggagacgttcgacrtgacgctggagcccttgtcctgtaagctaacaatggtgtggttctttstgagactcgctgtctggcccctgtcttgctaggtgttaatgcccgttatagctttatatcaaagttaaagttccctccaagatctcagaagtgtgagcctcacagggagaacccactcattctgcaaaagcctccactttctttttttttatttttattttttgagatggaatctcgctctgacacccaggctggagtgcaatgmgaygatcttggttcactgcaacctttgcctcctgggttcaagcaatcctcctgcctcagcctcccgagtagctgggattacaggcacrtgccaccacrccaggcaaatttttgtatttttagtagagacgggrtttcactatgttggccaggctgatctcaaactcctgacctcaggtgatccacccacctcggcctgccaaagtgctggaattataggcgtcagccaccgcactcggcccaaaagcctccactttcatcctcacgtctcatgcacagaagtgaacattgaaaatttcaaagcctagagccccatgagttgtgagaattaaatgtaacttcttgctactcaaagtgtggtccatgagccagctgcatcagcattccccaggagtttgwaaaaaatgtagaatctcatgtcccaccccacaccctctgaatcaaaatccatgttttgacaagatcccaagcagactggagtgtacaggagagtttgtggagcatggatctaaatgatccatctcagaaacaggccctctgctggtgcctctcgcccaagttaggaaagtcttttgggggctgtccagaatgaatrgtgtgctttgctttcccattcaaaaagatacacgcgctgacataggccgcttcttaaaacgctgtctcctgtaatctcagcactttgggaggctgaggttagcggatcacctgaggttaggagttcgagaccagcctgactaacatggtgaaaacccatctctactaaaaatacaaaaattagcccggcgtggtggcaggcacctgtagtctcagctactcaggaggctgaggcaggagaattgctcgaacccgggaggcggaggttgcagtgagctgagatcgtgccactgccctccagcctgggtgactgagcgatactccgtctcaaaaaaaaaaaaaaaaraaaagaatggaggctggaaacaaagctgtgtcatctaggaggggcctaggaagaggttttctgcctctgccatctcttgtggggcctctttctcgtccttgcatgcacatccttccaagcattttcatcactgtaaaaactcagaatattttaagcagatcagggtccacgtgctacagcttgccttggggattacaatctcaaaaaatcacatttcctaggatgttcgtatttggtgggcacaacagttgaccacacgatgggcaacacaagtccattggaagaaactggtctctaggcagagaatgagttagagcaggttgcaaaggacctcgatactttggggcaccaatttctgttggcctgacatggggcactgaagagaaaagtgtacaaataataattttgacaaagcaaaggcaagcaaaactaatacgctcccctgggatggtcaagccacaagtctgaattgctctcaagctctctggattttgtggctgtcacagatcatggtccccttactgaggttttggaaaatattcccagaaaaatgagaaactattttttaaaatcctaattccaaggaacttactcaaatttgaaggaagcaaatctccccagcttcagtaatggagctaacaattaagaaatcactatagtggggccaggcatggtggctcatgcctgtaatcccagcagtttgggaggctgaggcgggtggatcaactgaggtcaggagctcgagaccagcctggccaacatggtgaaagctcatctctactaaaaatacaaaaaattagccaggcgttgtggcaggtgcctgtaatcccagctacttgggaggctaagacaggagaatcacctgaactcaggaggtggaggttgcagtgagccaagatcgtgccactgcactccagcctgggggacagagcaagacttcatctcaaaaaaaaaaaacactrtagtgttttctttggaaactaaaagctttggcacttttcctattcctagggtagtaaaggtaattttcatggaaaagaatagtcagtgtaaaggactgaagaggacaacagtcatggggattgtttaaaacaggcagccacatttgatttcagagagttttgcaaatagacaattctggatgtaagcgatgactgtgtcacctaccagctgtgtttcctgagcaaggtacttaagcactctgagctgtctctcctcatcygcaaaggggaaaaacagcacacacaccccggggttcttgattcattcccctaacctttatttagtgcttgcaagtccaggttctgttttatgctggagacacagcaatgcctattctkactgaatttctgatctcatgggggaaccaaacaaacaagtgaatctatagtatagttatatgggtaatagaaaaatacaaagcaggttaaggaaaacggggagtacctgtggagatggtcagaaaaaaaaccctctctaatggggtgacatttaacagagacctgagtgaaggtcagaagtgagcattccagccagaagaaactgtatgtgcaaaggccctggggccagagcatgtctgatgtgttcaatgagcaggaaggagccagaatcaggaacaaaggtggcaagggggcagtgctgggtgcagaccatataaagaattgtaggcctttataaggcctttggtttttattttgagtgagctgaggagcctttagagagttttgagcagaaatgtggcataatctaasttaggttttgaaaagaccactggctgctgtgttgagaagagactaaagaggaagtagggcggaaggttagagactggtaggatgcttctgcaatcactccactgaaaggggttgatagcagtgatggaagcagcgagaaccagtccgatctgggcatgtgctgaaggtggagcccgcctgattggctgagagactggatatgtggtgtgagagaaggarggtatggaggaagccaaatgagtgatgaatgtgaaatgtktgccacatggtagaatcttagtaaatggtaacttccaacatgtttacatttggggaaactgaagctcgagagatgagtcgatgtgttcaagcccccacacagcaatgagaggcaaagcagataatagagtagacagataatagcagtgacagtgagccagttcagggtaaacttggccccaagtgggccaggtcccttccttgtgctcccattacctggagtctagcacagatccttagacaaagaaccaaatgccagcccttttcccacctcacaagtgtcctgtctcataatctccttccccttccctctttaatccaattaaagaatgagcttgtatgggtgagtagaatgatatcattctctcagtcatcgacctagggacagctgaccaaacctatgcctgagtccataggaacacatctcccattcgcttggccagccccaggttgtcctgaataacttgaagggaactggagactctttgttcctttgccctgcaggcaggtggtattaactgtgaccaataaattgtatattgaaatataaattaaattgcagtgtattgcaaaaagccacataacttcaggccttgatcaagcattcttagatgcctctgctgcaaagaaagctttccaagtagaatgggaggcatactttccagattgatgattaaagggaatgtgtgtgctggaatcagcttgggagatctgaataacttaaacctctccgtaccttcaaaggtgctatcatttccacttggctatatttagttttctttgctttttggaaaagagatgaggcagctccagtctgtgtctcccttggctttccccagacaccgtaaatgatattggcagcatcccagccctaccrctcatagagcgaaaacctattcctccttctcctgccacgtttaataaactttatctagaacaatttcttgtgcagtggcaaaacacagcacttacataacatactatttcagaagcactgttctcttgggctctgaagcacagcctggtttctttagtgctatgatttagggagtgttctacctcagagaagaaaggggtcctgatactgagattataaaggtagcaagagcctctgtaaagaaatcatatcccattagccaaaagaaatccagtggtcaaacatagtcctctagaaatagtcagargaagtcattttattattgttattactggaaacagctagaggcaaaaggcatcttcttcgaggccttccaccttgccacttcatccattctatctagagacacgataaactgaccatttgtgctcatctgaggctgtaaccaatagagggccagaacctcactcatctaaacaattawttgcaaggggagccatggaggaagcagggtccaggcttaggtccaaagacagcaatacgagagcgggtcattccaaaaggcaggacctgggggccaaggtcaaggcaaggtcatagctttaaagagtcagctctaaatggaatagctctgccccaggaatcaagccaacaaagctagctctttagcgcttgcccaaaataggccaatacattctaataatccacctgccctatgcggggtttcttggtttcagcaccattgacattatgggctggatactttgttgtgggactatcctgtgcattgtaggatgtttaactgcatttttggcccctatccaccagattccagtagtaacccaccctccaccccagttgtgacaatcaaaaagttctccagacattgccaaatgtcccctggggataacattgcctcctattgacaactactagtctaggatgaccaacctttctagttttccagggattgatggggttctcaggatgcaggcctttcaatttaaaacccaggtagttctcagtccaccctaactctgccctaacttaccccttctgctgttagaacctcctgtctctcagagtatctcacacttcaataggcattgtctggggtcttattcaaatgcagatcctgacttcactggtgcagtaagaagtcagagaatctgcatctgtaacaagctcccaggtgatgatggtgctgctggtgtgcagaccgcaggaggaacagcaaagacctggactggaaagccatcccttccactggaacccaggctgtctgcagggctgattctacagggatgcccctggttgttggagtggcccttctcaaccctggctgcacatcagagtcagctgcagagctgttaaaaatacagatgtctaggtcctccaaggctctgatttaattggcctggaatgagagccagcttggtaggtctttaagggtccccaggtgattgtgatatagagccatgactgagaactcttcaatcagaagtcctggaagcaaggcacagcacttacgcatctgyaaagagacttccaaatagaagtgctgcccaagacagaggctttcccagcctcttggtcttcaaggtccagagcaagctgctgcagatccatcgcaggtgtgagagttcctccacagatgatgggcatggctcaatgcacccacaccttcgagccagtggggagtcaggggccctgccctctgctctggtgcatgcccatccacaggcaccccaccctgctgcaaaactgctgttcagtacagcaggctaaaatgaattaccctctgtgctcaaactgttggccatgaagctgtttccttcaataacttccacaggaaggggaagtctttggcaaaagccagaaactgagaaggaaagcagtaaagacattcagttctgtgaaggttcatagagtctgttctctgtggctggggatggaggaatgagtcacccattcacctgcggagtctgccagctgtcggcacatacaggcatctggctccaaccaggtagcagtgggtgcacacctgggctcagcctacagaaaaactgcccattgctctctagaatcctggacagtgggaaatgggagttagagagaaagtgagccagagccacaagatagaactcaccatcctcagcccagatggtaattggaggggagccaggaccactctccatcttccaaatgccattctcattggcttgtccccaggacctagaaatctgacatcagtgactggtttccattgagaaaacaattgtttggcacagaggtcttctaaatcacaaacagaggttcggagatagttgaatgcctttggtagaaactggtttcaacagcttccttctcttaaatagaaaaatcatatcagattggagagaaaatgtggaatgctacagagaaaatgtgtaggtagttgacaatttagtctgagtgtggcccatggcctaggtgagacacttcttatttgacaagggatcctatgtggaatgggggccttggacttcagcaccccacatgttccattttgggatgatcccrgcccaaatcaaagccaccattaaaacccattggtccttctttgccatgaaaatcacatcttttccatggcatttcttttacaacagcaaaagaactgtttggaaggtttgacacattttctccagtgagacttcaatgaatattaaatttccagcacattctttacctaagaagcaggacagcttatccccaattgactctttgttccacttgccccttacctttgctgtgttcctggtggcttccaggctaatgtgggaggggtagggaaacttggagaaaagtaaagcagaccctgtctcaagtcttgatgccaggcctgtgtgtgttttctcctactagtcaagaaagaggcggtgcwgatccaagccggcgagtacatgggtcagctgctggaacaagcgtccctgcacttctttgtcacagctcgcatcaatgagaccagggatgttctggccaagcaaaagtccaccgtgctaaccatccctgagatcatcatcaaggtcagtcttagcgtctcatcctggaacagagacaaaggcacgcagacttagtgttcatgtgtgcatatgygtgcttgtatgtgtgtgtgtgtgtgaatgaatgtcctgctcaaaaaaaaaaaaaaaaaaaataccagtgctaggatcctcttgttctttgaaagaagtaaactgccctatatatagacacatacatataacactttcctctcctctccagatttaaatatatagatgtggctgcagatataaatataacctgtgggtataaacacacttgtggaggaagataaagatgtgtaatggctacagatacttagaactttcagtgtctccagaataaagtgggtcaggcatgctataagaggtagataaactgcctgcaacattttggacagtaatattgtttatggaggtataattgtggatagtagattgcacagatcaaaatatacagcttgatgatgattttgtatgtgcgtgtgccttgcaaccacaagccagatgaagaaatggaggatttccaacacccctagaaggttccctsttgccttttacagccaataaccccctagactatcaccaagatagtaacttttctgacttttatcaccataggtttgttttgcccatttgaccagtagttttcatgatgcctctccagtgatcaccagaaatctctgcccaaatggctcaagagacttggcagaggaaggccgagggttgatgakagtggaagataaatgtgggagcctctgtgctcctacttctcaggcccacagctgtagcttctgggggcatctgtggttgcatccatgagacrccttyctgccctggaagcaggaacccaggcttctggcagtgaccctgaggagtgacatctcatgcagcccttatccaggtcttagagcccttccctagtctctggagaacaatcttcttgaagtgattaagagcaattagcacagatcctgctaaactacattgctctaaagtggtagataaatcaaagctttataaagttgatcacattttaatggtcctagaggtgggcagggtgagggtaggtagtccttgcttctcgtgaatcctttgctgtgagtcatttggaaagccaatgactgctgtgcagcattcagaatggcagtgtttcttggrtaactactgggctccagacgctgttcttaaagcactttacatggttgcattttcaaccaccaacaaccccacaaggtaaagagtactggcatyactttacagatgagaaaactgaagcacagagaggttctataactcctccaaggccatacagccagcaaatggcggagctgggcttccaaccccagcaggctggctgcaaaagcagggctgggaaccagctccttcaactgaacgttcttatggtctggtcctgtgtaattgacacagtgagccaccccaaggcaagtcccacccaaactcacgggcatgtaatgcccatcagggagcagaacaccaggcccttcttttctacaaaggcctacattgtcatgtctctttgtttccttcgcctctgtcatggcccacaggcccaccatggcgttgtgtgcacaggacgcctgaaaagaatgaaaacgaggctgtgcagggttggcaggcaaagggagaaacaaatgcaaaatggagaggtggggattagggttgctgcagaggtaccatcatccatgagaacgtgaagttaatagcttaaggtgcaggatgccctaaccccgaagctgttcttcacagctggctcttcctatagacatgtgggaccccctgctgcaggcctgtcccagctgcttggtggaagcagcttttgctacccttctgggctrttgcgcaggtttcatttatgagctcaaccctgaaccttccctgacagcagcraggcctgtgtgcgtacctaattatgaagtgacggcctgtccctgtgaaggtctcaggagagaggcttcccaagctgtgaagtgctcaaaccacagcagaaaatagaatttaattgcaccactgataataaaccggatgkatgaaggaaactgataactttcatcttttaggcactattaatttgcaggattatttgttagttatcttctgggtttacttaaagagcagtttaattccccagggcacaatcagaataccttatcccacaagttagcagacctgggcatgtagagagtactttaaatggagagttrtattgttttgtgtttccttccacaaagsaaccagagatgctgttcctggaggaaacttatttagaggtagggacatttgatagggaagagagcatgagagagatggagattctggcttctgtccatgccaagtttgttcaaaaaggtggaatggggcatcatcccataaactgtcctttaaccattagcccaactaactccaaggataacctaaatccaaatggagtagaagtgctcctgggtaaagcactcacaccctaaggaccacccaggagtcacggagctgtgagaggccctgagtgcagaagctccggcctgtggactggggacctgcctagcctcctggagaggtgaaatgcagagtcatagcaggggagggaaggagggaggggaagggagggagaggagagaagaacagaggggagaggagagaacagaggagaaaaggatggagggaggggaggggaggggaagatggagaggagaaaaagaggaaagaaaagaggaaggcacaggaggggagaggagagaacagaagagaagaggaagggacaagagggaaaaaggagcgagaatgggggggagaagagaaaaacggggagaggagagtaataagaaaacttcaagttgaaatattccaaaggaggcctagggagaggggtcagataaattgtataaaacacaactcaattaagagttattttttctccttccttccttccttcctttcctgtctttctatttttattttagatttgagggtacatatgaaggtttgttatgtagataaacacgtgtcacaggggtttgctgtacatattgttacatcacccaggtactaagcccggtacccagtagttatcttttctgctcctctccctcctcccatcctccccactccagtagaccccagtgtctgtttgtttccttctgtgtgttcgtaagttctcctcatttagctcccacctataagtgagaacatgcggtattacgttttctgttcctgcattagtttcttaagaattatagcctccatgggctttttttttcatatgcttgttggccatatctatgttcatgtcccttgcccactttttaatggggttgtttggtttttttcctgtaaacatgttcaagttccttatagatgctggttattggcaacatcaccaatcatcagagaaatgcaaatcaaagccaccatgagataccatctcataccagtcagaatagctataattaaaaagtcaaaaaataactggtactcgtggggttgtggagaaaaaggaacacttatatacggttggtgggagtgtaaactagttcaatcattgtggaaaacagtgtggccattcctgaaagagctaaacacagaactaccatttgacccagcaatcccattactgcgtagatacccaaaggaatataaatcattctatcataaagatacatgcacatatatgtttattgcagcactattcacaatagcacacacatggaatcaacctaaatgcccatcaatggtagactggacacaatgcagccatagctgtaaaaaaggatgaggtcatgtccttcgcaggaacacgaatggagccagagaccattatcttagcaaactaacacaggaagagaaaaccgaatactgcacgttctcacttataagtgggagctaaaagatgggaacatgtggatatatagagggaaacaacacacacagggtcctattggagggtgcagggtgcggcgtgggaggagggagaggatcaggaaaaataactaatggctactaggtttaatatctttgtgacaaaataatctgtacaaccctcatgacatgagtttacctatataacaaacctgcacatgtacccctgaacttaaaataaaaggttttttaaaaatgaggacttggaaagggagctaaatgcagtaaaagtacgaaaccacaatggctcagaggtccagaattacataggatatgtttctctaaattctaagaaaacgctcacaccctttttcaacctctttgagcctggatggacacacaactgactgagcctcaaggttgctgtgggcaaatgtgccaggcacagggtgaaattatgtgagagacagagaggagaccacagcccttcctgctcagctcagtcaagataagggttgggaccagcccctggtgattatgatgacagcagctatgatttattaagcactacattattaaacgcctctcttctatgatcttatttaaccctctataccatcctacaaggaggacgttactataaccctattttactgattagaaaactgagaggaccagagaaggcagtgccttgtagcacagtggtcagaacatgggctctggaaccaaatcatctgagtttaaagcttgttttctgaacatcataactgtgtaaacctggacagatcatttcacctctgttggcttctgcattctcatctgtaagtcaaaagcaatggtaactctcctcctggggtccttgtgagttttttatgagtcattggatgcccgagtcacagtgcacacctacatatgttggttgctgctattattgccattattgctgtttattagtaactggcccgtgatcacgtgcctgttgagggaaggagagacacttctggcccaggtcttcctgacttggaagcctgtgctggcagccgctgggctacaatggaactatcacaaaaagcagaggtggtcattgactttgcagagagttttgtattcaagggaggagagatcacacacacttgagtggtgtgggacatcaagaattaagactgtagaaagatgaatggtctccaatgaacagataacgttcaaccagtagagatggatggagagaccccttcagatactaggaagaaaatgttagcaagggctagagggraggtggacggcagtatgtagagcagtgagaagcgtgccttggctggggtggaggctgggagcagggatgagtaagggtaacctgaaaaagatagcttgaggctatgtggaggggagtctacaattttggatgagagctttatcatcgactctctgaacaaagaggcttcaagggagtttctagagtgggaatgtaacatgattgtcaactctgctctcccacaagtcggagccgctttttcttcctcccttctcttcaaagcctttgcccaaagcattgtcttctccaggaagtacccaactcagccttggaactggagtttcctaaaagctagtttccagctgttcttacctgattcccctttagatcaaatctaggccaatctggaacaatactgggctcacatgtctgaatccaagtcaccgtcaaccaaagcaggccagtggcttcctgtttgtgcatcccagtggacccagtcgtggattttactggtccctgtggtgataaagatggggcctgggctcaatagtgctcccagtcaaccattcccagcacccaccatgtgtgagtcagagtgtgtgatcctcacatggaaacaggcagagagagacagtcattaaactttaatgagcacacgtctctttccccatgctatcaaaatattttgatgagaaaagaaaatttcattacaatcagacatagaatttttctctgccttcccatgtgttgcttgttctctctctctctctctctctctctctcacacacacacacacacacacacacacatcctctctctgaacttcagtatcccctttgcaaagtgaatacactatgattatactgctccttctattaagtacagtcacatataaaacactgcactggggggattgacatctgtagcaatgtttgtgagaatgcatggcccacgtccagacctagtagctgttggtaaatgttctttctcctctgtagtcccatcaatgcatgggggttgcttagggcagcatgtgggccactggcctgaagtgggccagtggcctgagtgtggccctcacctagtggcatggaatctcttgaatctctggtcaccaggtgttgagtgtatgcagcattccctgtggaatggggccttcctcatgcagggaggcccgccttggagatcctggagtaaggcctaggggagagaggagacactcacatgttcctccaatgatctctactcagtacctgccattctaaagcagctcaggagccagcacttgtgtggtattatcatgtggaaaaagtcctgcagcctttgcaggatgtcaggaagcaccaatagaactaattttctcatgtgaactaggaacaattttgctaggagaaaacataaccattttttatgtgtgtgatttttaaagttacaagcataagcaaacagatgtctccaaatttttcaaaaaaaaaaaaagcttttaaaatgaggacaattgactgtttccaagagtttttaaaagtaagcgtttgctctgtatttattttgtccattagctgaaagactttctagtttttatttatctctttatttagtcactcttgcattcatccattcttcatatagttatttggtgcccactctgtaaataaattgtagcaaatgcctagagctttcaaaaccattatcagagaggccgggtgcagtggctcacacctgtaatcccagcactttggaaggccaaggtggstggatcacttgaggtcaggagtttgggatgaacctgaccaacatggtgaaaccctgtttctactaaaaataaaaaattagccaggctgtagtggtgcgtgcctgtaaccccagctactcaggaagttgaggcaggagaatcacttgaatccaggaagcagaagctgcagtgagccgagatcccgccactgcactccagcctgggtgacagagcaagactcaaaaaacaaaacaaaacaaaagcaaaacattatcagagaaaaattcaacagtgagaacattttctttctttccttttttttttttagatggagtctcactctgtcccccaggctagagtgcagtggtgtgatctcggctcactgcaaccttcgtctcctgggttcaagcaattatcctacctcagtctcccaagtagctgggattacaggcgcccaccaccacgcccagataatttttgcatttttagtagagacagggtttcaccacgttggccaggctggtctcgaactcctgacctcaggtgatccacccaccttggcctcccaaagtgctgggattacaggcgtgagccactgcgcccggccaacagtgagaacatttttgttgcatttttctgaaatggggaaaggttgcgccactttctttcagcactggcccacctggaacagctccaggagtgcagttgctctgttttaacctgagctaaccagcacttacacagagcctggggtgctcctcttgcaaagacagtgtacatggggcctgtgaaagakgcttaacccacagaaatcgacttcaacaagcagaatatctgcatgaccagcactgattggtggggaattgtatagataacacaagatccatgggaagtatcactgttgaccccggagaggaggcagggaccttcctctgggcggcttccctccaggccagcactcacccctgtgcagattgtgcccatctgcaggtgggaaggagacagtgaggggacccagtccagcccactcgccaaccatcaagccctgcagcctggcatggagccacatccccccaaaaaagggggttcccttttccactttgcacagttgcatcctggctccagccccatgtccagatctcttccaacttgggacactagcttgttttttcttaacaaccatcctaatgttgtgttctaactggagcttttcatgagatgcccacaatttttaccgaggttaacagtagaatcctcttcagtctccctacggctcacaccctggaaacccaccgggatggaccaaggaagggtgggtggctgtggtggctgctgatctcactcctcccacatcccattcatacaactttatcccagaggacacattaaaattggggaaaccactgggcacggtggctcaagcctgtaatcccagcactttgggaggccgaggtgggtggatcacgaggtcaggagatcgagaccatcctggctaacacggtgaaaccccatctctactaaaagtacaaaaaattaggcaggcatagtggcgggcacctgtagtccctgctactcgggaggctgaggcaggagaatggcgtgaacctgggaggcagagcttgcagtgagctgagatcacaccactgcactccagcctgggcaacagagcaagactccgtctcgaaaaaaaaaaaaagaaagaaaaaaaggggaaaccacttgagatataatgagtgccccaaacaaagtacatgacagtgactggctacactgtgagacttaactgtagtttcatttagtgctgtaaatatcacaaacttcattaaggtggaaaatgggaacagactatgtgttctaattattgctgaaccctgaccattttcccctccatgtccacaaccgagcacgttctctctccagcctcctgyrctctctgtggctccatcgcactctcgtcaccaagattcacccctgcccacacccacacccttcatggggaggccggggatgggaaccaggaggtgggcttcttcacctctcccctttgtggctctcttctctaacccctgagaaaccgaatccacgtcattctccatagaagaccctataggtgaggaggttctcagggtcaccctggcaacatgttctccctttaaacctcatatttcattaatgctagtatgtgtcagatgctctgttgtatgatattacattgagtcaccccactaactgcataagaagctgaggcccagagaagtcaagcgacttgtctaaaaactcaaagtggcagccccggtcttcagcccctgcatccagcttgctctcccttcagcttggcctggaatagcaccactgtgtgcatcccagtcacctcagttatgtccgtgacactgtttcaggttatttgtggagtaaatcagaggtatctacctatgagtcctgagggactctgagcaaggaaagcctgcttaccccaggggaccctaggaggggacaccttcagccctgctcccatagctgactctcsatcccctcgtggctactttcacagaggattgtggccgtgggaccaaaccgtgggtgcccttagccaggatagatgatcgtaaactatgtctatgagtgagccctcctcatcgaaggtgttcatttccatctctstcttcaggacagctacagaacagtrcacattttagaatgaaaatgaggagtcactggtaactgcggtacctaaaacataatttgctctgtgcatttcatgtttgctatttttttgaatcttaaaaagagacacacatgagaataacsaatctcacattccagtcctgtaatcccagtatgtttgggctactgattctctttttaaaagtggcatctytcatttttaaaagagaaaatcctagatagtgactcctattatcatcaagtaatatatatcaaggccccaaggctamcttgtcacattttactctggcatagaaatctaattccttctctataaagtcaaaaagagagaggtgagttatagatgttttctaatttagttyagggtcaacttataatcctcgtcctcaactgatggtttagcgataacttaaaaggtgatgctgcaaatgattctttgctggatttcagaaaataaagaagctattccagcaaaaaaaaaagtttctatttttacctstattctgtcagggatcacagtatakgtagttttgaagatgaawgttttagagtcagaaagacctggatttatatccaacttccgccagattcctaactctgtaggctttttatttatcttctaaatttcaatttcacgtaaacagaatgggattaataatcatgtctacccccaagaccatagggctgtagagaagattaaataaggtagtgtaagtaaaytgatgaacagaatgcctgcattactaagtaaacactaactaaataaatgtaagttacttgttattattgttgtcattaaccagagtcaggatcacgtgttgctgagcaacggctatggccccagactgtctacatttgaatctctcctaccctacttactaatggtgtgaacttgagcaagttacttaactcctctgtgcctcagtttcctcatctataaaatgaagactcctaatatttacctcttagtgttgggaggattaagtgagttgatagaactttctagggtaatgggaacattttaaatctgctccatccaatgcagtagccacgagccatatgaggcttttgagtccttgaaagatggctcgtgcaactgaggaactgaattttttacatttcacttaattttaattaatttaattataaatagccctaggtggctagtggctactatattggaaaaatatagactgagaacatttcctaaccaccctagaaccattagcattggtcagtaagtgttcatctaagtgtcagctaaaagcaggggcagtgcctgtggtgatgagcagagtttgcaaacaagaaattgcccattatcaaaaatgatcacaggccaagggggagggaaaaatacagtttccagaaatacgtgcaatacatgattgaaagtacttgaaataagagctgttaggtgtgctaataaatcatgtatttcaaattgccaacctcacttattgttactctttctcaaactttttccttcatttcagtttcaattttgaatacagttatgtatttttaaagcatatgcttagtggaagatatcttgtgatttctaaaaaagtaatttctttccaaaaagtttatataagagaaagagagtatgtgtgtgttagtaactttcytgtttaccaaagaatcagagtagcagctcattatcatgaattagtataaaggacaggaatgtcaatatcagtaagtgatatgtaacttgaaaaagcatactacgggttgatttttttaaaacagagagagatattttcaatagaatattgagaaaaacttaaggccatcaagtatatgcaaaagcatttgacgtcaccaagtaagacatatgctttattcttttctctggcccaagtaatgaatactcttctctaaagcaaatacacataaaagtttcttcttgaactaaccttctctaaattgcctgaaggctccctttatttaaggttttatgagagcaagaaaatgaaaaatatgactgygaaaatgaaatgaaaatatgactatgcagatatggaattatgctttcagcaataaggaaaagggagctttgcagattcctaaaataatgtgatgcaaacagatattttctccccaaatagtcattgttctcagcattttgtaggtaccatarcatggtgcatcactgaaatcaacacataacgtgaaaacactatgtgttggcagcattttcctcaaaagaagcaaggagagggagacacctycagttacatttcccaagcagaacacastgatgtcgagcattgggtaggtttttacatttagtttggtttgagtgtctaaggctcattatcatcagtagtcagggacaggaagtttacattctcggtgcaggagacaagtgtcagaaaagggacactggtctttgttaattgcaaaagaaacacactacaaccagagaagggcttctcctctcacccctccccatccttctccctgctccccactccagcatcagggaaatctgggcagaattgatacacccatgccagcatctaattacagagacaatactggaagcaaactgattaggcatgacatatgaaattacctgagaaggtttaatgtcctgaacatattcagatctgaagcctatctatgatggcccarttgcatgggccagtttctcaaatactaagcattccttctcactgtcatcagtgacctggaagggtgtatttcactttccacagcgtaggaggcttcatgtagagccagtctactggtatggraagggttcttaatctagggttcaygggcccctagaaaaccatgtatggacttcataggtctatagtrcatcccctaaaaatacatgccyatattgtatatatcttgtatttgtcactgtgtatgtctgtgtagaggaaaggtcagtagctactatcagatatacttttgaaggggcttatgcccatccttatatagcataccatggagaagacagatggctccaaaatattttttccagaaagaatawagtgatcatagcaaacacttttgccaataatgtctctgtggcagctccatcttcttcagtttagagagcttttgtaaatgctatctttattttgtattttttaaatccaaagatgtttttgaaatgtttcttaatgcaggaaaaaatatattggacacacttgagaatgaaatcagggacaccatgtaaagtattctgawgtattgctacaccttcaatatctaaattgattgaggcagggcctctgggaagaaagtgaaaaattcagtctgtcttccacatgttttgtctataccagtggtttccaactggagggcaattttgcttactaaggaatatttggcaattgctggagacacttttggttgtgatggctggggtgcggggctgctcctggcatgcagtgggtagacaccagggatgttgcttaacatcgtacmtggcacaggacagctctgcaacaaagatgcatccagcccgatatgtcagtagtgttgatgctgagaagccctgatctagatcatgattastgtttttgccacagccttcaaaccaggcttctctctccacaccccatgtgccagccagcctaaaagtaacttctggttcatgttctagtttgcctgtcattgaaccagtctcctccccattaggccttatccattctcagtcttgtcagtgtggcttcaaatccaatgttgctcccaccggtttgaaaatctcccttactttctgactgccgttttttttttttttttttggacgtcagtacgaaacagttttggttgtcttgttattgctgagttgttggcttttccagctcctctgacctcagagtagcactctatcttagagttcaagatctccagttagacagactttaacttcaatcccaccttggtcatttggcagcttcaaatcctcattcaagttacctattttcctgaaccacagttttctcttttataaaatgaaatgcctggcaccagtgatcctgccctagaaaacctccttcttcttaagggaataactattattatagtctgatcgagctgatacaaatatagcccttgtgttgygaggcttatgtgagaatatatgtgaattatggttgtcagctggggctggttctttgtaatcaacaggggtgcctcaaataaatgaattacaggatccacccattaccagactgaggattgctggttaaagtgctggactccctgcctggcacacgatccatgctgtctaggtgcacctgctgttgttgctaccatgaccatcgtctgccyctctcctagttcccctgaayccagctctccaccactgccctccaggagatgcggatttaaatgtaacaaagtttagggagttggctgaaagtttcgtttttcttatagacttaagaaatcccatagccataaatttagtcacaaagcatggcttgatgagtaaagccataagagtgtattcttcttttaatcgatatataataattgtacatatttatggggtacatgtgatttttcaattcatgcatacagtgtgtaatgatcagatcaggaagattttattcttgactgtagcataagtaagcaagggtcctcttctctgggcaatgtccttcctctttacgtccattcttaaaaacgsctcatttccatatattttctcccatattatatagtggctaaagraacatggaatagtaatggctgtgttgtcatctggaagatccagacatccagtaaattccatttytgagccattgacttaatttaataaatatttactggacattggtattgaagtactaagtattggagttaaaagtgggctgaaatataaggtgaataagacaaactacccagagcattgctaccctaaaaagcatcaactgtaatgcattgggcctttgccatgtgccttgcaatatgtttgccgttttatgagcatttttcattccaaacctttcttgcaagggaagaactattattcttatcttattcccaagttacttagagcttatacagatccatycatttggtatacatagctcctaaacaaacaaacaagtcttatagccacctggcattttgcggcacattgcgtttatgttggaaaagcatatggttctraagtgtgtggcatacagtaaacacagcttaaggtatagtaataataagagcattctacatagatcgccccataaaagtgtcagcccattttaaagacaagaaaactgagtctcagaaagcctaaatcacctgagtccccactgttaataagtgttgaacctggcactgagctctggctgtctcctgtggtgttcttccaaatacctgatacttctgagagtcataatagatcaactcaccaacaaataaccttttattttcctggactctggtactgtggctgtagaagaaaaatctcctttccttattttagtatccaggttcctcttcatgttcaacagtaaggactccatccttggcatatttcttgcgaatgtgtctaaaactaagaaggcacatgtgccctgaagcattttctacttcttaaactcaggaatcccctttgttccagcaggaaacttgatgcctatccagaagcaaagttcacttggccgccctcaccgtggaaacgtgttgccacaccaaatgaacwtccccctcctgctgtcaaagagcagtcagtggccaccgctattgacctgagctctaattagkctggttttataatgaggaaaagagtgygattctaattagtaaatttccatctctttctcaataggtatcctccagtcaaagcaatcagctatcctcatcacactggttccattgccaaaaaaataactgtatcataaaactctagtaaaagtgatgatggttaagacaacaagagagcagaacgaggttttatttgstgctaatgacctgcattctctctcttaggtccgtggcactcaggtagttggttctgacatgactgtgacarttsagtttaccaatcctttaaaagaaacccygygaaatgtctgggtacaccyggatggtcctggagtaacaagaccaatgaagaagatgttccggtaaaccttgggttggggagaccgggcaggcagtgcagrgctgtgggaagctttctctgtgtgtgtcttttccaaacatagatctgctccccartgaaaatgtcttggaagctgcctcctccttgccgaccatttctgtagggcgtggagtaaaactagggttggtttgaccagcactttcatcatttaatccttaaagacaccctacgatgtagatactgctattrtctcccttctgtagctgaggaatttgaggctttgagaggttgactggttacacaggttcagttacacagtttatgaaaacagagccaagattcagactcaggctggtgaattccagaacccaagtttgaaccactttgctgtactacctactcacgtatggtctcttctcatctttattgagctcctaccacgtgtcagatattatgctgagagatacccccttttcatgggtgctttgtctccagcctcacctcacagattttaccatcccaatcagtgtctacaactgttggattcaggtttttttttagttgagcctaaagagctctagatggttccccattcaggggaccaaagacaaccccaggttctgtaatgatatgaatgaaactcagcctcttccacacacaggccacttcaaattgtgcttgacaggtctcagtttctgtgacttctactaacaaagagtgtgacccaacaagataacccattccatggtcaggtarctctaacagtaaggaaacakgtttttctaccatttgatcctgccaatgatcctaattctgccatctggactgacagaaagtaaggcccatctcttttccatctgatggtttgcaaatgtttgcaaacagctgtctcatcttccttgaatcttttctacctggggacaaatatctgtcctgactttatttycctctcctctaacatggtttcagctctctctctctctctcccacacattccaatttgtcactactcctcttaaagtgtgacacccagaatggatcccaatctttgaggtttattactttcatttctaccacagataagtccttgtcagcatcaatcaatctagcacatttcctgtggagtgaccttctaaggcatagaaagggaggtagaggactttggaaactgcctcatgaccagatatgtcaagaattttcccgacaccctttatggaagcgaccccactctggaatctgtgggataaatgcaaggcctcacttataccctctggggcaactttattgcccataaagggctctccgcatttctttcaaattacaatgctcrtagcttctgcatctcatcatttaagagatgccttattgcagatgcaataaacaacagagaaaataatcttagtgcttttgaaacaacgcaagcacaaaacatagcaaccttcctgtgctaacaggaaagttacaggaaaaaaaaataagtaaattagtaatcaaccccagctacatagagaggtcagcagccatacccctgctttcgtcagaaacgacagtctcactcacccattctcgcaccttcccactcaaatcagatgcaagaatcgttcaggcaaagtgaaacacgtttcctcttccatacagccccctgctgtatccaactttttccttcccagacagtaaacccacaarctttatctgagtgtacyggaaacttctctatctttacaccttggctatccccctagaattccaccttggtcaaggccaacacatgaaaaaagacactgtgtgtcttagacaaaagatgaattattacacagtgaattattacacagtgcaatgacccactatttgggaggcctcaggctcaaaataggttaaatctccagatggtttgtttattgttaatgtctgacattggagtggagcaaagtggagtgaatcgggaraaaggatggataaggccagtcccttcttggacacagatgtcctgcccacacactggcttaaggtactrttagtagttactgcaacacgtaagtctaggcagacaagtagatagacagagagctagctgctcttagtcagtttgagctgctgtaacagaaatgccatagactgggtggcttatacaacaaacatttatatctcacacttctggagtctgggaagtctgaggacaaggtgccgaccaattcggttcctgatgagggctcccttcccagcttgcagatggctgtcttttcactgtgtcctcacatggggcagagagagggagggcaagttctctggcacctcttcttcgaagggcactaatcccatcatgagccccaccctcatgacctattctaatttagttacctccccaaagctccatcgctaaatggtatcacactggagtttgggtttcaacaaatgaatgtgtgaggaccacaaacatttagtccgtaacagtcctcaatctctctttttaagttttttttactgacacattgtaattstacatatttatgtggggcaatttgatgtttcgatacatatatatgttgtataatgatcaaatcggagtatttagtgtatccatcaccccatgcatttatcatttctttgtggtgagaacattcaaaagcctgtcttctagctcttttgtaatatacaatacctactgttaatcatagttaccttatcatgcaatagaacaccagaacttattcctcctatttaattgtcactttgttctcattggccaacctcttcccatcttccccttcatgttctcctcctcagtctctggtaaccactgttctgctctttgcttctatggtataataatttttttttttttagtgtctacatgtgagtgaaatcatgtagtatttgtctttccatgtctggtttatttcacttaccatgatgcccttcctccaagtctaattcatgttgttacaaatggcaggattttattctttttatggctgaatagttacagaaacccagcttcagggtggaatatctcccagacaagagaagctttatttctcagagacagtcaaaacttgggctaaaaatcatgacatagaaaacatttgttatctaagatgggcttacaacttggagcaagtgccactttctctgtttactcctcactccagcacacaccttcacaaccaagacctgagccagtccgtgcccacttccatatggtcagataattagaagcactccactgtgccctatgttgccaagatctgatctaggagcgccagatccatgtaacaacttggacgcctagaaagtgcaattccacaaaaccaaaatcctttgcaagaccgtatttctttctagaatacagctcttaaatagttggggaatcaccacccccactcattcacccacaccctgccagatgtggtgtctagaaggcaggggttattgaacccaaagcagagggcctggaaggtgaggagctggtaaacagggaattggagccaggaacaaagaaggcggtgctgtgtctcacccctcactcgcagtgagccaactctactctgaaatggtttatcttcctgctcttcccccactgcctccggcctgtctcagatgtgcagaggttccacctccacagactcttaactttctgcacttgatgcttccagagcgtcaaataatttatcttccagatttattttgctctttagaaaatgatccagttcaatatgttatttcaagagaaaaactcccccactttgtgatttgggcttaaactttaagtttctcaaataggacagaagctaaggtctagamgcacagaggacaaaccatgggcagttgcagtttattgtaataataatctyatttgcctgcgtgcattcaagatgataaatggccggtatctcctgatggctcagcacgttactgagaatcgtttatcacaacatccatccccagaaaataggattactccaacattgctccacttatcaaaatacttttttctctgttatgaatttatctgtatgtaaaatagcatgcatacgtatcttcatgtatgagtattttcatgtatgagttttttcgtatgtacacatcattatgccggatggttttatgagtaagagaaaatgataagagggggctaaatacttagcttctatttgaggtggttatctacagtacatggtctcaggtcgggtccttaaccagggccactgtttcacaaagtgcttctgattgatcacttgggggaaccagaggagagagaatgaatggatacaggtaacaatagcacagctgttgagaaataaatatcccaaacttatattggtattgaattgagcactgagaattttctctctgcatacaggcaggagaaactttcctaaattatcttgcaaagagttcaatgaatcctccatgaacacttccaggacactcttattactaagtcaaaaagtatctttcctgcttgagaaataaaacctatgaaaaagtaagcacaatggtcagaaaaagccttttcttcttttctttttttatttctataggtttttggggaacagttggtgtttggttacatgaataagttctttggtggtggtttctgagacatttggtcacccatcacctaagcagtatatactgtaaccattttgtagtcttttatccctcccacctttcccctgagtccccaaagaccattgcgtcattgttcattgttatgcctttgcatcctcatagcttagctccagcttatgagtgagaacataggatgtttggttttccattcctgagttacttcacttagaatactggtctccagtttcatctaggtcactgtgaattccattgtttcattcctttttatggctgagtagtattccatggtatatgcataccacaatttctttattcactcattgatgggcatttgggctggttccatatttttgcaattgcacactgtgctgctataaatatgtgtgtgcaaatatcttagaaaaagccttttcttatagaacatatggtgtacacttttatgaagtgcagtgaagaggagcagaaagagtatgaatatgggactcagaaaaacccgggttcaaatttcatctctgcccatttaccaattatgtgatcttgaaaaagggacttcactggttaccttccatttttcttgatcataaaatctgctgaatagtatctgcctcaaagaactgtcatacatataaaacctgaatataatctcccaaggtttataggggaggctatatgtgaagcaccccagagaacactaaatctcaccaaccctgattagtctcagtctgcactgatgtgggcttgttcgtgacactcaggaagacttcagggcaaaggctgggaggaagaggagaacactagaaccatgaaaggctatgtcattagccgcatacattagggcattggcaacaaatggtagcagaaagttgcataggtggaggggcccaatttggtggttgaaataggaatttgaattacagaacatgaagattctcaaagtcaaatggcagcaggcagggctatattccagatgctgagcctgggmacaaggtctatcccaagggagttggcaaaagctaattcgagtgtcagggcctcagcaaaggcagctgggggattcayataggactgtaattccaggaggaaactagtggcaaaaactgagctgaggctcagaagatcagtcacatagataaggctactatggagggcttggrgacaagctagagttcagytgattaatggttggatgggaatcagcccagctcctgatggccactgggaggctggcggatgcatcccagtggaaggaaccatgacccaataagactgtcagtgacaggttctgcagagctttatgtgggggcctcatttggggcataacttgctgaatcagccagtgagagtcttcagtgtcctaagcaccaactgagagaaagaaagcaagtgacttaggcaagagttttcattgcttcctgatcaaagtggaaagctggatcttccaacctctcctctcttttccatcctttcagtgaaatccggcccaactccaccgtgcagtgggaagaagtgtgccggccctgggtctctgggcatcggaagctgatagccagcatgagcagtgactccctgagacatgtgtatggcgagctggaygtgcagattcaaagacgaccttccatgtgaatgcacaggaagctgagatgaaccctggcatttggcctcttgtagtcttggctaaggaaattctaacgcaaaaatagctcttgctttgrcttaggtgtgaagacccagacakgactgcagagggcyccagagtggagatcccacatatttcaaaaacatrcttttccaaacccaggctattcggcaaggaagttagtttttaatctctccaccttccaaaragtgctaagcattagctttaattaagctctcatagctcataagagtaacagtcatcatttatcatcacaaatggctacatctccaaatatcagtgggctctcttaccagggagatttgctcaatacctggcctcatttaaaacaagacttcagattccccactcagccttttgggaataatagcacatgatttgggctctagaattccagtcccctttctcrgggtcaggttctaccctccatgtgagaatatttttcccaggactagagcacaacataatttttatttttggcaaagccagaaaaagatctttcattttgcacctgcagccaagcaaatgcctgccaaattttagatttaccwtgttagaagaggtggccccatattaacaaattgcatttgtgggaaacttaaccacctacaaggagataagaaagcaggtgcaacactcaagtctattgaataatgtagttttgtgatgcattttatagaatgtgtcacactgtggcctgatcagcagragccaatatcccttactttaaccctttctgggatgcaatactaggaagtaaagtgaagaatttatctctttagttagtgattatatttcacccatctctcaggaatcatctcctttgcagaatgatgcaggttcaggtcccctttcagagatataataagcccaacaagttgaagaagctggcggatctagtgaccagatatatagaaggactgcagccactgattctctcttgtccttcacatcacccatkttgagacctcagcttggcactcaggtgctgaagggtaatatggactcagscttgcaaatagccagtgctagytctgacccaaccacagaggatgctgacatcatttgtattatgttccaaggctactacagagaaggctgcctgctatgtatttgcaaggctgatttatggtcagaatttccctctgatatgtctagggtgtgatttaggtcagtagactgtgattcttagcaaaaaatgaacagtgataagtatacwgggggcaaaatcagaatggaatgctctggtctatataaccacatttctaagcctttgagactgttcctgagccttcagcactaacctatgagggtgagctggtcccctctatatatacatcatacttaactttaytaagtaatctcacagcatttgccaagtctcccaatatccaattttaaaatgaaatgcattttgctagacagttaaactggcttaacttagtatattattattaattacaatgtaatagaagcttaaaataaagttaaactgattatatttgcatctgtgcagaagtgaatgcttttaattttcaatataacacactactaatcacaacttcttgagaaaccatccttcctccgcagtagacaacccaccctggataggaaaacaacaagcatttatcctctaaagaaaatgactctaacaggtgttaatgtcacagttttcttcacctctctctttctacattttattaactatattcactgaaggatcaagttgcatattagttcaaaaaccagcttccagaaactataaaatctctgtagatattttctcataaataatcttatgaaccattatggtgaatcagtggatagccagcatggagacctagcataacgaacacatgttatggtcttatgataatcacgtataggagatcctatattcatggcagacatcactgaacaattgtagctcagataagacctcagaatctttctcatttccaggtagcaactagcaattgattttaaactggcacacaatcaatagcttaccaatgaaaaagagtccaggaccagatggattcacagccgaattctaccagaggtacaaggaggaactggtaccattccttctgaaactattccaatcaatagaaaaagagggaatcctccctaactcattttatgaggccagcatcatcctgataccaaagctgggcagagacacaaccaaaaaagagaattttagaccaatatccttgatgaacattgatgcaaaaatcctcaataaaatactggcaaaccgaatccagcagcacatcaaaaagcttatccaccatgatcaagtgggcttcatccctgggatgcaaggctggttcaatatacacaaatcaataaatgtaatccagcatataaacagagccaaagacaaaaaccacatgattatctcaatagatgcagaaaaggcctttgacaaaattcaacaacccttcatgctaaaaactctcaataaattaggtattgatgggacgtatctcaaaataataagagctatctatgacaaacccacagccaatatcatactgaatgggccaaaactggaagcattccctttgaaaactggcacagacagggatgccctctctcaccactcctattcaacatagggttggaagttctggccagggcaattaggcaggagaaggaaataaagggtattcaattaggaaaagaggaagtcaaattgtccctgtttgcagacgacatgattgtatatctagaaaaccccactgtctcagcccaaaagctccttaagctgataagcaacttcagcaaagtctcaggatacaaaatcaatgtacaaaaatcacaaacattcttatacaccaacaacagacagagagccaaatcatgagtgaactcctattcacaattgctaaaaagagaataaaatacctaggaatccaacttacaagggatgtgaaggacctcttcagggagaactacaaaccactgctcaaggaaataaaagaggatacaaacaaatggaagaacattccatgcgcatgggtagcaagaatcaatatcgtgaaaatggccatactgcccaaggtaatttacagattcaatgccatccccatcaagctaccagtgactttcttcacagaattggaaaaaactactttaaagttcatatggaaccaaaagagagcctgcatcgccaagtcaatcctaagccaaaagaacaaagctggaggcatcacactacctgacttcaaactatactacaaggctacagtaaccaaaacagcatggtactggtaccaaaacagagatatagatcaatggaacaaaacagagctctcagaaataacgccgcatatctacaactatctgatctttgacaaacctgagaaaaacaagcaatggggaaaggattccctatttaataaatggtgctgggaaaactggctagccatatgtagaaagctgaaactggatcccttccttacagcttatacaaaaatcaattcaagatggattaaagacttaaacattagacctaaaaccataaaaaccctagaagaaaacctaggcaataccattcaggacataggcatggggaaggacttcatgtctaaaacaccaaaagcaatggcaacaaaagccaaaattgacaaatgggatctaatgaaactcaagagcttctgcacagcaaaagaaactaccatcagagtgaacaggcaacctacaaaatgggagaaaattttcgcaacctactcatctgacaaagggctaatatccagaatctacaatgaactcaaacaaatttacaagaaaaaaacaaacaaccccatcgaaaagtgggcaaaggacatgaacaggcacttctcaaaagaagacatttatgcagccaaaaaacacatgaaaaaatgctcaccatcactggccatcagagaaatgcaaatcaaaaccacaatgagataccatctcacaccagttagaatggcgatcattaaaaagtcaggaaacaacaggtgctggagaggatgtggagaaataggaacacttttacactattggtgggactgtaaactagttcaaccattgtggaagtcagtgtggcgattcctcagggatctagaaccagaaataccatttgacccagccatcccattacttggtatatacccaaaggactataaatcatgctgctataaagacacatgcacacgtatgtttattgcggcactattcacaatagcaaagacttggaaccaacccaaatgtccaacaatgatagactggattaagaaaatgtggcacatatacaccatggaatactatgcagccataaaaaaggatgagttcatgtcctttgtagggacatggatgaaattggaaatcatcattctcagtaaactatcgcaagaacaaaaaaccaaacactgcatattctcactcataggtgggaattgaacaatgagggcacatggacacaggaaggggaacatcacactccggggactgttgtggggtggggggatgggggagggatagcattgggagatatacctaatgctagatgacgagttagtgggcgcagcgcaccagcatggcacatgtatacatgtgtaactaacctgcacaatgcacacatgtaccctaaaacttataaataataataataaaaactgagaaaaaaaaacattaacaactggtgaatgtaagtgaaggatatgtgagtacttattgcactgctcttgcaaatctatagaactaaaattttaaaaaataaaaatttgcaaaataaaagaaagaaaaaaagaaactggcacgcaagatggaacctgtttgtcatgcttacccttagagccagcccattccctttgatagctaggatttcatacatattaatgctatggctctaagagttatgatttagcaatgataacaagcaatgtgtctcaggtagcagcaggactgtgagttctaactctccctgagtctctacctgtgctagtcctcagtgtttttaaacaaatccttattggtgtttgggacttcaaagacaaaagaggggaaacataagaaacataaatatttctgtttctcctgggggatatctcaaacaacctcaacaacaacacatataagatgatagatagatagatagatagatagatagatagatagatagatagatagatagatatagatagatatagatagattgttttgcaaatatttcacctcatcagccctgtgacagaagtaaatataactatctccataattaagaacctaattgagcctaggaagccatctatcatggcaaatcaatctcggggtggcagtgagcagtgaaacaactctggtttcagagtcaccatttgctgtacactgtttaaatcttttgttgcctccttagagttttaagaatgctggcttaagaccaacttcaggatgctttgaagagctgcagtagaacaacaaataaaaatatgtataaatttgtattagaaatgtcatgggaaattgagtttgtgctagactcattggcaatcaaaagtcacaaaatcccagggggaaagtcactgcctatgaacattcgtccaatgttattacaaagttaatcgtcagcgaacccaaccatcaattaattcaccttttcgacaatccagccatcccctgacatccagacaaccatctagccttccaagccatctatccatcctttttttccaacaatccacccgtgcacacatcaggtatcactttagagaacagggatgcaaagataaaaattccatggttcctgcccagaaagagttcataaagcagaggagtagcaagatatttaaacagataatccacaaccaaataatagagctatgcccagggtgccataggaatgaagacagaaagatgtctaaagaagccttcctcaatgtgcccaggaatcaaggaggaaaggttcagattgaatcttgaaaaaataataggtaagttggagaccatttaacaaagaggagctcgtgtaacaacatagagagaagaccatgaacatggcccccaactggcttgagatggagagatggtaagtgtccagtgagaagaggtggggccgaaaacgcaggaatgggtcagagttggagcacttcccgaaatgagaatttgtttattctcgtctgtattgtagagtagaactaagagaggctgctaggaacaaactagatacaaaactaaaagttatgcgtggctcaaggagtgacagggccaagaaagtagggggtggaatgccctaactcaggccagtgaagaaggtgtcagaatgggggtgtggccacagttggattcaaggaagggaaatgagacatacgaggctcaagtggataaagtgggagagatagcatgtagagacagagagctgtctatgtcagaaactatagaagtgtagacagacaagttccttctagggcagccaagtaaaatcaccatgagcaggtagcgctgaagacccagaatcttgcccctcaggtcatgcttatgtctgtctttgaggcaaaattctctccaacccagtatcgaaaagaaatgaactgcttctagagacattccttcacaccttaaggcaagttcgtccttctgttctcaccaccccaactcattcagactcaagtttgccttcccaagcaccttcctttctacataagaatgaaacaaacaaaaagccttttagtgtgtctgtaagaaattactttgtcgaaacaaacaaataaatgagaaacaaagcgcctcagttgcatcgggaaaagggacagggaaactgtgttcacctcaattgccaggaattatacacagcattttctagctctaaagacaatgaacatttttaaaagatacttggtaaactagctgttgatactactcatgaactcccattcattttcacactaatcattgttctaggacttacataattacctaagtaacgtttcaatagtcccaaaactaacataaggggtcctaatgagcatttcctattagtaaacagcatgtacctataaacgaagaggattctttcctctcttttctgatttgagcaagtttagacagtgggaaggtacaatatgaaaaatatgttaccaccagatttaggatttgttataaaggtggcagattttaaatgaccataaaatgattgtcactctttccattgagaaatggggaccacattccctctcctgcccttgattttaggtgggccgtgactgctttgaaagaatgtgataaaagcaatgctgccagttctcagctccaagccttggaaaactggcagtttccacttattttctcttgaaatcctcttcgtagaagccctgagcttctgcctaaaggctcaactactctgagactcccatgctggagaagccacgggtatacacacttcaaccctgctctgagctcagccttccagcgacctccgccaaggcaccagacctgataatgaggccatcctgggcgctccagatcagccc

SEQ ID NO: 5661 - DNA, 101782 bp, Homo sapiens
  misc_feature (1)...(101782): n = A,T,C or G, or insertion/deletion polymorphism (see Tables 1-2)
ataccaacaggttccaaaagtaacgagtcttgggcattgaaatatttcgcaaaaatgaatgccgtcttttgtgacctagttatctgacatcccagtcttaagtgttctgcttgcaagaagaggactagtagatatataaatatcagtcatactgtggactataagctgtgtagaacaaagatttaatatacaaatgtagttaaatccgcctcctattttcttgatttacagaaaatatactctatgtatagttactaatgattaaaaaaaaacctgttaatttcttcattcctgtaacagtttcctcatccatgtgcacacccattcttcctcccaggctcgaagcttattcctgatggaacatttatatgaacttgttttattctaaacaaaatagcatggtatattgaaagatacagctgaaagaaatagtgttttaaggcatcttttaagagttatttaataagctaaaaattttaactaaatgcatttattgtttctaaagactggtttttactgcttttcttagagacgtgataggttgctatgtgcagtttacttccggatatatactggatttgcatttgaagtagagcatgcaaaaattaggaagtactgggaagtatgaagtgccatattttgtcttatcagaaggacaattacatccacttcatctgtttttattagtgtttggaagaaaggaagcgcattctgagtgagatctttttcatttttccttaaggacattagtaatttaaaaattctatgataattgaatcattgttgaaatatcagaaaatgtgagtaaggtgaaaggataatacacagctctgatcatcttaccatcattatgacatctttgtcaacacatacacattttggcaaaatttctaatcagttattttaaagaaataaagatgaattagagcagacctcaattcctttaactccatttcttctttctaaggacatttggctcaagagacatattttaattcgtgtagtacaacaagcctgccagggttttgggcatgcatgtttctagtttcttcatctattaagtttctgtgagtatgagataatatctggagaaagaaagtaattgatctaaaggacgagatttttagaacttagtttacatgggagatgacacattcaattcaatagcagcaggtggactaggataaaagaggtagcctgacgtctcctgtaacagactctccagttgatgcttttccttgtccaacaactgtatccttgagggaataaacaagagtaatttttgggtgtttatctcagattattaatattacttacaactgtgcaacttgagggcgtttaaacaccaagttgaaagagcagaaatcgttgatacttttgaaaatatttggtatattttcttaggttgactttattctcatttgttatgaattgctatttgaaggcttctacgttttctttcttttttctttttctttttttttttttttttgagaccaagttttgctcttgtcacccaggctggagtgcaatggcaccatctcggctcactgcaacctctgcctcccaggttcaagcaattttcctgcctcagcctcccgagtagctgaaattataggcacctgccaccacgcctggctagtttttgtatttttagtagagatggagttttcccatgttggccaggctggtctcgaactcatgacctcaggtgatcctccacctcagcctcccaaagtgctgggattatagatgtgagccaccatgcccagcctacattttctacttgtatgaaaaactgatgtaaacaaatcttgtaggctcttgaaaaatagtagcttctaaaatgcctctgcctgtcctatttgaagactactgtagtaacacctagcatgagttccctgaaaatattaatgctaagaaaggaatactgtctttacaccccttatagaggttgagcagtgattcttttccagctcactacgtgctgcttttgctttcagttttatccctgcattctcaactcatgactttgttccttggcccaactccctgagcatatcaaggccaaggaatgatttgagcttcttaagtgtcttcttcacctcaaaatgtctttttattttcactaattttctttttttcccgatggtcaagtagaaagatgttcctttctttctttccatattaatccagctaagaggccattgtctcttatatcctttatcatcagttatctgttccccaatcttgatttctactatggaaatttgtttatttgaaagataggtctgaaacaagagtcttttgatgatcttcataacgctctttcctctcaagctgttgttcttcatgcccaactcctggtaaatgtgggtcacttccctatcttcaccatttcatcatcacctcttactttaaccgcttgtttcctagctttgtgccctgccacttagagaaacttcttctcctttgaggttcacacatggtttgtcagtaaacaagaagtcacatccattgtgacttcttaacctcactggacgttgtcagtgacactctttcttatgtatcccctcccctgacttgtgtgaccctgaattatagtatcttgttaattaaggagcatgtatgtgcaccatttgctggcttatttctcccctcaccatctcagctctcttagcccttcttccctaaacataatgtgaaggttttgcacccctcccaggacttgacatactgcccttattcctgagctgtcacctctgtgttagggcccatatcaaaccaattactggacatttacacatttctacctacccttcaaattccttgcaattacatgtaaattcaaaagttccctgctgttataatgtattaattttttatacattgtaaatagattaataataattacttggtaatataaacaatactatttattagtatacattataaataattttaactagtggatacatcttgaagtccagtgagatgcacatttactccttgggttcaaaagcctgatcctttcctaacttcttagatacctcttcattttgcttcttagtcttcattcccaccactaaaacttagttcaccctacaaacttttttactctagctttgtctctcacatctccccttcatttttctcaacacttaatcatcaggtaaagtttcctacaaaactaatttttctccttatcttcacctctgccctattcctttagctatatatttgttcattagtctgcttattttgtatttagtatgttcaacaaatattagatgctaattcattgcctattaaggagattataaaaatgaacaaaacagacatggagtcttccacaaaatttacacactaatgaggaagacagacattaaacaaatacctagaaaataagtgaattatactgtaataaatgctccaaagtctacttcccctccttctgtggggaggttttcaataaactggagtgacagagtgagggaactgacactgtatttgtacatagcatttcagcaagtgaaatcgtggctatgagagtattttaggtgtaaggacgagcaacagcaaagggaggaagtgccctggagtcttggtgaaatgttgagtaaggcagttcggtgtgggtgtgggggatgtgcggaggaggaggggaagtctagcatgtgaattaacagtagtgaacactgtccattatacttcgaagcattttacacgctttatcccaggttttctcacaaaaaccttacaaggaagcgatgttaccccatttttcagaggaagaattagaggtttagaaaggtttattattcgagatcatggacttggcaagtggcacaaccagtatgcagtcacagctctcttaccccaagcttgggctattatcagtaaatttggagccatagtgatcctgtgcgatgtgaggagcacgtggctctttctaggatgctttccttcaccacccctctttggacttctaggtctgtaaatactactttgatgacattgaatctgtgctccttgaagacaggaatcattcatccttgtattttttcagggctcctagcattttgtcttgcctcaaatagatattctataaacagttactgaataactatgctacagtcatcagccttcacatggacatttacattaggaccatctgatatgccttaactgaaaacaattgccaaagcatgtgactggcactgccttcatttttcataattttattagtgcccccctgtttccttcctagggttcatatgtacacaaaccaccagaccaaaaaaaaaaaaaaaaaaaaaaagaaaaaagaaatatatcagtaattctctgtagcaacaacgaaaatgggaaattagcaagcagctcagctcattcagatgcgcagccagctctagggatcactgcttatgtcatttgtatcctatgattaggaatatcttttgaaaatttgggagaggtactcaggatattaaataagaacagcttctaagagaaactcgctcctagcttcttttttttttttttggaggcaaatttgaacacctgaaacattaagaatcatttgggggtggggaatagatagattggcagggcatataaatgtttatttcttgtaatgtataataaaaaaggaaccagtgcaatgggaagcagtggcaagtgtgtccctgagaaagacagaccgacacaaagactgagagccaagtaacagaattggagagagaaaaacaggcgcttagtttaacgctacagaagcaatatgctactttgtgcagagtacacatgtgaagtactccaggtcaaacattggacttctcctagtctgaggtttttgttctttgttgctgccactgctaattaggaacacagtgcagtttgttttctctgtgaggaattcttttctcatataagctccttaggataagatggatgctgttgggaagggtaagtgcttgccatgggcaaaaatatacatagagtaagaaaaggaggtttaccaaaggatagatttggacattttctaagaaaatggaagattataagatccaagagagaaattgctatagaaagattcagagccaggcacaagagagggcacatcttggactctgttactttggctgaggaatgtgttcagtggtgtgcatatgctttcgttatgctgtgactaaatttctttcccacgtggggaaaaaaatggtgcttggattcactgtgcctatggggtggtggtggagaggtggtccagaagggaagagtggtgatgtcagaacatgtttgcattttcagctgtttgcctcacacctaatgacacctacacgctttattgttttgtcttttggaaataaatatacatgtatctcacacagtcatgttggaaataaatggaatatatatagttttgtagagatgaagtcttgctcttttccaggctggtcttgagctcctgtcctcaagagatcctcccaccttggcctcccaaagcactgggattacagacaggagccactgcaccctgtccaggaatattttttataaaggtgtttgaggatcctagcaagatatttttccctaaatgtaaatatttactattgctatatataaaaccaggcttatgaagagataacattttccttaagggaaaaatatgactagacaatatgttacatgatgtgaaattaataccatgttcaattttaaacaatgaaaagtttttcaatagccaaaacttactttgtagggtacgcccacatcaagtgcttctattaagacttcaggtcagttgacacttttttttttttttttataatgttagcaagttccaaactggaaaaacaagggtgttgccagtggaggttgaggtgaattgaagggagggcgggatgccaccaccgcaagccagcatggaggtgctgtggtcagtgcatttcagggatatgaaatgcaaccccacccctgcagacaagagtttcagaatgcattttctgtttttcaggatgaatcttcaagtcatgaatgtaaccagcgcacaatccttctctatggagtcggcaaagagcgtgatgaagcaaggcatcagctgaagaagattaccaaagatatcctgaaaattctaaataagaagagcaccacagagacagggggtaaagaaccttaatgcatttgctcccattgtgttgccttttgccttccctctgagcacagtctttatcaaagtgttctatgtcactgtcaacagagcgtttcccctcctgaatgactctcacattgaaatgtgaacaagcacatttaaattttaaagccttgtttccatttatagcaacccttgtattaaaatattaatacaaggtattaatattaaatattattttattaaaatattgtattccataggtaggtgtaggtaatttattctgatttttggtatacttctcaaattttctatagtagtaataaatgaagtactgaagaatgagttgaaaacctttagtctggaagagatccatttctctgtttctttaccataattttccaagcttgtggttagttttttttctggggcactcacatttgcatgttaattgaaaatcatgacagcatatttgctcaccttttcttgcattattgagaaaaatgattgcagtaggtagtgatggctacctatatctccaaatgatttcaaataaaagaatttgatctttgctctataatgtcttctttagttgaaatgctctttcctcatccttttgacatagtttttacagtgaagctgtgcctttatgttgtatcaccacattgcataattggaattttgtaattatccacttcacgtttgcctaattattcttttcaaggtttgtttatttcattaggcaatcaaattattttaaatatataattaggtatcctgctaccaccactggtgtttatttctctaatacttaaatcatagaaggaaaaagaaagtttgtgtttactctatgtaaacaacattcttcctgcacgtggtataaaccacctctaggagccctactgttctgtagtacatatacttttttatggactcttcacaggagatccagttcctagactttagcaggataaattgctagaatttgtccaccctagatctttactagagaaaaatacagatcttaataatgaagataggttctctttcttcccggtcaatcatggtgcacatgcagaaacatggtacaagaggcagtgtgtttctatctgcatatggcattctgggtatctgatgtcagaggtgatagtcctcagaacacagtgggaaagttatccttcctgttattcacatcaccttccctaactcccttccattcccagttaagggctttgaaatacctcagctctctgaggaagcaaccaagagttgtggaagggaaatgaaaccttcttgttgatgtgtcattattgagtttgaaaaaagaaagtgctctgtctaagaaaactgtttatctgttgttttggtgttttctctgtcttagagaaaagaggaaacagttgcatttagaagattgaatttagaagccctgaaactagctagcaaagaatatttaaaactacttttggtatacttggcaatggggtaggggggagtcagtatttccttcaggaggttcgtaatacatattttatctaaattatttttagagggtctttccagakcctatggaactttttagaaggcttgaggggtatgggaaggggaaggaagcaatgtggtatccttttctgttgagcgtactaacttccttcacagctttttaatgccacactatagtttgtcctgtctttgtagcagtccctcaaataggcaattctagcatatgaactcacaaagcgaaaaacattgttgttctgtgctgccttttgagaaacaggtgaggtattccttatacgaagtgcttgggaccagaagggttttggattttggatagtttcacatttttgaatatttgcatatataatgagaaatcttggggatgagacccaagtctaaacatgaaactcatttatgtttcatatacactttatatacataccctgaaggtaattttatttttctcttgrggatgcttaataaactgtgttgtgtgtctacattttgactgtgacctgttrtgtgagatcaagtgtggaattttctacttgtgacattatgtctgcactcaaagtttcatattttggagaatttcagattttggattctcagaatagggatcctcaacctttttcagtaaatagaaacatcatctgtggaaccacatcgttgggaggggatttttgactttctttcattttagataaagttccttaaccagaaagctgttaatttgggatgtagtgagctgctgtattgtaaataatcttaattttaagtcactagttaaaacttagtgtaagcaccagaaattagctaactgtacttcatattaatggaaatatgcccacttttttcagcaacatgagtactggtaaggaaaacagaccttgtgttagcatgtatttgatttctgggaacacatgaaaataatattttgaggaaccaactcattaggagtgttgtcagatcagccaggtcttgcctaggggaatttatagtataaagtttaaataacatttccagttgaatgatcaaagttcatttttcatttgccttgaccagttatcttttttggttgtcaatggtgtatcttttgaaaatattagtgaagtttactatgacaacctttaagaggctaaagtttcaggacttaaagatttttaaaaaagaaaatcaaaattaagcaacaaaagagcaataatatgtyataaaagcaaattaacataagaaagatgaggaaaaatatatattgactataatgttactcatgtaaatatcattaaaataaagtatttcgttgagaatcaccactgatttcttacattttgctgttaaaatgagtataaattgctaagaaccaattacattcttttacatgaagttttaagaagttagtgatacatagataaatggagtccattaacacaaacaaataaaaaggtgcacttgggagtttttagtaggatctacttctttaagtctgttgttattatttgttttgtcccaggaagaactgaatcaatgcattaatttcacttttaaggcattttgtgcacaagactattgatgttagctcttcagccttggatcaaagatgttagtaaatgaaaaattcaaaacttggttattttaaacatgctcatgacatgtgagcagctacagtgaaggcaaaatttcatacataatttgtacttttgagaatagacattgaaaaaataagcaggtttaatgaatttgttagttcctaatctttgcattatatttggtgttactggccaaaagtggcacaagcttgtaacttatgttaccccagcacctttaaattctgatgtactctagcatcaaggtttctttgttagggaattagaaaagaaccagccttgtggtgttttgttttattttgtttttgactgtaaccactaattgcttattgttgaaagagaagtctcttttattttcatgttattgtttaagaccattacatttgccattagcaaaatatttttgagttcagtgaaatcttgttcatttcttgtgtctttaatagagaaatctgtaaagtaacctttgttctctgaaattaaactttcctaaagaagacgacagtgtgaggagtagaactcttgtcttggtagcctttaactacttagaatcacagtgctggccgggcgcggtggctcacgcctgtaatcccarcactttgggaggccgaggcgggcrgatcacgaggtcaggagatcgagaccatcccggctaacacggtgaaacccygtctctactaaaaatacaaaaaattagccgggcgtagtggcgggcrcctgtagtcccagctacttgggaggctgaggcaggagaatggcgtgaacccgggargcggagcttgcagtgagccgagatcccgccactgcactccagcctgggcgacagagcgagactccgtctcaaaaaaaaaaaaaaaaaaaaaaaagaatcacagtgctagaaatgacattatcaatcatatatccaacttttcctttttgtttttagatttgtctttgtaaacataaaatattaaagtatttaaaagcaggattgaagctagctttggattttattgttagaacagttaagaagagtacccctagaataagcaatgcttattttttttaattggaattttcttcaaacctctttatgctaatttgataaacatgtcacttcttcattaatgtggaatgatttaattttttgccactattaaaaaaggaatcatgtaatttcttttttaaaaaatatattaaactgtgtcagaaaagtaacaagatgagtctccaaagaagatgccaagcaagtgtttgattaagtcaaagtgagcccaggagatctccccaccttcattgtggatatcattgtaatttaaaagttgtttagtgagaaatgtttataaaggcactttttatgatagctaaaatctggaaactactcactagaatggttaagtaaatggtggtacagtaacacattggaatactgtaaataagtgagaattattagtttttagaacacattaaaattacctcagcaacatgaatcaatcttaaaagcatactgttgattgcaagatgccagatgtggaaagcatatactatatgatttcctttatatataaagttccrgtgtaggcaatagcaatctaagttgttaggtgtcaggattttgatctcctagggagggagacatgcctagagaggcctgagggagtttctgagattccattctgttactttgcattcaagtcttattgtgtatttattttattgaaattcatagaatttgtgcacttttctgtatgtatgctatactttaaaaaaaagtatccattaaaaatgtcgagagcttctattaaatggaaaataatggatctgctttatgtttatgtagttggggacgaaggacaaaaagccaggaagaacaaacaggagacatttccaacactggagactgtgttcactaaactccagctcctttcatattttgatcaacatcaagtgacatctcaggtagcyatttaaagctgtttattatgcatttgcagtattctaatttacttaaaaatttttttcatgcagtatattttctcaaccttaatggttttagacatatattttataaacatacttggaagtatctcagactattgagtagttcttttaagtgtcaggttgccttcctcgaaggattaatttttattatgtactttttttgtccttatgataataatcggtgacatataaagtaatagctaatgaaatagttaggttattagagtttggtcctatattgcaattgatgagaaatctgttgatgattgaaataaaatactacgamattgagaagaaaacacatctgttttsctttacaaatccattgatattcaaatggttgtgtctaaaaattaatatttgtagttgttctaccattagaatacttaagatttaggtctgaatgacaactttttgtattttttaaaattgtagttatgaagaaatcattttctttgtacatagttttatagtttctatagaaacacgttttgactttcgtcaaagtagaatcatgtatagattcaactgtcttaaaaagtaaaaatgatttatcttagtaaaagattatttagaatattggtcttacartatttttgtttttatttgcacagatttctaacaatgtgctagaacaaatcacaagctttgcgtcaggaacatcctatcatctccctttggctcaccacattcagctcatctttgatctcatggagccagcactgaacatcaacggactaattgacttcgcaatacaggtgtcaaagagaccatgtttctcttacttttaggaaagcaaatccaccaggcattgtgcaatttaaagtgagccaattagctgggcacagtggcttgtgcttgtaatccyggcactttgggaggccgaggtaggaggattgcttgaatctaggagttttagaccagcctrggcaacttagtgagaccccatctccacaaaaaatttaaaaattagctggttgcatgcctgtagtcccagctacttgggaggctgaggcaggagactcacttaagcccaggaggtcaaggatgcaataagccatgatcatacaactgcactcaagcctatgggacagtgcaaggccctgtctcaaaaataaataaataaataaaatttaaaaaataaaaatcaatgaaccaattgctgtacattaacatcattttagggacatagtacaattttgaataatttagacattgtgaattaacagtcttaaactaacattttatttaaagttgtgttcatagttttcaattaaataattatcattggtgccaaaatatataccatttaaaaatgtgagagttttgagtgtttcttctgtttttttttgttgttgttgttgtttttcttttggtctttgttattttcctgaagcaaagatgaaagtttatttgctctttataatagagcatgttttaggttaagagccagaacaaaccttatgatttgatttgccccactgtgttatttcttatgcacatttgagttcattatttccttctgctattagcaaacagaaataagacttggtttcctttgtttattttataggagatattaactttgttaatgaaaagaaaagccaaataactttcattttattaaaaagacaaaggggagaaaagtgaggggtggggttttctaaaattatacagtccaggaccttgcactgccctgaagtttcagtaccttatttcagcactgggtacttcctaattgtatacatcctgatgtctagacagaagaacaactctataaattggaaaaggattaaaaattttaaaaaagttaaatttagggaatgtrtttgtagtgtaatgactcagtatatctrtggtttataaaaatamatgttttctctatttgttttggcacctacatgtttattcagtcttttctcctgttacagttactaaatgaactgagtgttgtggaagctgaactgctcctaaaatcctccagcctggcaggaagttatacaacaggactgtgtgtctgcatcgtggctgttctcaggcgctatcacagttgtctaatcttgaatcctgatcagacagcccasgtgtttgaagggttggtatatagcatgtcattgttgtttttccaatctcagaatgtataactagtgatgaaatattatagtggctttaaaagaaaaatagtactgatacctgttttagttaaaacatggttaaagaacactcttgccagaaaacatcgatcaaaaaggtctaagcatgtaaagtatgttctttctaataatgtgtgattccttcttcccttcctccttgcctttcttccctctccctggtttctaagtacaaagctagtcatttatagcactctacggttaatgttggccagcatcctggcatattatgaatagtgaatgctgtaacttctttattcatgtaatttcagtttatgtttgcagactcaacatcaaataagctttgcatacattatcatcttagaaatttggttcttcaattgcatttctttgattaaagatatcttttgataagaattaacctagaacaaattacttcattttcagttgtaggctggggcttactctactaatgaagttgagctacagaattagctaataccacccccattaaagactgaggctaaggcaccaaattagtgtaaatgagctctcaaaaacttacataagctgctttttatccactctccagggctttttatttaaacacagaaagacaacctgttatttctttctcttcagtttttccttctgagctcaaaagaatcatggggttctttggttttatagtaccttttatttttttaatctagcacatgtaatcaatttatatgctatcctagaatgatatcaatttaacagtagctmttctgggaaagaggaaatgctacctttatttgtattaattacatgttatgaaatgaaatctgaaacatcctaaaaacatcagaatgtaagaatatttacatattagaattcaggaaatagagaattatttaataactcaactactgtataaagtttgaatttagtattattttacagcccaggaaattgagattcaggcctgttaagtgtttggtgaagtgatgtaccctatatcacatagctaataaatctcacagattttaataaaaatctttcgaactggaagcttattcatgctgtttaatctatgttctacttttaaaatagtatattgaaacccattagttggtcatgaaatgaatttaatgggttgtgacaagtttttttgtttttgttttttgtttttaatattgttattttgaaattgatttcagtatcatttagtttggccttgaaaatttttatcctgttaaatattcataaaatcatatttgacattaactttgttgtatttttaccttatattagtaaggrtaagtattatgcttaaaactattatttcacttcttcgtacttaygtgaacagtacactggattacgatgtgaaatgtttttcttattgcttgcaaatcaaagaagttgaggaaacactgactactatacgatggatacctaaacctaacagactctgaataaatgtttatttactttagtcacaaaataatttttcgctttatagataatatcaggattttgtttaacttttattttagarcagatttattacaggtttattacaaaggtatattgcttggtgctgaggtttcaggttatgattgaaaccatcaggaagtgagcatagtactcagtaggtagttttgcagacctttcctctgctctctgtctccccacttcagtagtccccagtgtctgttgttctcatccttatgtccacgtgtacctcatgcttagctcccacttacagtgagaatatgtgcttggctttctgtttctgcattagtttgcttaggataatggcctgcagctacatctatattgctgcaaagagcatgattttgttcttttttatggctgcatagtttttggtttgcttgtttatatagttaacaggttgaatcattacttttcttcttaattgtgtgacacttttgttctaattggcagcttttacctgctgctaggtagtcccatctgttgatgtcatttcacagggtttgggatactacattgccatttcctcaagaagtctccttggttccacctatggtayctgtgattccattgtcctccttggcctagacatcctatgttctctccactttgccctttcccctgaatagtacagaggagtttgatctgggagtctggaaacctaagctgttgtcttgcttctgctagaactagctctttgcctttgagcaagtcaccccacctttctgcctctcagagcctcctttatacaataaggatggtgaatcagatagtttctaaagcttttttcrtctttaataatctgtcatctgtgactccgttagtgtaatataatggctgagccctgtaacaaaatacaagatggtgatggaatcagatgcacagataggtgaatggaccacaagtgtttacagctgtggtgtatggacttctgtgttgtatggactgtggacaaagaggcctataactacaggagttatacagaatattacaaaacagaaggggctttatcttcttatataagataaactaaaataaatttattactagttggtatacataggggaatgtatacatgcataaggggaatgtgactccaaaccatgaactgcttatgcacttgaaaatgggttttccagattgactgctttgaagcattgctcctttacaaaggagaaaacttgggaatctttgcacgctgatggaatttgtgaatctgcggaggcaggggctctctacaacagttttccttttgtgtctcagtcccagcaacttaatcggtggattcctccatacgtaccttctttatgaaggaatttctttcmttgcttttgtttcttgtcatcagtgacatttctgaagttttttttaaaatctatttcagtgtcataatagaaaaattatattgtactgagttatttactattctatttattagtttcaacaatccaatatcctttttcttacccaagtgatacatattttcattctaaaagagtcaaatgataacccacrtagtacaaatctatgtcttatttcttcgtatatttttctcctcaggttgtgtggtgtggtcaagcatgtcgtaaacccctcagaatgttcttcccctgaaagatgcattttagcctacctctatgatctctatgtgtcatgtagccacctcagaagtaaatttggagacctcttcaggtgagtagaagagactcaaaaggacagaaataggatcatgcctatgtttgttagtgaccctgacaatattgtcatccttttgaataatgaaagctaattgcaattgtatctattaggcagtaattttgatatactcatgatttgtttaaactgaatattaaaatagacagggacaatacacgatagtctattacacaatgtaaatgtgtgatcataggttttttttcccccaatattgaaatgatgttaggtctgattttatttcttcaataaataaagtatttcttaagattttacattttctatatgttgtacagacagtgcattttaagtaagtcctactgaagtaatgattatttgatatatctttccattttaagtttaaaattcaatttggattataaatctaatagaaagatcaatgaggcagctctttgtattttgctttatttgtatccctcttgattttgatatctaccttttctgagctgactttttgcattacttggattagctttaatatcctttgggcattacagtgtttcattttttatttcctggtgactcatagaaggttctatagccccattcacttttctagaactttttcagactgtgtttacttttcctcttttttcacaaaaacarttttgctgtttagcaggtaactttttcatgtgttaatgagtttttttaaaatgacyagtaccctcactgaataacattaaatcaatgtgcattaaaagtaggaaacctggtttctattacagattgtattagattcaggttcagcttgataaatgctatctaatgtttcctggtatgaaaaaaatagaactgaattaatcataaaaaggtactgtaaattctgcagttaacctacttgctatcttagacttaaaattcatgacctgataatgatagtagtatttgattcctgtcaatacatcttattgctgaaggaatattttattgtttaatgagtccagaaagttgtatttttataaatatttttattttcttaatactcttatccagaattcgtattgaattatttttggctgtagctataacctttattacaaattactgtaagtgtgagagacaatattctgtgctttgctcttgaaatcaccccactcagaacattctttcagagctatttgcatgctgacttcttcactccgtttgtctttctgcttccatggccattcctacttcaaatagcatccccaacttcctgtcattcgttgtatcttagcacttgctacccccacaggcagcactagggctggaaagtaaatgcttatttaatgttattttgaggacaattatttactatagatgggtaggaggagagtggtagaaggtaatagctaagaaaacaaatttggaatccagaaggaggtagggaaaggatgttcaactaccattttttttcctttgtcatacctcgtatccagtttgtaaattctgtgatctctgccttccaagcatctctagaacctgcccattcttcaccctctctttaccgctgtggatacctctgcttggaccattgcagagttcttctaactggtttccttgcttccacccttaactctaaaacacattttcaacatccactaaagtgawccttttaatatacgaatgattcacaggctttcagtgattttncacccactcagaataaaattcaccatccctacctagccttcaagatctgcagggtcccatcttctcttccacccctttccctctgtttattgtggccacacagacctctttactgatcaaacactctaagaacaacccacagtagggcttttgcactttatcttacgttgcttgtgatacttgtcctcagttacttgtgtgccccactcccacacttcactcacgactgtctccctgagcacaccattttaaatagcacccccatgtcatcattctgagcctcagcacttgctacccccactgtagattctatatttatttatggcctggctcctccttagaatgyatgcttcatgacagcagaagctttttctatttttttcactgctacatcccagtgtcttgaagagtatgtggctcttagtaggcactgaaaaaaaaatctgttgaatgatagttatatctaagacaattcatgtttttaatggtattaataaagtgtgaaaatatgaaatgggttaggtttcaaaataatcctttgtgaaatatttgagtgggtcttaggaaatatctttccacagaaattgtgtcacaatttaaaaatacttaacattcttctcttactttacatagagctttccatttcagcttacatttttcaaagagctttctcttacatgatttagttcttacagcagccgtttttttaatagtgaacttcctcagacagccccagtagcctatttgacccttaatactcctgcagtgtggtgcaaataggttaaatgaggtaattcaagtaacatgcgctgggcgtggggtgtgtggaaatttagggtaccagcacacagtgaatagagtaattactcaggggtcagcagagtggcacatcatagtgattggcactgtctaaagtttcctctatttgaaaaaatgaaagagaaatacaactttcttgggatatcttgaagtcagagacctatttgtagtttgagatgaagaaaaatgggcaaacaaaagctggatacacagagagatttctatcagtatgctgataaaacaactttaataattttatctgaaccaccattcataaagttgtgtgagaggagtatttttttctgaaacaccattcacacagttgtgtgagaggagtatttgggggagatacaacactggtcacctctaccactgattgagctactgctgtgtgccaagcactgtgctgggttatttccatcaagagctttatttctcacatcaacctcaagaaactgaaaatgtcatgactctgaattgcaaacttgtatccttcaatgacaaccaacacattttttaaaayataagttgtctacacagaaagagagtgtagaagattgtaattgctgccatttagtagatgactttagtcctctttgttagagtagtgcttcccaagcattacttggcacttgatttatgtgggagatcttgttacacatacggactctatacacccacagtggaggcccaggattctatatttttaacaaacaccccaaaagtgattctcaaggaatagagctgaaactacattttggtaaacattgaactgaacaatctctgttttcttaaagctattgacagtggcaatagtttagaatagagagtctttgtgacttttcatcttcgagggactcattcctggctgccattgatgcaagtatataacaatatggggtttaaaaaaaaagccataggtcaccacaaaccacaaatacttttgctgccaaaaacttaatctataaaacagactttctgatgcataaaagagcttttgagtagagagagtgaatgttgtttatggatatgctacctacagaaggtaagcacaaatggctaagtttatatagaatctgagattttacatcaaatctttctgccagtctcattcacagagcaggtttggaggagataggttctaattcctgttatacttctagtagtctatatctgattcagacgtaactcactgaaacatgagctgtttttatatgatagagcaggctctttaaaaatctcttaatgcctctgagaaatacaacatgataagtttttatgaatgatataatagttttttcacttccatagaatttgtgtattatccatatccccttactagaatgtaagttcattgaagacaaggaatgtgcctctctttttcacagctgtgccatagtctccagaatagtcttggcacacgaacttctactgcgtacactataccagagaaatagttttgtaagatatgtaattaagagtactcttatgtgtaattgaatctttttttatttttaagtaataacacttttcaacaactgttaagacacagttgttggaagccatagtaatttctttgatttttaaagcatgtaaaatgtagaccatatttaggaaataattaagatttataaccaaatacttcatttctgttttgttcttccacctatttagaaattatttattgaggaatttctacattccaaagtactttgattagcgccaattagtaagaagttcwaattaagaactcataatgtgaatcttctctaggaatgcattacagttcctgccatttaatatgtccttaagtgaaatagttttctagttattctagttttatttttctgttttaactttttttcttataacctcagtagtgcctgttcaaaagtaaagcaaaccatatataataacgtgatgcctgcaaattcgaacttgcgatgggatccagacttcatgatggattttattgagaatccctcagcccgcagcatcaactactcaatgctgggcaagatcctcagtgacaaygcggccaatcgctacagctttgtctgcaatacactcatgaatgtatgtatgggccatcaggatgctggcaggtgagatgggttaccctggaattcatgattaaccaaagagttgttgccttggtgcttctttgaaattgatgtygttagtaagtgtctggactcacatttggctatcatttgctttttctaaatcttcttttattccttaatttacctctgcactatcttttaatttccttaacctgagagacagtgctttcttatttattactctggcatgagatgttttcaatatggccaacaattacatgatttattttcaaaaacatataataaaaatataaataagaatgcctgtattttgaaaaaaaccgtatttgggtccacctaaattacatgatgtctataaattttttgatgcccttaaaaatgtaaatcgtagctcagatttattcacgaaactaaaaatattctaattcgtgtatgtactgattattgtttgttgcttaacagcattgtcamaaatatttgaagccattgttatcttcttctcaaggttctactaagttatttgacaaatgagtattttatctgtgaatctaagaaaatgacttgtttgatgttagtgaaatatatgttaattaagtatatcacaggtgagtatttctcttttgtacaaggttactttctgtgtcttctttttcttttctaggattaacgacatagccaatttctcctctgagcttacggcttgctgcactgttcttagttcagaatggctgggggttctgaaggctctttgttgttcttcaaatcacgtgtgggggtttaatgatgtactttgcactgtagatgtaagttttctttttcatttaaaaattgaactgtgcaattaaatatttagttagtgggtaatctttttgcttttggcttttatttaattgattcaactgaaatgttataaaatattttttctttctctgtccaaaagcagtaaaccacaatgacattgccagggattaaatacatgaaaaaaaatagaaataaatagaatgcatagtttaatctgtagcagaggggccaagaatttctttgtttcctgaaatttccatttagttgagatttcttccatatggatggtctcttcagagctgttttttctttttaccaactgccctggattcctcacagcatgggacataatctaactaaagcagttcacattctgaagaaggccactttgatatttttaagtgcaaggcgcagtatacaaataaaggctttgttgggttacataagaatgtccaggtctagattccgaggatgtccggtgttttttggcaattaatgcctggaagatgatgaaaagataccccttgtatatatcactgasttccttggatancatgttgcatccatgatgtgtgtatttctttaaaaatctgtcttgattctttacttctcctgttgccacttattggagtagyctttgtcgtacactagtatctcttatgcatagttctttatacatytttacacctgcctctcagttgaaggttgacttctgaattctgctaatcaggactggttggataatcctatctctatatcttcattatatgaagacttaagaatttatgtatataaaattcatagatgtggcctgcttttctggacagaagagacttaaatttttatctttaatatagtttcttaatctcttagttgtttttttaaattacactttaccttctgcaattcctcatctaaaaaattggaattaataatagtgtgaaccttatggtggtgtgctaataaataaggtgatttttgcaagttaaccatagtccttggcatatggtgcgaatcagtatgaagattgctattgtagttgtttttcttattattttctgccaaggtcacgtgagatctagaaaggtaaagatttcactgtgactgaattaatttccccctctgtctctttttcttctttttaaatttaagagtcaattggaaactttcagagttgtttttaaaacgagtttaatcattaaagaatcyttagtagttaccactgaaaggaactccaaaacyttagtgaggcttgtttttcaactagggggagcctcctggtttttccctgccttctaattgtctgactcttaaatggtatatcttgttgcagtctgccaaaatgttttaatgatgttacatcttgtagtgatttcctgattttccatttttgttgttktgtttttcatttgcatgtatgcaagtcaaagctcagtattttcttacagcattggaatgtgggtaaacntcattcattgttttataaaatagaaataggcctagaggataatcatcatgatatgttatcatttccctctgctggttcatgttgggatttgagatcttattggtattgcctgcattctsttagttattaatcttagatactgcttacaaggttgttaggtattaaaacctgtcaatgtttttcttgaaggtgagtgacctttcattccatgattcattagctactttcattgctattctgatagcacgacagtgtttttccctggaggacgtcgtgcagcatgtcgcacttccctctcttctagcagcaggtaaggcagcatccatgaacatcmgttgctctttgattgttgtcttgatggagtggtttctaacattacaacacagggaaaggagtatttgagggtatgtatattgggaagtggtgtagtatcaaggtagatatggtagaattttaatagttattttatacaaattaacatgtatcaccgtgaaaaakgtgggaaactgctatgttacagtctgttttaaggaagcaccaagatttctcagaaaaatagccagggccttattttcttaccataaggaaaatttatttaaataattattccaggaaatttagcttaataggaaacctgaaggacttgttcccaagtgtgttagaaaacttgcttttccaatccccctttcctagcttgtggggatgcsgacgccgagcctggggcgagaatgacatgccgactcttgcttcatctcttccgagctccccaggcctgcttcttacctcaagcaacgggtgagctgactgcagaaaaatctgattaccttttcattggtagctaaagtttctaaaatgaccaaataggctgtccctttctgtaattgccttcttaattttttgggcatgccctgggggtgatgaagggtgagatgatactattcattgagagggctgtcagcaccttttatctgtgtaatatcaggatatattgagaaatacgaatcaagagttagtaagcaataaaaatacctctgctcttaggccaagccatgctggtgggcagcatggtcctctcacgtactgtgtgtgttggttctgaaccacatcacagcagcttagggcaatggtgatttattttattttattttattttattttattttattttattttatttcatttcatttcatttcatttcatttcatttcatttcatttcatgtcatttcattttatttcatttcatttcatttcatttcatttcatttcatttcatttcatttcatttcatttcatgtcatttcatttttttttttttttttccaagacaaagtcttactgtgtcacccaggctggagtacagtggtgtgatctcggctcactgcaacctctgcctcccgggcttaggcaattctcttgcctcagcctctcaagtagctgggactataggcatgcaccaccatgcctggcaaatttttgtatttttagtagagatggggatttcactgtgttggccagactggtcttgaactcctgacctcgtgatccacctgcctcggcctcccaaagtgctgggattacaggcgtgagccaccgcacccatccctcatttattcttgtactaagtaaaaggaataaagtaagaattttaggggcgttggtgaagtctgctcctaaagatcatttccatatagataggcatgtgtctgtgtgagaatcaacacaaatatgtgaaggtcctactaatcttgttgatgtagctctctgaggaggaacgacattgttttaataaataaaaagaaaaggataagtgaggaatactggccatgtttcttagtgaatccatgaagcatcaattaaagcaagctaatggcaattaagcacccacagtctracaatgaaaggctgactgcctgtaaataattacaaaacattrctaatgatggtaatgagactattaaagatttgttgtttttgtaggcaaacctttccctggaataagatcatcttgtgatagacacctcttagccgctgctcacaacagcattgaagtgggagccgtgtttgctgtcttaaaagcaattatgatgcttggtaagattattctgaccctaagcttcttggttaatcaccagaaatgaaggcaaaataatttattttcaggtttaaatctagtagtattattggaaacatgatactgtttgatcgcttattctcctggaaaaattagtggtttctcctagaccaaatacatcagactctggaagatcctgtcccttatctagtgtctctgggggaacttacatgtaatattttttatggtattttagttgcataatgtctcattctgatgtaaaataggtcctcagacccacagggttgttttgccttctctggtggcagaaatcacactttgtgagagacagggatgacttggtaatctaactaaatgtttacattttatccagattatatttcaggagcagaacaccagaaaatctgagtcttaatcttagtatttttgctcctatcatgaccctgaacgagtatatttccttctacctttgttttttgatgacccaggcaatagttgcaatgatgttgatattattgataaatcaatattaagtttcacaataatttttttcatttaattcataatgtccaagatgttctttacatccttatttgtaagaattttcctggaataatagcactgccttttctcttcatttacagggtaatacattaaaacattattctgtaaatcttaaaggctttgaatgattaggaagtcttcaagtcagactgcctaattccaactttgggtaccttcttttggtcttgactcttatgttcagaagtagctccccttcattagaacagaaattactgagtggataggaattgctttagatgagtcctaaataacatgttttgggctataatcttgctctgctttggaaatgttatttggtgatgatgaggaaggataacagaattttcataaaacaagctattaaaacttcaccttaagaaaggatacacacacgggcctgtgaattttgtagtaaaaaggggaggtagagccacgtcaaggaccacagcctcctctgagtgtaggcgcttatagatttatacagccaacattaagtgctcatttcagtgagtagaatttccctactgtgatcatatttgaagggaaggtcagttggtcggttctacttaataaataaatgtagggaccatagagatagggactggcttttttacctgtggtatttctagtgctcatcagagaagctagcaaagaatcagttttcaataaaattatgttggaagtgtgaatctataaatgacaaatatgctaatggcagaaaccaagatgagtaccttctagacactggccccatgatttgtaggattagtctaatctcaagtagaatttgcccacctcttcatccacataatttggaggattccctgggtctaagaagtcaggatcaggtcagtttaacgtcagcagagctttgagccaggtgggcactgaacgctcaaatgtattctattgtcaatgcaattgcagaaggcctggcacagactctcataccttctctgttgtcctaacatctaaactaaatgaggatctcctagtatggggctagcaggtactgttttttctctttcttttcttttcctttcttctcttttcttatttgcagaagctctaatttatccaccctaccatgccctaaccaactctcaattcctatccaccaggatatattttgagttagggagatgggaccattatatcaaatttggtttttaatttctacaatgtaactcaaggtatagaggtagttgtttacatcacctaacggtagtgaaagcatactacattttggtacttgcagaatttagtcttttctttcagctcctgaagtgatctattaaatgaaatcctgtgggtaaagtgaagctggtactctttgtgtttgtattttaatgagaaacatatgattatatattgataaattgaaatacattatttattcctctcctctgcttaagattttgttagtaaatactcaktaagccatttttttcagcaaagtcaaaactttttcttggttgacttgtgggttttaaaaggctttttccattaacttgggcattgttttgcccacttgctgcaagcagtgaaggcctactgtaaaagcatttgttggttccaggaaattttcttgtcaaggcctatgatcctgtgagtaaaaggcaaaagtttgaaggctgtgctgtcatttggcaatccttattttgaatttttattactctctcacttttaaaatatgatagttatttgtctctcatggctagagttttcttatttctagctattcagacattctgtttagtttctttcccagaactttgttatgaagaaaacactttccttagcttcatttcactaagtatactaaagatttatcaggtaaggttttctaatttgtatgttacagagaggaaggtaaaaaaacaggggttattcaatgaatgccctacttttcagggcttccttagtatgcattgcccttttccattcccagggaaataaatctctcttgtcaagaagttgatagtaaggtgggctaaggcaaaacttttctcttgacctatggatagaaaataagtcattgtaagagaagaaatggaaaagggacatctagaagggtgagtaacccattttttccttgtctataagtcaaatgaatttgaatacattcatgcttgaaatattggtgaaaccaatgttctctgattacttagtgtgattcataatggcctttccaagtttggtgaaactataattatacaaacaaaataaggaccgagtcttgaacttgctttttctccatttctgttagaaacttctctgggttcatgcatttatgctcttgatccattctctctattcctgaacaactggctattcaataataatactgttcatatattttaaatccctgaatgctatcctcatttgctcctcaattatttggcaatattttgaacttctgtgattttgcttttgtgattctattacttaggagatgccaaaattggcaataacagtgtcagctctttaaagaatgatgacttcaccatgagaggtttgcratgtgatgggaatgctgatgatatctggactgcctcacaaaatccaaaatcctgtgggaaaagcatttccatagaaactgccaatttaagagaatacgctagatatgtactgaggactatctgtcaacaggtattctaatttaatttgccttttactttgagtacgtaactcttcttttggagagagctacttacacttataggaaacttgtgcataggtgggcctttttttcttgctcactttatttcgaaataattttaagtttgctgaaaagttgcaagaattatttttaaaaaactcatgtccatcctttacacggatttactaatttttacattttgctacatgtgctttgtaatttgtatgtggagatgtgggtgcatatacctattttttctgaatcatttaagagtagattgtatattttattcttttgamtattgcattatttcataacataaccaaaatatagctattaaacatcagaaaatttagcttttggtacagtaattttttctcatctataggccacagttcrattttattaattgtcccagtattgttggatttgtctgaggtttcctgtagattagcttcagattatgcatccctggccaagatactacagaaataatcttgagttctttcaggtaatcatgtctgaaggcatgtgatgtccatttgcacctcaagggtgatgttaattttgattaagatgtttccattgtatagtttcaagattagtaactatacagtggggactgtgtagttactaattttccccttgcagtaagcaatctttgaggagatacttcgagacagtgcaaattttcttctccttgtttaactcccccacccctcataagcattcattttcattcttgcccagtctagtctttactatgatggttgcaaaatggtggtttttttttttccccaacttctcctctcccttcataatatcagtttgtgtcctattttaaggaagagcctgccctcctctcccctgtttatttattatccatatgggttataatatactgtacttagttattttcatgttcagactgtcccagatttgtgcagtaggaatctattcatcctatcacatcatttgacattttaaaaatagttggtattttcatagtttctggcccatgttgtactttctctgccccgggcctggaatcaactattcctccaaggagcccttggttctatttagcagagaacgttactgagaaaccaagatctgggtattatgtatgctcatggttatggagtatcattaattctacgacctgtctgcagacaaagctagaaagaaaaatatatccatacacttaaatatatgtaaatatatatatttatgaggtcctactgataccttcaattccaatccaaccccacaaagttgttctgtgttttcccctaattcatattagtatcaccttcttccctagtaagaatgctgattcccaaaaacgtcaatttacttgtttgtttaattctatgatacatctgaaatagttttaaaatgttacacatggccgggcatgttaaatgtgctatccagcgctttgtcaaaaaatgattaattaaaatacagtatcaaaaatgtacactaggctagggcgcagcggctcaagcctgtaatcccagcactttgggaggctgaggcaggtggatcacttgaggccaggagtttgagaccagcctggccaacatggtgaaaccccatctctactaaaaatacaaaaattagccaggtgtggtggcacatgcctgtcatcccagctacttgggaggctgaggcatgagaatcgcttgaaactgggaggcggaggttgcagtgagccgagattgcgccactgcactccagccctggtaagagagcaagactctgtctcaaagaaagaaagaaagaaagaaagaartgttacacacataccactaggaagaacaaacctacctaaaaggctttgaagatttgtttgcaattccattttctctaagggtttaaaatactgtgttcaaaaattatttgaacttttcccatccctatgagtgtattctttatgtgaaatagaactaggttcatttggttttgcattatttaaattcctttcttgtccccagctctggctatagaatagcttactttcaaaagtgaaactatacaaaaaagtatactcagagatgtgtctccctcccatatccctcttaccagatgatccagttttattattttttggtttattctccctcccatatatttgttttaaaagttctcttataaaaaaaaagtgacataccttatatattattttgtactttgctataggtgtcataccgactgggtcatgtttttgtatttttacaggcatgttataactatggtaaaagatagctacatagtcatataagtattgagaggcaattgtgtgttggttcccaactgtgagtgcatattggaatcagctggggcatttaaaacaatttggatgcctaaaaaattactgatatttgggtgccaccacctgagtttgacttaattagtctgatgtgggccctgggcatggaattttataaagatcccaggtaattttagtgggcaaccagcattgagccactggtatggtggttaaaaaacagacttcacccgaaatagatctgggttcaaattgggctctgttactgttgatgatttcttactttatttagtataataatttgcctttgaaaaaaatggtaaagaaaaggcaataggagtttaaattggtagaaactcttcagagggtcattaaccccatgcatctatagccccccactcacactggacccagcaattgcacttctatgaaattaccctaagaaaattattgtataaaaaagagatgtgcactactactcatttataatgataacattattcataatagtatcaaaaaggaagatcgttttctaaatatttgttatactatgttgtatctagtcagtgagatagtacaatgtattccataaaaattatgaagaacgtatatctgatagaatcattatatagcaagttagaaaaaactgacacaaaatagtgcctagagcaagaccttactttccagttaaaaacatactaatattctctttattgtcttttcttttttcccattaaaaaatgtttttaagcaagttctactttgtattttttagaagccaaaatgctaaaaattttgttttttaaaatttttctacctactttttaatgtaattttttaaattggaaaattcctatcagttttctattcaattatgcactgtggatttagtacatattgcatatatatataccgaaagccagtgcctgtcaatstaattgccatattatttttaggaatgggtaggagagcattgcttaaaagaacctgaaagattatgtacagacaaagaacttatattggaccctgtgctttcaaatatgcaagcacagaaattactgcagcttatctgttatcctcatggcattaaagaatgtaccgagggggacaatctgcaaagacagcacattaagcgtattcttcaggtcagtcgtatacagattgtgtttctgtcatttgataaattcttcgtaataataaaaagagttacttcctctctttttttgtccttgctaatttgtgatttcaattctgatttttattcccacacattttctgtggaattgacatactttatttttgggtggatgtacatgctgcaaattgtatatgatcatcaaacaaatattgatattttaaatcagtattgtatttacatgagaaatatgcttcagagaggggctatgttaaatatattattaaagaaatattgaaatcattttggattgggattggttaaatagattttgaaaggagaaatgcttatttagtttcagtgcatagctgagtcaggcacagtattaactaattaataattaatgtttctgtttattggtttgtatcgctactgaatatatatgcagcaagattgggaaccttttgactcatataaattatttcattgtgtatgattattctgctctttcttgagagaaggagtactgtaagaaattactgtattttaacacatttgatacccataatgttttaattctttccatttttcccagaatcttgagcagtggacactgaggcaatcctggttagaactccagctaatgatcaaacagtgcttgaaggaccctgtgagtttatattgaaagcttatctctgtatgaaattttataaaaagcaaaaacacgttgatgtttgaggataaaggaatacacatatgtgccagtattcttatatctaactctagggctctggttctgtggccgaaatgaacaacttactggacaatattgcaaaggcaacaatagaggtattccagcagtctgcagacctaaataattcttctaattctggcatgagcctcttcaacccaaacagtattggaagtgctgatacaagtagcacgagacagaatggaataaagacattcctaaggtatttttgtctgttgttttattgaactrtcatgaatttttcacaagtaacggtaaattttgtgtagcacagtgatttttctttaagtcataggaatgtgaagaacatagttacttgtaagcagggrttattattaataagttaatkagtaaagctggggtgaatgatagcttcggaatatttgattgagtaggcttaaacaccttgaaactgcaggtgaactcaggtttggttcatgctttcagtgtcccttagtctactgtgttacgtagtattcattatatgggaaacgctttttccaccatttttattaattaattattttgcacaaatatatcctggtaatttttgtgcagaattagaaccagtaggcatataaagtcttaaagtaattatttaatcatgaaaggctgatttgtatttcatcattttggtrtaaagtataactagcgaattttaaaccttaaaaattagctattagtatgcttacatataatatttcatattgtaactgtgacagaaaagtatattgtttgttggacaaagtgattgtttttaattagagagagggggtcatcggaaaacattaaagtcagtttagttacaatatccttccagaactgcatgttttattgctttctgtaggcttaggtggaaagctcatgcaaatgtctagtgttcggaaaaaggaaagataatacagaaataaaagggaaattttagaacagtctgtgtgtctcatacatcaaagtttcgctttggagtttctgttataactgtgagagcaggggaaaggatgctttctccggtgtaacacctgtttctgattttagttcctccgaacgcaggggtgtatggttggtggcccccctcatcgccaggttgccaacttctgtgcaaggaagagtgctgaaagccgctggggaagagctggagaagggacagcacttgggttcttcttccaaaaaggaaagggacagacagaaacagaaaaggtgtggctggaagatgggcgtctgtgtgagagtttaaagaataattgagaaagtctcacttcctgtaaacctgtgtggtcactgtacccacagtccactgaaatttagtttttaaatggaactgggaatattctattaggcaaggctgtcttattcctaaaaaatttcaggttataatccttaatacattagttctcaattcwgcctttatatccaaatcactgctgaactgttaaaaacagtgatttccgagacccgctttagaccaactgaatcagatctggatagctacctgatccctgtattttatttttaattatttctatttttttattatttagatatttatgtttaaaataaatataatgtataattctggcatgttggtgtctgaactagttgctcatatttttaacatttagggctcctgttctagactagacattaagactcctcggccaccacaactaatgttttcttaatttattttatgcccaagaaaaggtttcaagtaattatatttgaaaaccgtgttactgagaaagaaagaaacctcaccctaatgtgaaaatgccaagaaacctaggagtaaaggaaaaaaattgataatttcttccattaaaaaaatattttaagcacatagatttcttgtccactaatgaataatactatagtagccaccatttattgactgcttacagaatggcaactcctctctaaaactcattatgtacatgagcttttaaaattcttatagcaatcatgtggtaggtactctcattatcttctttatatcatgttgaaacagacacttaaaggttacatgagttgctccaggacacacagtgaaggacataaagcctgggtttaaatccaggaggtctggcttctgagcttgtgctcttaactacagtacattttggtagagacccagcattgtatgtactgtatttgttttacatctggttgttttaccatgttggccaggattaattaaccaacaaggaagcataattctaattttcaaatcatatttgctgataggtgagtgtatgtgcattgcctaacttcccataggcaggacagatggtattgaagagacttgaaagatcgctcttcccacatcaggggctctttattctgcccatggagaataatgctgattgaaatattttggcctaggtctcattttaagaaatttgtctttccaacatggcgctttgtttgtcaatatgatttgttgattattctctaattgaagacattttgttaaaatgccaatttaaaacagaatttttaaccaaatgccttgacacctctttaccagtggatgctgcgggctatgttggagcctgtgggctgtgttggagctgcacactaggggtcgccagcaagtacactgtttttggagtcctcagccctggctgatgaattagctctactaacaccctgctttttggtcttgggaaatgtgctgaaaaacaaaatcaaaccccaaaacaagctcaacagacatatatataggcctgttttcccagactctaaaacaagagttttatatgagaactttaaaaatttttaattttatcctgtgtataaattgatattctttctgatgtacatttttaaattctgcatattgatgtagaagatgaattcactgtcttctaccctcactgcccggcatgctcacatgcagtatggwttgatgctagtttgagaatggcttcgagggcaattagagcatacgaagtgatttagaagcattacagtggcttttaattttataagtagaggtatgatttaaattttcaagcagtctttggctatttaccacctctcttrtttatctaatagtgaggcaaagaaatgaatgttgccagaggaagtaatgcattatttctaactagatctgttgttattattacttcctttgtagtatgtctcttttgagtcaacaacccttcctctcactggtacttacctgccttaagggacaagatgaacaaagggaaggcctcctaacatctctccagaatcaagttaaccaggtaaagtatagtataatattaagacaggcaaatatctttctaacggcattcatttatttgcctttcaaatactgagattaaattaataagggccaggtgtggtggctcatgcctgtaatcccagcactttgggaggcggaggctggtggatcacctgaggccaggagttcgagaccagcctggccaacatggtgaaaccccgtctgtactaaaaatacaaaaattagccgggcatgatggtgtgcgcctatgatcccagctactcgggaggccaaggcaggagaattgcttgaacctgggaggcagaggctgcagtgagctgagatcgcgccattgcacaccagcctgggaaacaatagtgaaactctgtctcaaaaaaaaaaaaaaaaaacaactagtaaggttacaaaatgttttgagtagacgctgagaaacaatccatgccttattcttctacctggcattgtagacaccacaagattaacaactttatattaatgagatatrtacaataaatgtgtactgcctataaaagtaaaattttatatattgcatataactttgaactatctgcccgtctcctaactctgcctcataggagaggacctggagcaatctatgctgcagtaggcatggcagtgagtccagctcctcaagcttggatgccacattatcaggcacgctttcagcttgaaatctgtaggttcagaaactcagttgtattgatgccaaccaagtacacaagaaataaatcagaaggcatgttggtttatttagaaataatttggacattgccttttcaccaaacacagttctcctggtcactgtttgaggctcttgcatctatgtactataaggaaactgagcattcacaacagaaattggagagcatggaattaagcaaagtggatagattggtcttatgaggtgttttatcctgatacacagcctaattgaccccttcttgtggcactgtgtttctatgacaccatgtctttccctcgaatggtactagatggacatggacaaggacacttaatcttatttgatcctcttgtcatttctcaccttttgggtaggagagatctagatatagcaatcatagtgaacctttttaaatggaagtcacatattacctcagtatacctagtataaaaaattcgggctgataaggccagacatgatttgacactggctctctctcctaccttgtctcctaccagtcatggccctctttcctccatggttgttgcactggccatgttactgttcttgaacttgctgagcaaattctcatttcagtgcctgtgcatcttttcttccctttaggtggaaagattcccttccagagattagcatggcctgctcccttcattcagttctctgttaagatgttacctccttcgggaggcctttgatcacctctaaaaataggaccacagccattctgtatgccattgccatgcctcaaaccacttgttacacttagttttatttgtcccactactattatttgagctccatgagagcttgttgtttagttaactaccttgcccccttaagccagccttagggaggggttcatttcttctgatgagatttgggaagtgctttcctctcaccttgcagggtacttacaggtcatctgttgggatggagtacttctgcatgtgactcatttgaactcttttaagatgactctcattaatgaccatatttcagagcatgatagggtttttgttagtggttttttgtttttgttttgaattgcactttttttttgctcatctcatctgattttagggtgttgcccacttgtggctccctttcctaagcaaatttttccttttccagcattagtgtgagtcagtgaggaagtgaagaagcagcccactttataaactgataaagccacttggctgatgtctgcaatgccatatttttcaaagtaccgtgcgttctctttatcaaggaagacacatacataagatagcagaccttctcttctataaaacatcaaaataatacatttgctagggttcagcaagtccctagaaatataacaggactgaggcaaaatgtaattctctctctccagtgtttttcttcgtaagatcaatgaggtaatgtattttaaaagtttttattaatgcttaatttgatggccctctcaagcattttcccagacttaatcataggctagctatataattatataagattttcttcctccacctagaacggcaaatgcacaaataaatagccagatttctttctgcatggaggaagaagaaagctaaaattttatttagctttgtttgttaatttgttaaagataagaagtggttttttgctatcagtataaagctcaatttatctttaaatgagagaaaaattaaactttaatggggagtttttttccggatcttagattttaagtaactggagagaagaacgataccaagatgacataaaagcgcggcagatgatgcacgaagcattgcaactccgcctaaatttggtaagtgacatttctagtattttccctccattaaacatatttacatgtgaaaatacctccagctttccacttctcctaagtgcaaagtctgcattacaaggtgaggccttccactctttgctctctgtaattacttccctgttkctaaagccttctgtttcccttgctgctttccttcctgtctggtcagacatctagacagtgctaggtattttaagcatagatttgccttctctacctctaccccagtgaatctctccttctcttcagtttgtgctaagaataaatctgagaagactgttataagtgttagcttctactatacttacttaaaaccatttaaaaagtcttttaactcaaagttttgtccaactttccatcaaattgattataaagacaaatcccacagagaagttttatagraatttaaaatgtctcacatattgtgcattccttgagttttcttttcccatcaggcaggcccaagtgcaggcccctctggaggatggcctgcctgatacttttgcagttgtttctaaccttgtcccarcacgtgaactggtaggtgtgcgggccaagcctcctgcccaccactgctgtgatagtggatgtttccatatggtattatgatagyaggcttagattcaatagtaattgtacagcaaacacaaagatgcagataattggattacatgactttgacattattcaggtttaattcaactataattgcatcataaaactggacatcataaaagatttggaacaaaagaaagctaagtttattggtgcccacattcagatactcacgtcccttcttcattktagttratgtttgaatgactgaactgtgctgaaagaactaaaaatagtgataaacatgtaggtaaaagagaaaagataaggtaatctataaactagagcatcccttgtttttttaaataaaaaacaatcaaaatttgataacataaagcaatggggtgttctttctgttttacagaatgcaaatatcttactgtattttgtctgctaggtaggaggaatgtttgacacggtgcagaggagcacccagtggactacagactgggccctgctactccttcagatcattacttcaggaactgttgacatgcacactaacaagtatgtttttatcayttcacattgattttgctacatgtatgcatggtataagctttgatrtactgatggygatttctgccacatcttatttacttggatgctattaaaaattctgtgccttgaataaaaatactcagttaaataagtgtatttcagtttcactttaagatgaaaataattattttctttcttagtgaattattcacaacagttcttgacatgctgggtgttttaatcaatggaacgttagcctctgacctatcaaatgcatcccctgggggatctgaagagaacaagcgtgcatacatgaatttagtaaagaaactgaaagtaagtttgagatcagcctgtattatgagctcaagttgtttatggrtttattatctagtgcattttaatttattacycattaaatgttattaattgtattcaacttaatttaatgtgattatttgctatttgtttcacctaaccttattagtacccagaagttacatgcacataaccttgattattttttattgaaaacaattacattataaaacatgtttaattttttaaagaactttagaaatccactgttaaatatataaccagaatactaacattagatagatttaggataactstatgcttggactggcacgtgtaattgaaaaaatagccatctgcattgaaatttataaatcgattcatttgaccgaccactaacagactcctttaaaaaaaaattgtaagaaaacagtgcaaaaaagaaaccaaataaatctgatgcrttaccaatcaaataaatcaatggttaccttgtaatctgaccctggacatgagaaagtgttctgttctgcagctcctgtcttctgattgtgatcactaccctggatttttgtcatttcagcactatgatgtttgttgtgtaacaacagtgcctttgtatgtgttctattttctacttaaatagaagaaatgaaacactcattgctctatttggaactgccttgtagaacatgttcagggttaaagaacatgcgctaagctataaaaagggaaatgtttcataggggaacttccttctggttaacttttgccttcattgtaatttctgtcccacttctcactctctctctctctcttttttctttagaaagagctaggagacaagcgatcagaaagtattgacaaagttcgacagttactaccttwgccgaaacagacatgtgatgtcatcacttgtgaacctatgggttccttgattgacacaaaaggaaacaaaattgctggatttgactctatagataaaaaacaggcaagagtgaatgttttttcttatatataaatttatttacaaaagatgaaatacttttttttgtcttaccataggatatataaaatatatkaattttgctgttgatgtttttaaggcatatgcttgtcttctaagtgtacttagtcattggcattatcatataaagaggtcatatctttgaagatctacgttttatatgtttaaaggacttaaaatgtttccctgaatttaagtaaatttttggaaacctaccaagagaaaactaagtaaaagcttagtgtaaaaaaaaaattgcataaataagttctgattatacttcagatttagaagcagaatatatttatcaatgaaaaatttcttgtaagctgagcatggtggcacatgtctttarttccagctacttgggaggctgaggcaggaggattgcttgaagccaggagtttaaggctgcaatgtgctaggctcatgcctgtgaatagccactacaccctagcctgggcaacaaagtgagaccctgtctctgggggggraaaaaaaaaaaaaaaccttcctgtagtaagctatttcaaataaaaattattttaattgttaggatattctctattcctatcaagcagtatttaatggacatttgttttatataagatattaaagatggttctctaaaatatgagaaaattggtcagttactcttttaatgaacagtaagcaaccaccgacattccacaatcaccaagatgaaagacagagttcctaccctcaagggggaagtagacagacaattacagtgtaatgagatttgtgtgacatggtacagagagagtattaggggatagaatagagggtccccaggaaaattgacacgagtcattttgaaggattaagagttagctgggaggtagggaaaattgtggtacaaataaagggagagtttatatgaagacatgaaagaatcagawttaccagggaatttagagtagcctgagaatctaataccagtttgtgtaaagaaaaaaagctaaagtcatggtcaagtttgagtttgcagtgtcagcggacttcctggtagtaagacatctggaatccatttggatgtgtggtttttacaccaaggaaaaagttctcatctcaagacaaatattaggaaacagtcaatttacaggtggcaattgaaccttggttttattttgttttactttgtttatttatattttttgagatggaatctcgctctgtygcccaggctggagtgcagtagtgcgatctttgctcactgcaacctctgtctctcgggttcaaacgattctcctgtctcagcctcctgagtacctgggattacagacatgcaccaccaggcccagctaatttttttttgtttttgtctttgtttttttttttttttcaagacagagtcttgctctgtcacccaggctggagtgcagtggcgtgatctcggctcactgcaacctccacctcccgggttcaagcaattctctgcctcagcctcctgagtagctgagattacaggtgcctgccatcatgcctggctaatttttgtatttttagtggagacggagtttcaccatcttggccaggctggtcttgaactcctgacctcrtgatccacctgcctcagcctcccaaattgctgagattacaggtgtgagccaccacacctagcctttttttgtattcttagtagagacggggtttcaccatgttggccaggctggtctcaaagtccttacctcaggtgatcccacccgcctcagcctcaccaagtgttgggattacagacacgagccactgtgcctggcctgaaccttagttttagatgaagctactcataaaagaatgcrtatagataacaacagtaacacttacatcttagggaatgactgagtagttatttgggggccatttaaggaaaaatatttttaaattgacattttaaggcaagtgccaagagatgtcaccaattaatgttaagaataaaaagagggtaaccgtttttttttttctagagtcagtaaatataagcttgagttgaaagactttacttattcctgctgctacaatttaattctctaataataatattatattcagagtatggcttattaagtacagggcccacatattgaaccaagttcatgcagatttggattgaagttaatactaacccaattacaggttgactataacttgactcttaaatttgatattatcttcaaaattataaatagattacrgagatttagaactggttataatttagtaagattaactttgcagtgttagaatttttagcaacaaatttttagaatttttttagcaaaaagaggaaatacacattaacaataaaatatgctagactgcctctgttgcctaaacagagcatcatgtggttaaagaactgtagaaccgggcttacaaaggtctgaattctagccactgctctccggtgatgtagctgtgtaaccctctctgctgtattctcgggttctctagggctcatgccagccaaagtgttctctgactccatgtcccatacaagcctggcctatgaataaggaaaagatctgagtgtgctatcttagagcgctattttcccacagggtctccaggtctctacgaagcagaaggtgtccccgtgggacttgtttgagggtcagaagaacccagctcctttgtcctgggcctggtttgggacagtccgagtggaccraagagtgatcaagtacgaggagcagcatcacctcctgctgtatcacacacaccccatgcccaagccccgcagttactacctccagccactgcccctgcctcctgaggaggaagaggaagagcccacatctccagtttctcaggaaccagaaaggaagtccgctgagctgtcagatcagggaaaaaccacaacagatgaagaaaagaaaacaaaaggaaggaagcgcaagacgaaatctagctcaagagttgatgtaagtgggraaaggaaggagaaccttggctcattagcatttagtatgagatttactcgtgcccaaatcatatccctcgaaacattaccaagagcaggataagttttgttatgacagttctcctaacaggtttctgcattaactgaatggcacacaatgacttgtcacagacaaaagattaaagcttttgattttccrtcctccacttttaataattttattttaattgtaggcttccattgtaatatttaattaatatttcagtgcctcctaatttcctcgggtttgaaacttgaaatttttagaactatacaatcccattctctcacatatttttaatatgtctaaaatatttattgtattttaagtggttgatatcttcagtaaattaacataaaaagctctatttgstttttctttgataaaacttggagttagcatagccaataggatgttcctgagattttatgttttactattccatcttaccctcatatattttccttctttaccatgttttcagactttataaaagatgaaaataagcctaatttaaaatagttttacttcttgtttctctattagtgttccccacgtataataatcttttcattacaacagaaatctatttgatggtgatttagaaataattttataaaccttgagaagtaatgcataaaatgtttttctatttaaattaaattaaaacctggaaaatatttgatagaggatttgagacatttttaatgaaattccacagcattcttgctgyacagtggaagaaatattcaccatttcattcagatattcatgattggttattgtttacctatgtgagaactaaaatacatcttttcctagctgatagcttggtgattaatactattttagaaatgaccaccaccactttaggatgccacttgagcatcagtgcccccttctcattcagtcttcctaccagtattcctttgtcttgaagggaagtttaaaatggtccagactgacactccctcaaatttggggtttccagcctgtcagtccacgtggatgggcttttgttcttttctgatgaaaaagccctgaaaccaatcctgctccccaggtcagtctggtcatgtcccctcttcctctattcttcctgaagctccctcttttcaatgagatatgctcttcagtaaaattgcagggaaatgagattttgtttctcttccatcctctagggctagactagatgagggaaggtagggaaattgagaccttcaggtgtgatccttacaggctttgcagctactataaggaagaggaagcatgggggatgaggggagtgtctacttctttagaacgatgtctggaaaattgcaagtgaaataccatcttggccaaagagtggttctgaagcactgtagggctctctggcgtaattctccagacccaagatattggaaaggccttctaagatgaaatgatcatgagtcttagcaactgaaggtgctttttcagtgatgagtgtcgttcagtattggtattcctgacacacttgtagtcttttgaaatagaattcagaagagatccttttccatctctgcccactgcaagccaagcactgtttaagtcaaggaaaagtttamctcaaatgaatatttccaggggatttattagcactcttccttccatcttctcctttataaaaaacagctttgtacattgggataggaggtacctcagatagcttactgaagttatttgcattaattagctgtgtgatatgtggagttacgtaactttttaaaaaactttatgttgaaggaatatccacagagcaacatataccgagtgcctcctaattactcgcctatctcctcccaaatgatgcaccatccacagtccacsttgtggggttacaacctcgtgggccagccccagcagcccggctttttccttcagaaccaatctcttactccaggtatgtgatgagaaagcacagatcactcagagatgagaaacagcttgtggttctctttgcttttaacctgaaacctccacaaaacttggacatttcaaccactgagtgctcagttgacatttctgtaattcccttcacacagaaatgttttttgttttctaaaataggttaaattacgagtttatgtactgattttggaacttttatttagtgttaaaaggaaattagctagtgatgaaaatctaagctgtaagatataaaagttgataacggttttatgttataaaatgtgtgtatttttatcagatataattcttattggcattttaaaagattacacaatattgcacagtgtcttttattgttctgaattatcatgacagctaagaaaattggttcagcaagatttagataacaacaaggaaaactaccatagtaaatgttcctgattttagtattgctttggttcaagcccaagtagatttctcgtcccaaatgaaaattttctaaatgaaaacatctcttaatgaaaaatgaattcaattttctttctatatgaaacattgcatgttttagcatatttaaattatttgaaatctgtcagcattgttaggatgtgccattttaacaaataattttttaaatttttctattgtgatttttattataacttgagtttgacattttgaggtctgtggaagaaaatgtttcatttatggcttatagcagggggaaatccatattttgtcctctaaattaatggttaaaggaactggtctggtagttaagcgttttagattcaaatctggttctaccactctcttgctgtataatcttggccaaatcttaatttctctgtgcctcattttggtcatctgtaaaatgaatatgctaatacctattcccatagggtgggtgattcagttatttattcaagaatgtattgagcttcatgatacagtggacccagttttggatgctaggatattgcagtgactaaagtgtgcaaaatacctactttttaaaagatgaaataaagtttatgttacacacacatacatatgtaagatttaaaagtaaattgtaatagttatatagccttttgaaggtagcctgaccccacagacatgttcagtaagtgatcttcacatattcctagctcagggcatttgtgcttgctgacccctgtgcctgcagtgctctccctcaaatatctacatcacttcctgcctgtctccgttgggcttggtcacattactttctcactggggcctttactaacctgttttaaattgtagacccataccccttccctgtaccctctgtttctctcttttttctgtttctctgttgcaagcacatccaatcttttggcttccttgggccacattggaagaagaattgtcttgggccacacataaaatacacaaacaataggcgatcaactacaaaaaaaaagaatcacaaaaaaaactcgtaatgttttaagaacgtttacaaatttttgttgggctgcatacaaagccatcttgggccgcatgcagcacacaagccatgagttggacaagcttgctctacagcatcagacttgcttatatcttactttcttattgatttattatcttcccagaatgtaagcctcgtggcagatatttttcctattatgttcactgcagtatccccagaacttagaggaacctctggctttatagtaggcttttaaaaatagattgttgagtgaatgaatatagactacaaactagactcagagtgaaaaagaaggatgcaatcatcatccttttaaacttcctctttttaatgccacggtccatgtgaatttttagccattttaaactttggagatgtagaagtttgtttgtagatgtagaagtttgtttgtagatatttgacacacaaggactgtctgtgaattgaaagctaactactttgtaaaagcacataatctctccctatagaatactatagaaagctttttataaactgaggaactttaggtgtgagatggcatttaaaaaataaattttgggctgggcacggtggctgacacctgtaatcccagcactttgggaggccaaagtgggcagatcacctaaggtcaggagttaaagaccagcctggccaatatggtgaaaccccgtatctactaaaaatacaaaaaacaaaattagccaggcatggtggtgcctgaaatcccagctgcttgggaggccaaagcaggagaataacttgaacctaggaggcaaaggttgcttgaactgagattgcatcattgcactccaccctgggtgacagagcgagactccatctcaagaaaaaaaaaaaaaaaaaaaaaagtaaaaataaataaataaataaattttgaaaaaaattatttttgaggatttatatgagcaaatttattttcatttaaacaagcacaatctaaagttacaagacagtatgtacagcatgattccattcatatagggtttaaatgcaaaacaatctcccaccatcactcacatacaaaaacatatgtatctttcctaatctttctcatatatacacaccagtattataaagttgtaaggaaatgcataggatagtaaactccagattcagagtagcatttggtaggagtaagtgaggaaagtaattaggtgtacaaagggcttcagccatatttgtaatattttattccagtagtttctcagaggtacaagatcatagagttaggaaaatttttaaaaattagattatagtttaatctttaaaaagaatttcccttttctgtaaatgagtctctttttacatatcaatatacataattcttaacacgtaatatatgttctgattgttgcttcaatagaagttacccagccatgtgttacttagattgatcttctgtttttttccaaatgctcttcaaatgctgctgaatgactttgtaaatagaagaagatgrctgaggcaaatctcactcattttagaggtttcttgtgccaaggttgaggacatgcctgggagaaaggaacacagaatcacaggaacatctctgctttttccaaagaggatttgggggcttccgtatttaaaggggaaagagtaggcagtaggggaaagaagaaagaaaaagaaggggaagtagataaaaggagtaagcagtttcattctttagaggctttgatcagcattccctgaatctacattttacatatgaaagaagcaggttaaaggtttagtcaattayggtgttgaatctgcatttttacataagattaagtaaacatagagtagaggaagaagtcaagtatatatttgtctctgataagtggagggatgacttctagttctgtcctgctcccccacaaccccccctcccaccgtaaagataagctgttaattttagggtaaatcttttggaacccacaaggaatttccttgtgagcaaattatgagggagacctcctagggaggtatatagccttctatctttgtagctatctatttaggaaacaaaccaggggatagttttgcatgactcagttcccaacattgacttttacctttgtcatagtgagtttggtgtcccaagatttttagtttcctttcacaacttcataaattgtattgctgattgtggcactgagtctttaaaagaatgtgggtttttccaaaaaaacagctttaaaatgtttgttttcatcatacaccttgctttatagaaaagataaaacaacttttgtgaggtgcttatgtagaggtttttttcatttacatgtatcaaggactatttttggtgaatgaagaatttacatttattgtgaagccagcaaatgtcgacttttttttccctaacttttaaatgcgcgtgacaaattataatatacaaatatgtaaaggatttcctgtggtttcttaagcatcggtataatagttgcttgtttatttgatttttagccttcaaaaaagatgttttgtcattacaatcatagtacttgaagtttgcaagcatttcaagattttaaagtattttcatgcctctgctataaaacaggcattttcattttgccatggtgaaaagactttaatgacatgagcttcagatttgatgaaaagtacaaaaggatttatatgaatggcttaagaacttggcaaaatacatcacaaaggcagtatgttttatacaagtaatatgttcctgagggccttgcctaatttaaaacccatgtaattatgaaattatgccaacaactgtatgttttacacatttcaatttatgaactgaagacctccatgaaattaaagtagtatwattcacttctacatcactcccctcatcttttgtaagttatgcaactcaacaggtctataatatttgtggcaggtgggacagtgcatttttttctactttgttcataaagtgagacttagaaggtgaaatttctgtgttttgatacataaaaagacctgttgcattaacgtagttagaaagtgtttccttttggttgcttttgtaggtggctccagattggaccctgcaggctcctttgtcccaaccaacaccaaacaagctctgtcaaacatgctacagcggcgctcaggcgccatgatgcagccgccttctcttcatgcaatcacatcrcagcagcagttgatacagatgaagcttctgcagcagcagcagcaacagcgacttctcaggcaagcccagactcggcctttccaacaggtttgtccagaccccagcaatggagtcctttgcattttattacctctgctagcttgggataagtttgggatatgtagcatattctttctgtatgcatatccctgtatacttgtgtgagtgcaggtctatctctctgttacaggcttgtaaatagttttcctccattgtactttactgttatcattgctcaaataagaatttgatatgtcttaggtttattaaaagtataccttaaaacaaaaagaagggctgatgactttcggtcaattagaagaagcaggccttttatccttgaggtgaccttctctgagccctcatttttctattataattaccaccatattctgtactactttcagctcttgtgttcatgtattatttttagacttattactgtgaggttatgtctctgaagccctgatgtttcctaggttttctctgatagtgccctgcctttaatttttgtttctagtgtatatttaataaggtctagagcagataaattataaacaacagtcaggatctggatacattcaatttaattcttgatttatatttctatttttgtggcctataactcaatgttcttcatagaagacagtgatccatgtttaagaaaacatcagcacttagtataaactcatgaaacacctatgcrtctgtacattaaaataaagtgtgaggtgagaatggggatttctttttctagtttctgtatacttgtattttctagcttttctaaaatggtcatgcagtattttgataataatagctaacactaatagagcacttactatatgccaaaacatttctaagcactttagatgtattagctatcttaagataccagggtaactctatgagttaggtaccttcgtgatcctcacatggaaatagcgaatctacaggtacatcctgctctaagaataaccataatactttcaacatagcaagaaattcaaatgctttaaaaaatattctttgtcttttggataactttctaggcatatctccgttgtgtaatttacggcacttcctgcatttgggccacttagtgatgattttggtggatggtgatggcaaggttagtcattataaggacaagagagaagaaaccaattgaactgtatgatgacgcaagcaacagtcatcaccatgtgcttgtctcttcctgacctctaacaattaattgctttagctccctgagtgtcagaaaggatgagtctaagctgctgcttgcacataaatgatgaacatttgattaaaatatgaaaaaaaattatttaatttgcctaaataagcaacatgtttagagccatttaaaacctcattgggatttttagctcttttttgggaatcagcaaaaatagagttatactattgcttcaaatcatttttgagttaaaaaatttcactagaagttgaaaaaccatcccactagaatgaatttagccctctttcaaagtaataacgcctagggccaggcgtggtggcttacgcctctaatcccatcacttttggaggctgaggcaggtggatcacttgaggtcaggagttcaagatcaacctggccaacatggtgaaactctgtctctactaaatacaaaaattaggcatggtagagcatgccacactgtagtcccagctacttgggaggctgaggcaggagaattacttgaacctgggaggtggagtttgcagtgagccgagatcacgccactgcactccagcccggtcaacagagtgagactccgtctcaagaaaaataaataaaataataaataaagtaaagtaaaacttgccactttaattcattttttcatatctacctttttatcacaaggcatagtttttcttatttatagcccactttcaaactgttactgccaaattaactttgaagtacttgttaagttgttcctagcactagggaaaagcccactgggccattatgggtaaatatacctgtttttaaaaggttcacttcctgatataagccatgacaaacgatttcagctagaaatttttttaaagcatttaattgaataatctacatgtaatcaaagatatccttgcatatttggggaagtgtaccttgatgacaccattacttttctttctcctaccaaaaatacctggctgtatccttttgtaccaccgacagttgtactgcttgtaccaatgggaattaattgtgatttcattctttttctgattcttttgtgctaactccattacagtgttggattttttttctttattcttctctttttaaacttttaagaccagaaatgccatcttcaaatagtaaaagctccacttcataacagtgattgtacagtattcacctcttcatctcagactcacttcatattgtttttaacagttgaaacttaactatggagtctctgaagggctttcacaagtaggatatgtctttttctctcatcattcttcaagtgttagataattgaggaaaatagtattcttaaaggaagagaaatgcatacattatgcagtcacgatgtacagtgatcctgtagtacatcgagctaatgagatttgcatgtagcatccgtcatggtacctgtacttaggaggttctgaggaaatgttagtgcctttcctctcaatagatcatgtataagctattaatataactggaatttagcaaatatggtcttatggcagaaaaaaattcttctgataatccttcaaaatctaaagacagaattatatggaatgtaagcaatattgatcaattgttttaatatctgttgctgggcacagtttgcttttctagtgagtactgaccatttcgtgctatggcaggaagattttctcaggttactcacccacatatgatatgaatttctctagctacataaggactaataatatagttactttttcattttttggcttcttgtagagaaaagtaagtagatatgtttttattccagaggtccattttcttaaatataacaaacatattagagaatttccatttatattaaccttcaaaactgattttggaattcagcagatgcttttataggctgatgagtttctccaggttttggatgtgactgcttcctacgacagttttctagtaacccactggttacccccttttcttatgaggtcagacactgggctgtatactattttgtattatcctttcatctgctaagcacacggtacaatctgtgagctgtgtatcaaatgaataatgtaagatttgaacagttgcttccaggagcctaaagtttcttagtagccttaatcctcagcattctgatttttatccacacacccttctcatagctttccctyccagtgcttccagaaactgacccttctagtgacgtctgctacrgttgttttggaaacctaaatgggaaaggtaaacataaattcctgaactcaggatatatctaagacctcacagagtccccttatcctctttctgtctagtgggggaagttggcatatgcagaaaccatccagccttcagtgatacacaatgaaaactagaattccataaaataaccctctagttccactgcagagattgtacatgagcttcagtcagtcatggaatattctgtcatggattgtcttatatttcctcaggaatgtgttaagacagtgtttaacacagtacctagacaacaagtgctgaatagcatggatattgttaagtattttaatgagattatttgatgtaataattgttataattgagtatatttccctatagctttagtgcatatggacatgcagaaagatgttttggcaagaaacctgttttcattcttcttggttgcagtcttcatctaggaaaatacagtagtcctatcaccctgcttatccacagggaatatgttgtaagaccttcagtgattgctgaaaccacagaggaccaaacctgatatggaccatgttttttcctatgtataggtacctatatgataaagtttaatttataaattaggctcagtaagatactaacaatatcttactaatagtaaaatagaacaattatactgtaacaaacatgtaaatgtcgtctttttcaaaatcccttactgtgctgtactcacctgttttcggactgcagttttctgcaggtaactgaaactgtgggaagtgaaaccrcagagaagtggcgactactgaaaaaaaagaactatttctatttcttactcaatatcctgtatttagatgggactcagtacaatggttacactatctttctgtgcctcagagtcccatctataaactggagctaatactatactgtacttactttatagggtagttgtgaagttaatgattaagtatgtgtaaaacagcccttagaacagtggatggctcatagtaagtgctcaaaaagtgttagctgtcatacttatcgttgctgcttattagtatttttatggtttgttatttcaaaagaaattcatttcccataacaatattattttcttaaatatgttaagctttaaaataaaagcatatcaaatggtttacttgtataattacataaattgccattaataggattggtttaatcctcatttgcttagtggttaccaatagaacaaactcataaaaaggaatgttgttttgtcatcctaattgtcattttagcttcttagagtggtgtgtttttgttctttaaatactgtgatacttgagagacttattccaatctcagtgttaaaagtatcactgtattttatttttcacatattctgttagaactatcacagaatatagaatattggttataatgcaaaatgctgctttaattattttccactcattcctttcttatactcggtatttttcttttgacaacaggaactttttttcagctcacctcaccatccccctcactctatcgatcatctagggaaggagcttgcagaaggaatcttaaggaattccttctttctttttttttttcttgagacaggtctccctctgtcgcccaggctggagtgcagcggcctaatctccgctcattgcaacctctgcttcccgggttcaagcgattctcctgcctcagcctcccgagtagctgggactacaggcatgcaccaccccgcctggctgatttttgtatttgtaatagagacagtgttttaccatgttggccaggctggtctcgaactcctgacctcaggtgatccacctgtctcgacctcctatagtgctgggattataggcgcgagccaccgcgccaggccttaaggaactttcatacccctcacaatatcgacatctagggaaggggcttgcagaagcaatctaaagttttgacccaggaaaagaactttatgccttgatttatggtgttgctttatcctgattttttctttcagtatattaaattattttatttttctttgtaataattccagacagcatattttcaagagtccaaagaaggatagacagaagatatgtttagcttgaattgattcagacaaattggttaaaaaatgcacttggttataggctccatacagatcattaatcataaggatttttcaggacagaaaagaggaagcttcctttcagaggacaggaatgtgtgcccagttatagctagtatatgtagcgaccagtacatgtagcgacttgtaaagaggttaggttatccaccgtggagcaggtcccatcatttgtgtatccaaatcaaggaaataggtaatttaaagaatgaaggatgactgagtcagaacctcccagagctgttagctccttggcaaaaatgaatctgtgacttcatgggaacaygctcttggattaccatttaaattgagtaattaccctttgttcggtaattgatctcccaccctaaggaaatggtatcaccttggaatatgtttattttctctatccctcccactcactctttaatggtatacatatttcaagcatagagacgagaatagaaaaaatgtaataatcactaatgcacttactagctttattaaataatattcttccataatgctgtagattatttttttaaaaaaaattacagatgtggatgagtctccytgtatcatcatttccctcccttcttctaaagtgggaatccccatcatgatttagcattttactttcttatgcatgtttttatacttctaatctawacgtttgcatccatcaacataaacattgtacagtattactttgtagatttgaaatgttacgtaaatgttctcacacgtgttgtattattttgcggcttttttgtagctaatttaattatttctactttatgtagttatattcattcatttatcctgttggatgttatttcattacgaatattaatatgttatttattcattctgttgatggtcatttaatttattcagtttttttgtttgtttttttttttaactgttaactgttacagtaaacattcttttacatttcttctatacatgtggaaagttttagggtgtgtacctgaacatggaaatgctgattgattttgaaagtggtggtgattcctcttagaatagtatatgagcatttttctttctccatattcccaccaatgcttggtgttatcagaccttatttttctcaatcagagcaggtgaaatggtattatattatgacatcttaatttgcattgtcctgattacctgtgagtttaaccattttttataactttgctagctattcaggttttcccttttgtaaatttcctgatcatataaatagagcatatttcaaatgatagtctcatttgttaaaggtaggcaaaatagtcttgttgaaacatattttgagtattgataactaatgtgtttattcagagggtgtaattaatatacatttcaatgacaaaaatgaacttaggagaagaaaaccactgtcctggtaaatatgtcctaaactctatcattttggtttttgggtagaaagcatgttcagggaggtgggtgcttcacttattacttatatctggtatttctctgtttatttgaatgatgaggaaggtgctgattttatttgctaaaattatgattaggcaratataatgagctcggagatagtgtttgcagcttgatttttatgagagagggcagaagattggatggaggggtgaggaaatgaatcaccaatacaagcatggcagctggatctaaagaccaatgtacaaatgcaatsaattatgtacctatatgtaaaatggtgagaataggtattatttgcctgggaaattcctcctatactttccaatcctcagtatagtaaaatgctttttctattattggtgaaatcctttgcttcatctctatctccagaactcagtgagctcagggaaatttttaacatctcagtaatatatcctttggcatttgaatatataaatgatttagaaagggactcatttagttgagaaatagcaattttccccaggtattcagttgacttttcctaaatcagattaccttttagtgtgcaaacagtggtcgcactataaatatttgctgtctactgtgattggttgaatgtgtggttaatctgatgatctcttcttacttggatttactggggatggggctaattacatccttcaagaacatatggcctgctgacttgtttacttaatgtcttgtctgcttaatgtgacccacatgtcctgagctcccccactggccctagggcgggaaggaccctagccccttgttggtcacatgggggttccaaagccccttagttgcagcacgttttggtgtctgatatctcctctacttcctttatgtcaccatttaacctccatgttgtgctattctagtatatgaatatcaccatattgtttatcagtgttgcagtctgtagtgaggatgtttgacatatgaattaataaaacccttatagggcctatgtttttaagtcttgacttcctgcaacattgttttaaatgaaatagttcatatgtattttggctacccacgtcattaggctaaaaaatcttatctgtattgtctgccattttcttgctgtcccctttctgtaggacttctgtaactctgctgtctcccttctggaagactttgacaacataatggtaacacccctgctgtcattccttcctttttctttcttttcttttttctttttttttttaataaatttttatagcattgccctttgaacgtcaaaatgagaagcaggtttttctgtagctggtaataattatagtcttcatttcactgttaactcggtttatgtttgagactgtaacacagaatcatgaatgcattgaccatgtttaatttaatggaagtttttttctgaaaatgcacccctttgatcgcctcatgatttccatcatatacatctatggtatagaaaccaatagacattcatggcctgggcttgggaacatagaccagttcgtgcaccttcatctcagtcccagttttgaacctgtctattcctgagctcttgcttctctctgtggtaatttatatcattagtagaggaatgcatggcatgctgattcataggccaatgcaagataatgaaaactgtggttatgaaacttaccctctcatcacatcccactcactggctattcccaaaatctcaacggaacacatcatctctattttctttccagtatggagaagatttttttttgagcataggtcttgtgcatgcatgtcataagacttcatctctactgctttgcctgggctagctaagaatgcatgttttgcattaaattacttataggtttctgtatcaggtagccaacccacaacataaacccaagaagcattagaataaaaaagagcacacatctcagatgtgactgtaagttaacttgtttcactgccattttaatgggtaacattatctatacattgataaagatatccttaactgcatattcaaactttgaaaatatttaggttatttaatacttgttgtataagcattttctccaatagttatttcagcaaaggaaagcttggaaacttttctgaaaagactcagtttttcttgacagtttatggtattcagggggcaggtgaggattttattgaaaaacttgagttaaactatgaagttcaaaaatgttttggagacagcttatgtttgctatagggcattgtttattattcaggtgataatgtaattcagatagaaaacaatttgcatcaatcactggctttttaaaaaatgtttttattgacagctattttatgtataagtatttaaagtcaaaagaaggttccgtgatttctatattaattcaaagtaatgaaaatgtgtatttttgctatccattttaccactcttatttttctataatattctgctttcttaggaagttaatgaatctatactcaatcagttcttataatatatggacatgctaaaatcataaaggttcattactgtatgggatgtgtttgttttagaatgaatcagactattctagcagttagttactgttcattgattcccaaccaagtcgtatttgaggtgaaaacttttaaaagtatcaagcataactagccaacaagacctcttataatttagaatttcctctctctgttgtctgcagttgaaataaaccagtatgatgtaatgaccacaacttctggttcataccatgtggtgttttagcctaaagcactcagtaacttccaaactaggagttataaataaaaccctttctgctaggtgacttgtaaaacattacccactggtttttgttatgtgccttttattacttttttccaaatcagtatttccagaaaccaagtcacaaaatctggctgtggtttttatagatataacttgtctctctacttgtaacccttaaacactactgaaaaattactaaataaggatttgaatcattactagtaaattgagtggataggaaactcctgattctaaaatgctctgattataatccttactgattgctaattggaggtataaccagtcctacatgaaaaggagatcttcacattttctcatttgattgagggtgtagttgctaatacagatcagattaagacacagaagaatgaaaattatgttcgaggatcattaaaaatttaaaacttatcggatgcattcatttcaaattatgccaaaagcctttgagtcaacatctctttgagctcacatacttctgtctaattaaaaaatacagcagtaagagagagaactcttcttataaaggttaggaagataggtcagtattgaacagcacagcttctttagaagttttttaaaaatggaaattttagaaagtacatatttatttaatgttatattttgtttatagaggtaagcccaaagcagagtgcatgaaaatgaagtaaagagaccatgtgtaggaatttacctcaggtagcaatgtagagatgggcttatacaattattagactgtcccagttctctgtagatcattccctttgcacatacaagtcaggtatctgagccatggaagcttgagcagggaacaaatatcttattctctcttactgatatgcttaaaatcacatagcacctgcctagacacaaatatgccaccaaaaaccatcttcctgcaggctggatgcagtggctcatacctataatcccaacactttaggaggccaaggttggaggatctcttgagtccaggaatttgaggccgcagtgaagtatgatcttgccactkcactacagccttggcaacaaagtgagatgctgtctcactttgtgtttcacataaacaaaaacaaacaaatcatgttcccatatagttctctccatgcattaaaaaataygaagttaaagtggcctcagttgttttggttgagcagaataaatagggagaaattaagttactcttcagatactaatgctggcaggaagaagaaatcattagaatgatagatgctaaacattaaattaaatttgagttttcaaaagatggagctgacaactgtgaagcaattagaaagcacttggtaaagtaattgatgctcaaacataaatcctaatttgcctctggatttcttggttaacagataaactaaattaaatcttagttattctgaacagatatttactgagcacttactatatgtgctaggcactaattaaaaataaagcttaaaaatttttcagaaattaacagataactaaggtgaccagatgtcctgatttgccaggcatggtctcactttgccctcttgccctgtcttgtcctagtttggatgacatgttagatagtctgttcttggtttaatgtggccaaacccatgcctaccaacatttaaaagtttttttactaattctcagtctctagtttcctttattattcccacattgtggttcttatttaacatttgtaaaatatttcaagttattaaagaacttattcattctgttctcaactaattgaactgtttctacaaattgaaataatgtgttcctgacattattcttggaaaaacaaagaaaagtaggaatccatttcattctgataggagagattagggtgttttctttttaggagcacatgatgataacagctatgcctggcaaaattgggaagtgctagtcaaatagggatgtttgtgattttctcagggagaatattgcatatctgaattattttccatacttaagtagtatgttgggacaaactggtggtcaggaggaaacataatatgctcacatataaatagttcacctttagacataaaggtggaaaatkttagggtgtgtacctgaacatggtataaaactatatacaaaaactatatttccatttgtatttctttttccttttaaaagtatggcacaattttctgaatgttttgtgatttttaaaaatgtagaataatagttttcagtttccatttcttcttcttcttttttttttttttttgagatagggtctcattctggtgcccaggctggagtgcagtggcacgatcttggctcactgcaacctctgcctcccaggccaaggaatcctctcacctcaaccttccaagtagctgagactacaggcacgtgtcagcacatccagctaattttttgtattttttgtagagatcagatttcaccatgttgcccaggctggtctcgaactgctgggctcaggtgattcacccgcctcggcctcccaaaatgctgagattagaggcgtgagccaccgcacctgcccagttcctatttcttaaattcccatgatctcaaytaatatatgtaaataagaatattgcccaatagctcagatatataccttattagtattctagctccccccaccatgtaagtcataatgtgtttcataaagttcttcaataaaagcaaaagaagagcgaagagttagaaaacatctgctttatgcatctgaatgcagctgtcacatgcagatcgcattctgcttcccacaaagccaaaagagggcacgagtgttataaactacctatagatccctagattctaactcatatataaatagttgatttttctgttttgtaaaaatggtaatatacatatatttgtctctacaaagaagcacaacagtatgtctcagggaccttgtatgatgctartgtccaggagtggtctttaaggatctggttgatttaattattccttggcatagtgtttggaggatcaagagccatttggattctttgggaagaacagttttaggctcctgatggtcatactgtcatggtatgtgttctcacagaggaagtttgggctatatttctctaacccaagcaaatggagatacaattgtttttttaacagattaatgagttagagactaagagtatcttcatgatagcctactctgaaagtaagattcttgtatgtataaataccctcagaggtacactcaaaaatttatgtttcattcatgtgtagatagatagtcacctagagagatgctgaagtttcgtaaatggccacgtgattttttttgtggggatcagagaaagggcttaactgtcttaggtatgcatttggttttggtatctcattaataaggcttaatagagattgtccttttggtttttcattaggatgattttaagaggctatatgtccttaaataataagcaccaaataagtattttcatccttaatgtcacacatggaggcatctcatgataatggaaagagccctaggctttcaagtcagacttcctggagtttagatcatggcactgccaggtcttgctgggcaagtttgctaagttgcttaagctctttgagcctggcttttcctgtctgaagaagatgagaatgatgctcctttcctatagggttcttgtgagaaaatgagagtaagaaccagaagcccagcctctgaaatatgatcgattcttaataatcgttgatatccttcctcttaagctacatatttatccctttctccctgctagaaatacctacactacttttcaaacacattaaaatagctttatgtaactataatttagcactttttaaaatgagaatctctgttaaagacagtagtaaaataatcctacaataaatctcattctttacaatcagtaagtcctgaaaaaaaaacagagtggtaggaaactaggattatttttatgattattactgcaagcttccatgaagtaacttctgccaccaaaacataaaacacacataccattgctcttgtgaatatatttgttttcttatggccaaaacatgtattagattaagattggtgaacagatgttaattggttttattttgcattgtagttggttggaattatgtttgccattaacttacaaaatttatcgactatattctcattgatttttagagtcatagaaagtactaaatgtattccttgaatatctggctaaataggcaattagtaggtcactgtgaagaagcttcattaaaaagtcataaaaattttatatgccaccgtgtgtctgtaccacacgttctcttccctttataggcactgggtagtgcagccctgtggttccagatttcacacttagtgggacatttataccctggcatgtattggaagccagctgacagcctctctgctgagcagaccattgataacttaggcttgtatttatggctttgttatcattgggaaaatctgtagtsttctttggaaggaataagttcaacagtctaaacacataggatattgatgagaaataatatttaatacattttgaaaatctttgagttctttatccatgtaatgagattagatgtgggttatttggattattaaccagaagctcaaatcaagcccttgctgttatgatcaagagtttgctttggctttgttttccagggccagccgggggaccaggctgctctctttgctgcgcaagcacggccctcccctcagctccctcagtatccagggctgcagcaagcacaggtacccacatttgctttgtaggtactgacaggattttcaaagctctttattggaggtgggaaattaagtaaatagaatatatcaactccctatagggtctagaacttgattacttcttctacttatagattataattgatatttcaaaaaagcatgatcaggattgttgaagtcttaggattgattaaggagcataaaacattctagaaaaccctttaaaagtgtaaattcaaaccttttattagtgatgattatagatattgaaatacttaacaatcccagagttacttcttttatgttataatgtataatgatgtaattcagttttgaagtcatcatatttgggctggactcagtggctcatgcctgtaatctgcactttgagaggccaaggtgagaggattgcttcacccccagaatttgagaccagcctgggtaacatagtgagactcagtctctacaaaagaaaataaaaattaaaaaattagccaggcgtggtggcatgcacctatagtcccagttgcacgggaggctaaagtggaggatcgcttgagcttgagaggttgaggttgcagtgagctgtgatctgttgccttgggcaacagagcaagaccctgtctcaaaataaataaataaatagaaattgtcatattcaaagatagcatcaatgaggaatcatggtagaataagaaaataacggggcttgaaatcagactttggcacagttcctagcaacttactagctgtgtgacattgtgtgagttacttactmtgagcttcggtttccttctctgtaaaatagagatgaagtgtatgaggacaacctatggaacaaccagtggaactaacctatggaactaacatagtgcctgatacacaatataatgcaaatcttgagctacttttactaataattttgctatttctgtattcgtatactctcaccccatccctctgggaatcaggaatgcaggggtgttggcaagattgctagttggattgacaattcaatctatgtccacagctgaaagaaaagcccacattggcctacacaggcactgcgtccttcagcctggatccattcatgctgcctgctagaagttcattatccatttctctgtcttccaagtcagaggcattaaactacctgaaaatgtgctttgaggatttgaagagcaatgttgttctaccttaattagcattgtgttctataaattgtacctagtgatccaacagaacttcaggtttctcttttccataaggtgacaatacacaaagaactaggtacttgtatattaatattcattaggtaaattaagtgttcacattattagtagagtgccaaactaggtccagcccgtactagaggataatgaacagttaccaattgcaccattcctggctaaggtattaatagttttttgttattgttttggaactggttagttactacacacacatttatcagacctgaagaggtgtagtcacatactggaaaagtgtatttcattattttaatttacatttgagcatgggtagcttttctaattttggaaatgatattaataatacttcatctgttgaactttggtgtcatctgtgcactgaagatttagatgcttgcctgattgtttctatatagaaacatgcccttctctaaaaataagcagctaatcttaaaagccagtttaactaaatgaggattcattttttttaagttgacatttctggtgagtcattacacagccagatcattctgtggcttttctgaccakattccctgcatccagggtagtcctcctcaaattttgagttatgagaacctttgaaaacagtgaatttcaggggagtcstcatgggtttgtttttgccccatatatcgtagtgatgggaaagctaggtgataagttgaaacattgacttcttcccttgtgcctacctgcagaccatgccacagggctatacaatgtatgggacacagatgcctttgcagcagacatcgcagcagcaggctggcagtgtggtcctgtctcccagctataaytccagagcctatccggccgcacattccaaccccgtgctaatggaaagactcagacagattcagcagcagccgagtggctatgttcagcagcaggcctcgccgtacctgcagcccctgactggctctcagaggtgatacatgtggaaatgatgatggcaataatgaacagtcacattctcgggtttcttatgcttcttatagggcatggtactttatcattgtttttatgagcttgcatatttgcagataatttgcattctgtcatctcgtttttagtagtatccagatagaggttcaacataaagaatgctccatcttgtttatttcattaaagatccttacagttttgactcatgtcttccaagacatgagtgtaacagtctttacgtgatagtgtgtttgcttcagtgttcttttttttcctcttcttttttaaaaattctctgaacatatctaacagagaaaactcttgattattgttaggaatgccttactacaatttgttgattggagcaataaaatgtgtgattgcaatactaattgtgcatggtgcacatgagagttttgttataacttagtttctaccttttccacctcaaagatatttggcaaaacaggattatgatagacttttttctgttcttgtttaattagatcccttagagtgtataactgtactgtctgttgtagtagctgccagccacctgtggctgtttaaatttagactatttaaaattaaattaataatatagttcctcagtcacactagtcacatttcaagtgttcagtggtagccaaatgtggccagcaggactagcttcaatggtgtgtgacgtgcactgtgtttagaagggcctgtgtttaaaaaggcttcatgcttagtttaatgctctgcagtttctctgtggaaattcttactaagttttgatcagggagccttgtgttttcgttattcactgagaccccaaaattatgcagttcgttcttgtggctagtagttatcttattggacagcgcagagagaaaacattgcagccatcatagaaagttctgttrgatagtactgtcttagcagcatcatgtaaaacgtgtccatctagtggatagcagcacagctcccatctgttaccatcaatggctgcatgacgactccaagtaatcgctctttggaaagttrgcaaggttgatggtaacacatttgagaaaatagatattttggataataatttggaaaatgtgcattgtatgtacaatttttataataaatagcagcatagcatggcccacaaacttgaatttcaaagcccaaaagttctgggttcaaatcccacctgtgccatttgctttcttaataagttacctctagctctgttttttcatttttaaagtagggataacgaaactgctgaccttaaagggctctctggtggggagtaaatgaagtaacacatttcagacctttagtacagtgcctgcttcaaagtaaatgctcaattaatattcctcgttgttaaaaactattaaatgtttaraaagtgatttattgcatgactgcaattttaccttaagtcatgtgcttgctgtactttttcaagtggtcacatctattattttaaccactgggctttagtctatttgaattgtgcaaaggattattgagcactgattgtttcttggttggtgtatgtcatgtgctggtagcactgattaaaagtttgacattatgcttgggcctgaaccaagttgcattattctttgccagactgaaccatcaggctctacagcagagccctctggtgggcgggggaattgatgmtgtgctgacttctgcacatccaaaccttccctccgtgcccctgcctcaggatcccakgagacccagacagccrcaagttcgacagcagcagagactyctccaggtacggggcagggagatgagggcaatgccatcacccttcagacagtgcaaatatgcaacagtcataaaaaatgaaaaacactatagttgtcaattgccarattccaaggatccctgtggatttgatgctaggagctacrttggtacaatttagttacaacttggcaagaattttattttctctgtgtatctaccaggttatgggcagaagagtacgttttgcagaacattcttcccatttcacaaaggtttgggagggcagacggatgcctttaatagagttggcctcagcttacccagtctctgtttaastaggagccatgcaaattttttaaaagtgtcataaatgtgaaaacaaaaaactgagccatccagagctttcatcagattcctagagcattctgcaatytaaaaacatttctataacacctctggtctgataaggctgtgaaatgggaggaacatagactgtttcaaaggatatttcatcttgtctttgttagaatccagagaactgtcattcacttatttgatgtacattttaagtcagttagataaagggttcttccccttgatacatttttttttttttttccccttaagacggagtctccctctgtcacccaggctggacaacctccacctcccgggttcaagtgattctcctgcctcagcctcctgagtagcagggattacaggcgcccaccaccacccctggctaatttttttgtatttttagtagagacgggtttttgccatgttggccaggctggtctcaaactcctgacctcaagtgatccgcccacctcggcctcccaaagtgctgggattacaggtgtgagccaccacacgcagcttccttgatatgttcttgtttctgacttgcttatttaaaaaatataggccattatgtttacctgtgtcatttgtcttcaatattaacaagcttgtcctatgttattggactggagatttcctaaggagactgtacagtgggctctaatcttatcagcagtccaacttgagatacacacttactttatatactaccaagaacagaacaccaaaaatgaggaatctagtagagctggagtgcccaagggctgtactctcaactcggtatgaggtcagtgagaagtaaacctgccatgcagaaagggacacaaaggagcttggatgtcttatccttgacactggatagaggggagaaacaaatatctcccctgagcatttgaaccacaagctccggtgggtttgagtctgaattcagtgtgatccacaaaattctggttggtagtgcccaggtgacaggcaaaagccaacacaccctctggaactgggcttcccaattataagatgccattagtagtaagatgtcattagttccatcccaatttgtgacctgttaaaaatgttaaaaaaaaaaaaagttgtatcacaaaattgataacatgtggtaaccgattaggagagtatggccttcagatagcaatctcagtcattgtatagatgttgtttccaatggtaaaagctctctaatcctgttttgtcatggaaatacttatagtacctatctcttaaatatgtagaaaggattaaataagaatattcaagtaaaccactcatttgataattttacgattaatgttatgactattatcattactatgagtactcactttcttaaatcattttttccaagttctgaggctatgtttcagaattttttaggattgataatttatattttgctctagtttagaatttctcatttccaaatcactgaggaaagttaccacattatttgtttacttaccagttttaaatcttatgttggtgtttttcaaggctgcaaatacggaaagccttttcttattagaccatatgtactttttatcctaattagcataatatgtccttctggtaattttttcatcatcaacacattcttccctggagataagtgatttgcttctacaacaggattatacttcttttttggtgactggccacctctgtaaaggaaaaagttaataatgatgaagttgggttaatttttcttagaagaggttctagagggctaactggagaatcatattgcagtcattgtgatttgggtccaacttgcgttgttcttgttgggatcatgctacccagacctctgctaggattccagatccatgagcattgtcacttagtgagacatgccatatggcaatagctatttattagttggctgtaaagcagaccagtaattgaggggatagtatgcaaaccaagttggaaaagtacaaaagatgaagaaatgtctagactgtcatcattatcaggatgaagtgtttgggtggaggaaattttaaaggtcattgaaacaaaacaaaacaactattaatatttttctctcctctgtgtcccaccttgtggatgtctggtctgtgctttttctgtgacttggaagcattttccaagagctgtgtgtttgagccaaccctgttactgacatgatttctgaatttctgatgtaaattatgccagaaggtgtcatggcgactagtctgcctcttccttttggaaaaaaacaaaaaacaaaaaaaaacctttaagaattctgccagatatcataaagaatgagaggattactactgagcagtccctgtccaacctgtagtgtaagaagggataaaacatgcggaaggacaaaggacatgaaaggaattaaaacagtaagcagaarggatggcccyggacagcgcagtgtggaatagacagcagtactgactgccagtggaagagatccgtagggttggggtggtcctagaaggcttcatggatgagcaggtttaggtcttgccctcaaaaggacgaatgaggttcagcaaggtagagatgcagcaggcaggtatatattgtttttactacaacataaaaattagataaaaggtatatgggggaaacagattcagcaatgctgttttcttcttccttttaagtgtataacatttttaccctctttccagatgcagcagccccagcagccccagccccagcagcctccccagccccagcagtcctcgcagtcccagagtcagacccttggtctccaagcaatgcagccccagcagcccttggtaaggcctgttgttttggaatcagacatgtgggtttcttctttaaaagcaggttgcattgttcatgttcataagattgttaagaatcgacaaagcctaagtataccctaaaaatttttcctagaactttactagagttttattgtcattgtagttggtatatttattttcataggaagatacaagtaaatatttgggattcagtaggttataccattattcttcaaaatttttcggactgttccacagacaaaattttttacattgagacgtggtctttttttcctaaacaatgataaaacgatgatttactatgtatgtttaaaagattgtcttaccatactttgatttttactataatctcaaaaaccatgggcgcactttctaaaatattatctattatcttcaataagaaattgtttttcattcagttagcacttgctgcaagagttttcatgtaactcacagtcggatagttcacttctctagcttcataaatcaaatttggaaatgtcatatgcatagccatcaaagttttctaaacctcagtcatttacaacagccatattcctgtttcattaattacttttttttaaactgtcatcttattatatttgcttaaataaatgtagttttcaaagaagcattttatcattaccatccataattatatcacttgccacatattggaaatatctgtgaaagtaaatacaaaaataatttagaagggaatctccatttaactgagtgatgtgaattgcatgaatgagccctacctacgatgagctggctgaccgctcatgtctcacactttgagaaacactagtgtagactgccttcagcacaggatttttaaactagctggtttcacaacttgtagaaaagggggaacaacgtggtatagagatagtacatatggagggatcagagtagagttaggtggttaaagaactgcgtccaaatcagattgaccagaacatggtcaactggaatagggcatccatagtacatttaacaaactctgcgtaagccagtttgttccgctcccccagctccccccccgcctttttttttttttttttttgagacggaatctcactcgatcactcaagctggagtgcagtgcgatctcagctcactgcaacctcctcctcccaggttcaagcaattctcctgcctcagcctcccaagtagctgggattacaggcacctgccaccacacccagctaaattttgtatttcaccatgttggccagactgtggtcttgacctcatgacctcaggtgatccacccactttggcctcccaaaatgctgggattacaggcgtgagccactgtgcccggcctattccccatttttaagttaattctttttaattatggatctagtttttccagctctgatttaaaaatatatatatgtttgtgacatttactgcaatctacttcagaaaaccttcttaaagtagaggtagtatgtaaaactgcactgcctgcctacctatccaatgtgtattagcaggaactggctgttacttagcaaatgttgtagaagagattcctttggatgcaccactgttagctgagtctagtgtcccgtacaagaacgagatacaccttttgttttgaaataatttcaaatgacagaaaatttgcaagaatagtacaaagaatttccataagccctttacccagatttactaattcttaacattttgtcacatttgctttattattctctctttcactccccccacctactgccatttaaacatacatgtgcctctttacccttaagtactttcacttttttttttccaaaacaaagatattcttttataaaaactgggtattattaaaattaggaaattgaacattactacaatgctttataacctataactcttttgcagatagacaaattaatgctctttattgcattgattttctttttcccctggttcaggatcatcacattttgcatttggctttcatgtctttttactcgccttcatctagaccaattccaaagctgcctttttgtcttcatgaagttgacatttttaaggtctatggaatgtttattttgtagaatgctactcaatttgatttatctgcctagattaatcatgattagattcagattatacatttttggcaacattagaggtgccattgtgtccttttcagtgtatggcattaggatatacattgttggtgatattactttaatccttttgtgtgtcttgtgtctgatagatctccccactgtgaacttattattttccctttgcaattaataatttatgagaatagtttgataaatctgtcattactcatcaaatcttcacacactactgttagcatctattaaattattcttgcctaaattcattcttactatggatgtggaaaaattatttttttttaatttttaattcttttaattatggatacataatatttgtacatatttatgtacagatacgtgagatttcgatacaagctttcaatgtgtaatgatcaaataagggtaattggggtacccaaaatcgcttcaagcatttctaatttctttgtgttatttcgtgttgtttgtgtttctttgtattccacttctactcttttagtgattttgagacatatagtaaattattgtaaaccactgttgccctattgtactaccaaacactagttcttactttgtaatgggtacaaaatggtgatttttcttactcttatgtttctgcatttagcagttggtatttgtattagttagggttctctagagggacagaactaatggaatagatatgtatatataaaggggagtttattaagtattaactcacatgaccacaaggtcccacaataggctgtctgctggctgaggagcaaggagagccagtccaagttccaaaactgaagaacttgggagtccrgtgtttgagggcaggaagcatccaacacgggagaaagatgtaggctgggaggctaggccagtctctcctgttcatgtttttctgcctgctttatattcgctggcagctgattagatggtgcccaccagattaagggtgcgtctgccttcccmatcgcactgactcaaatgttaatctcctttggcaacaccctcacagacacaccgaggatcaatactttgcatctttcaatctaatcaagttgacactcagtattaaccatcacaagtccaccccttgtctacttgagcccatacacacctcctgagatcagacataatcttcaaataaagacaatagtaaggtcgtaattacagctaacataatacaactatccttcctgcaaccggaaacgcaccaatccccaacccaaatactattacataaagttaacaatgcttaaatcctgatatgaagtcagtaaatcctatgtcacatgayaaaggaaaaggaaataaaattaagatattagtacaagtgtatacctgcacaaacatgtttttaacaaaagaaggaggaagtactcatgacagttacagtccgcttttctgccactgtcacgtggtcatagcyggtattgatgactaccttcttctgctacccattctgtattcccttcaccttcagcaagcacctcagcaggtcgtgtttttcttcctggttgagtgacccaaagcattcctgaggggtctggatcatttgtagtcctgtctggtttgggctgttgtagtttcccattgaccttaatcacagggcatagtaacactaagagacgccctaatggatctcgtgtattccatgaatactcttccttacctctattgtggaatagtagactgatttcatcttgatagtccgggtcagtcaccccagccaacactgtaactcccttcttagcctgttggcttaaaggtaggaggagcccaaagtgtccaggtggcaatcttaatttccagtttaatagaatcattgtattcctagtggcagtgttcctccctctggaactaagacctctaggccagcagaacgtaatgttgtgrgaacaggaagcaaaaattttgctagtggatcactaggagtgatggtgagtggtgccacttccacttctaccccttgattcctggacttgtgaatcctggctatgggagaaacagtactatatattggatactgattaagagcatacacggccttctggagaactttgccscagccctgcaaagtattgtcacctaattggcattgtaattgtaacttcaaaaggccatttcaccattctgtcaatccagctgcttcaggatgatggggaacatggtaagaccagtgaattccatgagcatgagcccaccgctgcacttctttagctgtaaagtcagtgccttggtcagaggcagtgctgtgtgggataccatgatggtggataaggcattctgtgagtccacggatggtagtcttggcagaggcgttgtgttcaggataggcaaacccacatccggagtaagtgtcttccagtgaggacaaacctctgccatttccatggtggaagaagtccaatataatcaacctgccaccatgtagctggctgatcaccctgaggaatggtggcatatcgtgggctcagtgttggtctctgctgttggcaaattgggcactcagtggtggccgtagccaggtcatcctttatgagtggaagtccacgttgctgagcctgtgcgtaacctccatccctgccaccatggccactttgttcatgggcccattgaggaatgacagtggtggctggggaaagaggctgagtggtgtccacagaatgggtgatcctatccacttgattattaaaatcttcctctgctgaggtcacccattggcgagcactcacatggaatacaaatatcttcacagttttcaaccactcagagaggtccagccacatacctcttccccaaatttctttgtcactagttttccaatcatgcttcttcctgtgctttactgtgttttttttttgttttgtttctttgtgtttggagacagtgttgctctctcacccaggctggagtgcagtggcgcaatcttggctcactgcaacctgcacctcccgagttccagcagttcttgtgcctcagcctcccaagaagctgrgattacaggcacgcaccatcacactaggctaatttttgtatttttagtagagatggggtttcaccatgttggccaggtgtctcgaactcctgacctcaagtgatccacctgcctggacctcccaaagtgctgggattataggcatgagccaccatgcctggcaagaaaatttttatatatccttttatctttcggtatttttctttttcttaatagttccactaagatgcattgtatgtattataaatatatttatttatattttataaacatctccagcagattcagttcttggtactagccaaagctcttcattctttgtttttttctttgctagagaagagggtggtaaggtagctgttgaagataagtgaactcttcctgttttggggttctgattcatgctgtatcaaagtggtaatggtaacacattgccccccatcccctgacttgtcctgctgctatctggtgacattcacagttgaattcaataaatgcttttttcttagggtagtgcagaagtgattgcagtcgtgtgtgtggtggagaccagcaccctgccagatgttatagagcgtgccagtgaaacatcacttcctgccactagaggacttagaatcataggaagtggctcaatggcagcactgcctgtggaaagtagtttacggttgctgaatttttgacagaagagctggaggcattgtattagtttgctagaactccctaacaaagtacgcaaactagatgtcttcaacaacagaaatgtactgtctgttttggaggccagaaatccaagattaaggtgtcagcagggttgttggttccctctgagggctgtgagagagaatctgttccatgcctctcctccagcttctggtggctcgctgggactctttggcatcgctcggcccgtggaagcagcaccctgagctttgcctccaccttcgcaggcattctccctgtgcatatacgtgtctacttttttataaggataccagtccttatgcrttttcactttttataaggacaccagtcatattggtttaggtcccatcctaattatctaatttcaacttgattaccactgtaaagaccctgtttctaaataaggtcacattctgaggtactgggtgttacgactccagcatgtcttttttagggaacataattcaaccgaaataataacaggtcagaaggtgagagaagtttgggaagccttgacrgaggaggctgaatgtggcagatgttgaaggcagtaggatttgattcattgcttttttttttttttttttgaaaagaagaaattgaatgttaattttttttagagttagaattcaagttttatttagaattaatgaaaatatatttttttgttcttttgttgctgttgtaagaggaacagaactaggttttttttttttttagcttttgcacaagtcccttctattttaatgcattctaggagatcataaatatatatatatatatatatwttttgaaacggagtcttgctctgtcacccaggctggagtccaatggtatgatctcagctcactgcaacctccacctccctggttcaagcgattctcctgcctcagcatcccgagtagctgggattacaggtgcctgccaccatgcccagctattttttttttttatactttaagttctggggtacatgtgcagaatggattcattgctttttgactattttgttcatctctttgctcgttgacgtcatcagctgggatgtgtgggacaatgatcatcccttggttttggctgtaaaaaatcactttaaaaacttataaaaagttaacaacttgtaaaaagtgactcagggcagaaattagtgcttctttaaaacgtgtcaccagaaaacagagtttttctgtgaaaagagcaagaaagactaagaaaagcctrtgtttacaaattaaatctggtctggacttaatatcaatgcctgtgttgccatctacttacttmagttgcttgtattctgtgaaggaaaaacatctggaaataaagacatgggtacccttgctgggaaaatatatttggcatgtctgattttggcctaaattatagttcttgactagaaaaatatttttaatgcttattaaatcattaaataattttaatgcttcttgttgtgattaagttaattcttaactaaatatgttgacagaccatgatctattctttaaaactacttccagtgttaagaaaataacgttaacaccatcccgctgcatcatttcctttcatcttaaactcaggttgtcttagtttggtgacttaaaaaaatatgctaacagaaagctttaaatagttggctttttacatcgactgatccttgtgtccgtttcatattatattgaatatttgccttttaaaaatatgcataatggtagcagtagttacttaattacattaaattttagtcagtgatcacttgtgaaattgtccttgactcttcctcaagaaattcatttgttccattcagagaaattgagatattttttcagtctgcctctggaattgggaagtagcaggcacagataatatgattctccttttgaagtggaagaaattaggtccagagaacattgagctacgttgccttcctttgcatgaatttggaaawtttttttttcttttggaaggaaaagaagaagtaatatttatagaaagaggttggggaagaaatatcaggagatttctggtaactggatagccaatatatttgatatagtacttttttcttactaaactgtgtacagattagatgactctgccggatgcaatggctcacgcctgtaatcccagcactttgggaggctgaggcgggtggatcacgaggtcaggagattgagaccatcctggctaacacggtgaaacctgtctgtattaaaaatacaaaaaattagctgggtgtggtggtgggcgctggtagtcccagctacccgggaggctgaggcaggagaatggcgtgaacccccgggaggcggagcttgcagtgagccgagattgcgccactgcactgtagcctggacgactgagcaaaactctgtctcaaaaaaaaacaaaacaaaacaaaacaaaaaaactctatgcaagttactagttaccttgaaaataaacacacaaaaaattctgaaacacatcagctgctagctctgtctgagagtgtggactgagagtgtgccgccctgtgagagtggagatgtggctgagtgcatgcacaaccctatacgttgttgttccttccgctgccgcttgtagggacggacgaccatgcttcattcgtcggagcaatctgtggactctgtcagttggtagtgcagttttaaaataaatgttgctttgctgctttgttcttttggtaacaaatgaagtggtcacagcaaaaacctcttaactgtcatgagggaagggatgtattttactctggtgcccttggaacccagaagattgcctggattttgataaatatttgttgaatgactcatttgttggatgtcaaagcaatgaaaaaaacctttgttaaaatcacacattatccataagaaagggaaaacacaattcaggaggcaaggtgtccagaccatctgagcatcggtaggtccattactgaatcagtcctgcagctgattttgtcagcatatgctttcgctgacggggcaagctcaagttttgagacaaaaaatatttaaatgatgtttatttaaatagaaattactaattagcagcacatttttgcctatgctgtgattgagcagaagaagtaaatgttattgaataaaataggaatttagagatcagtcaaaatacatcaaaatacattatcagaattttaattttaatttattttagagacagaggctcaatcttgtcagccaggctggggtgcagcaatgtgatcatggctcactgcagtctcagactcttaggctcaagtgatctttccacctcagccttccaagtagctgggaactacagtaaatacatttttgtttttgtttgtgtgtgtgtgtgtgtgtgtctgtgtttaattcagcaaacaatggtatttcctggagaagtggttataccatgttgattagttatacctgacaktagtaagctgggtattcggtcttgtggttacagcaggagcatggcatggcttctgcctctgagaagtaaaaatccagaatcctagagagagaagcaattatcatgttaaaccatatgtttgctaatagaggcatttacacagtactaaggatacaaaagcagtgattcactctttaaatgcgtgagggaatggatgataacttcagctgatctttgaaggatgagtagatttatgggaagggtagagtggaacgaagtggggaggaagtgtattccaggagaagggatgaacatctgcaaaggcacagaggggagagatcatcttctgtatggatatgggccaaaaaatctttcccacttcatttatcacatttgaatagggaaggcaaaacatacatagattatgatttgggggacctctagtaaaccttactgaacctatttattgacctgttttggtaaattaaaaattcaactcccaccacagtgatgattccaaaatctcaccaggcacctgaatgaaccacttgggggagccattttaaaaattcagatttctagcacattagctacagaaattctaattcaggaagtctagagaggagtcccgggaggataatcctttaaatttcccccagtgattttgtgctgcctcagccacatacagggttcagttcttcacaggaggggttcagtttgaattgaaatgctcagtagtgaggcttctgtagggtgttggaggcagccctcatcccctagtggtaggtgctccagagcccagagaaattgcatctggggcctattgcctgtgcatgtacaggtgaaagcaagttaaaattagtagccagaggccttgagaggaagcagatgtggtaaaacactgtaagaagattgtagatatagatcatgtacttctggtcagtttaaggaagttggtcaaatttcttggcctcagaatcttttcatgttcacagattattgcagacccaaagagcttttgtgtatcaatatttaccatgttagaaatcaaatattygttaatactaaatattgttatgtttagtacctaaagataaacttatgttcctggaagtaacatgcttttatgaaaaataggcatatatttcaaaataaagttatatgagaatgacatggttttacttttttttttttttgagacagggtcttactttgttaccctgactggaatgcagtggtacgatcacggctcactgcagccttgacctcatgggctcaagtgatcctcccacatcagcctcctaaatagctgaactacaggcatgcaccaccatgcctggctaattttagtaattttttgtagagatggcgatttgccatgttgcccaggctggtcttgaactcccaggctcaagctgtctgctcgccttggcctctcaggagtgctgggattacaggtgtgactcactgtgcctggcctggtttacatttttgaaaatttcttcagtgtctggtttaatagagaacatttgatttgttgtaatagcacatgttatgtaggctctggaaagctgtaatgtacgtgcatgagaaaataagtgaaaaaagcagataatgtcttagtatttattttgaaaatggttttgaccttgcagataacctgacagagtcttggggacctctcccaggaatccctggatcacaatttgaggccctctgactatgtactacctcttaagccaccctcacaccaccctgaactccccaacacacacacgcatacatgtgtacacaagcttcctagggtatacctagttactgcttaggctctgcaaaatatagtatctgaggcaaccactacagtgttttattctgtgaaatactctatttgaagcaggctttaaatgaacataaagaaggcagctatgtgtttgttgagtgaataaatgttgactatttgtacaccatgtaccccaatatgctgttcaatcagcttagacatctttatagccagccttttagaatctgtaattatttctgaataagttgatatttggaagctggtattttcaatcatggataggcttgaggggaatgtagtggttggtcaaagggtccaaagtttcatttagacaggaggaataagttttgttgatctattgcatagcaaggtaactatagttaataatgtatattccagaattgctaaagtagattttaaatgtgttcaccacagtgaaataagtctgcaagatgatagatgtcatagatatgggacattttctgggggcagcagtcttaaccagtcagaagtgaacagcaaaatttgacatgaactcattggtggcaaaagctgacctgaatagacatgaggctcttttcatttatcctacctgatataattattcatgtgcttgctacagaaatgtaatatgcttgattatggagtgctgtcctacattttgcctggtctgcatattaggagtgtttcttagtaaactgcatatgttcagattccaaagcacatatctgtcttaggactttggataagagattgaggacagttacagctaagtcaggattaaatatgctaatagacacatagaatgtctggaacagtacctggcacatagtacaatagtttccccaagtaagcataaaaactattgaatagaaaagaatactaacatttccatataaatgaaagattgatttttatttttyactcttgatttgggcaatggaaaaaaatggcaagctgctgcttctctaatttgtattggggaaaatagtaacattggtggagggaatagttcattagttttgtggatctttcttgttattaggaaagttgtgggaattgaaggctcttagaattagtcattccatcagttgctactgagcacctgctgtgtgcctggcagtaccggatattacagatacatcagtaggtatgccaagcccttgtctttcagtcactcactgtctagtgggagagagaaagttgaaccagctgtcatgccaaatattcagttttgaaagtatcagcttggtaatgccctctaaatagaggataagacaggattgccacataaaatacacggctcccagttaaatttgagtttcaggtaaacaatgaataacactttagtgtatatcccaaatactgcatgggatatacttgtactaaatgcagtatttgtcatgtgcaatatttgggacatgcttggaactaaaacattattgtttatttgaaaatcacatttaactggacgtgctgcgtttttatttgctaaatctagcaactgtacttacaatcctgggctattcttgacaagctctgaggaggaaatagatgttgcactggcgttgggtaattgaagagtctttttcaaaagacaaattacaaaggtatggaaaaccagctggaggtgatggcccactcactgactgcccctaatcccagcgggacaagaaggggagagaggtagggaggctacctgacaggagctgcaaccttcccggtgtggggcgtggccagccagcagagactcatggaggaaaattggcaaaaacaaaacttcactctgctccctcccagcctcactgtgctmctatgctccagtctcctgggagcacctcctccccacctagaagtcggagggcagaggagccagccttgttgatgccctccacacaggcagcctggtgagcacacggagagtgggcacatgggaaacagccagcaccgtgctggtgtatgtgcctgtgtcagaacgcctcgtttatgacagtgacagaccaggaggagagaagagggttggaggaggagagaaggggaagaaagaaaaggagaaaacgatagtctgaaatttgaagatcaagataaaaaagtaaattggcactaccagtgattctaaccaaaagtaattttgcttctggtagatgctgctttttttcctctttggaataaccacaatttcttgcatcaacttaatagatagaatcagggcatgtggtcccctatattgtgcctctcatctgattcttcctacagagcctgtatttgcatggccctgggaattagcactttcttaaagttagtgcctcactcactcatcctgcccaggcccgggctctgagggtgggattagcgaaccttcatcctccatcatatggggagggtatagtcccaaatgagccctagtcctagggcaccaccctgcctcaccagattattttctcccatttgtgcaaggcacaacctgtagtccttgaacaaatcttccaaccagagagcttttattttgccagtattaatatcatgatactcatgagctagctggtgaagggtgagatgaccaggatctttgagctgctgagctacgtctgtagtgtggagttcttcattggggctcttcaaataaatgccaactaataacctggagcttgggttcctgaatagatggggtacttcagatgttcaccagatgcacaacaaggtgtagatgaaaattaatccacacacagttgtcatagcccttttttcgtgaagtgttgagaagtaccttacagactggccctgcgagttagtctctgttcttgtctgtgattggcaccatggaatgatttctgtcctttctcctgtcgccattacagtttcccaggcaaggcttgcagcagacccagcagcagcagcagacggccgccttggtgcggcagctccagaagcagctttccagtaagtacccctgtgtgtcatggaacagacagctcccggaaaattaaaaataagccagcraaacgtaaagtggcggctctcccaagatggtaccatcttcctcagtacaatgttcatgttatttggtttagcccaaggtattttcattctgtcttcgtttggttttggcttgaatgcttcctttcctgggaaagccccaatttttctcaaattcagtgaagatactttctttttgcttccaccagaatctagaaatatttcttctcattggggggactcctatggaatcaaaggtgtcctttgtttaaagctggagagttcagggagcatcagctaatgcccttaattatacagatgaataaagttagctggcctcccgaagatcttttttttttttttttttttttttttttcttttttaattattattattattatactttaagttttagggtacatgtgcacattgtgcaggttagttacatatgtatacatgtgccatgctggtgcgctgcacccactaacgtgtcatctagcattaggtatatctcccaatgctatccctccccactcccccgaccccaccacagtccccagagtgtgatattccccttcctgtgtccatgtgatctcattgttcaattcccacctatgagtgagaatatgcggtgtttggttttttgttcttgcgatagtttactgagaatgatggtttccaatttcatccatgtccctacaaaggacatgaactcatcattttttatggctgcatagtattccatggtgtatatgtgccacattttcttaatccagtctatcattgttggacatttgggttggttccaagtctttgctatagtgaataatgccrcaataaacatacgtgtgcatgtgtctttatagcagcatgatttatagtcatttgggtatatacccagtaatgggatggctgggtcaaatggtatttctagttctagatccctgaggaatcgccacactgacttccacaatggttgaactagtttacagtcccaccaacagtgtaaaagtgttcctatttctccacatcctctccagcacctgttgtttcctgactttttaatgattgccattctaactggtgtgagatgatatctcatagtggttttgatttgcatttctctgatggccagtgatgatgagcattttttcatgtgttttttggctgcataaatgtcttcttttgagaagtgtctgttcatgtccttcgcccactttttgatggggttgtttgtttttttcttgtaaatttgtttgagttcattgtagattctggatattagccctttgtcagatgagtaggttgcgaaaattttctcccatgttgtaggttgcctgttcactctgatggtagtttcttttgctgtgcagaagctctttagtttaattagatcccatttgtcaattttggcttttgttgccattgcttttggtgttttggacatgaagtccttgcccacgcctatgtccgaaggtaatgcctannnnnnnnnnnnnnnnnnnnnnnnnnnnnnnnnnnnnnnnnnnnnnnnnnnnnnnnnnnnnnnnnnnnnnnnnnnnnnnnnnnnnnnnnnnnnnnnnnnnnnnnnnnnnnnnnnnnnnnnnnnnnnnnnnnnnnnnnnnnnnnnnnnnnnnnnnnnnnnnnnnnnnnnnnnnnnnnnnnnnnnnnnnnnnnnnnnnnnnnnnnnnnnnnnnnnnnnnnnnnnnnnnnnnnnnnnnnnnnnnnnnnnnnnnnnnnnnnnnnnnnnnnnnnnnnnnnnnnnnnnnnnnnnnnnnnnnnnnnnnnnnnnnnnnnnnnnnnnnnnnnnnnnnnnnnnnnnnnnnnnnnnnnnnnnnnnnnnnnnnnnnnnnnnnnnnnnnnnnnnnnnnnnnnnnnnnnnnnnnnnnnnnnnnnnnnnnnnnnnnnnnnnnnnnnnnnnnnnnnnnnnnnnnnnnnnnnnnnnnnnnnnnnnnnnnnnnnnnnnnnnnnnnnnnnnnnnnnnnnnnnnnnnnnnnnnnnnnnnnnnnnnnnnnnnnnnnnnnnnnnnnnnnnnnnnnnnnnnnnnnnnnnnnnnnnnnnnnnnnnnnnnnnnnnnnnnnnnnnnnnnnnnnnnnnnnnnnnnnnnnnnnnnnnnnnnnnnnnnnnnnnnnnnnnnnnnnnnnnnnnnnnnnnnnnnnnnnnnnnnnnnnnnnnnnnnnnnnnnnnnnnnnnnnnnnnnnnnnnnnnnnnnnnnnnnnnnnnnnnnnnnnnnnnnnnnnnnnnnnnnnnnnnnnnnnnnnnnnnnnnnnnnnnnnnnnnnnnnnnnnnnnnnnnnnnnnnnnnnnnnnnnnnnnnnnnnnnnnnnnnnnnnnnnnnnnnnnnnnnnnnnnnnnnnnnnnnnnnnnnnnnnnnnnnnnnnnnnnnnnnnnnnnnnnnnnnnnnnnnnnnnnnnnnnnnnnnnnnnnnnnnnnnnnnnnnnnnnnnnnnnnnnnnnnnnnnnnnnnnnnnnnnnnnnnnnnnnnnnnnnnnnnnnnnnnnnnnnnnnnnnnnnnnnnnnnnnnnnnnnnnnnnnnnnnnnnnnnnnnnnnnnnnnnnnnnnnnnnnnnnnnnnnnnnnnnnnnnnnnnnnnnnnnnnnnnnnnnnnnnnnnnnnnnnnnnnnnnnnnnnnnnnnnnnnnnnnnnnnnnnnnnnnnnnnnnnnnnnnnnnnnnnnnnnnnnnnnnnnnnnnnnnnnnnnnnnnnnnnnnnnnnnnnnnnnnnnnnnnnnnnnnnnnnnnnnnnnnnnnnnnnnnnnnnnnnnnnnnnnnnnnnnnnnnnnnnnnnnnnnnnnnnnnnnnnnnnnnnnnnnnnnnnnnnnnnnnnnnnnnnnnnnnnnnnnnnnnnnnnnnnnnnnnnnnnnnnnnnnnnnnnnnnnnnnnnnnnnnnnnnnnnnnnnnnnnnnnnnnnnnnnnnnnnnnnnnnnnnnnnnnnnnnnnnnnnnnnnnnnnnnnnnnnnnnnnnnnnnnnnnnnnnnnnnnnnnnnnnnnnnnnnnnnnnnnnnnnnnnnnnnnnnnnnnnnnnnnnnnnnnnnnnnnnnnnnnnnnnnnnnnnnnnnnnnnnnnnnnnnnnnnnnnnnnnnnnnnnnnnnnnnnnnnnnnnnnnnnnnnnnnnnnnnnnnnnnnnnnnnnnnnnnnnnnnnnnnnnnnnnnnnnnnnnnnnnnnnnnnnnnnnnnnnnnnnnnnnnnnnnnnnnnnnnnnnnnnnnnnnnnnnnnnnnnnnnnnnnnnnnnnnnnnnnnnnnnnnnnnnnnnnnnnnnnnnnnnnnnnnnnnnnnnnnnnnnnnnnnnnnnnnnnnnnnnnnnnnnnnnnnnnnnnnnnnnnnnnnnnnnnnnnnnnnnnnnnnnnnnnnnnnnnnnnnnnnnnnnnnnnnnnnnnnnnnnnnnnnnnnnnnnnnnnnnnnnnnnnnnnnnnnnnnnnnnnnnnnnnnnnnnnnnnnnnnnnnnnnnnnnnnnnnnnnnnnnnnnnnnnnnnnnnnnnnnnnnnnnnnnnnnnnnnnnnnnnnnnnnnnnnnnnnnnnnnnnnnnnnnnnnnnnnnnnnnnnnnnnnnnnnnnnnnnnnnnnnnnnnnnnnnnnnnnnnnnnnnnnnnnnnnnnnnnnnnnnnnnnnnnnnnnnnnnnnnnnnnnnnnnnnnnnnnnnnnnnnnnnnnnnnnnnnnnnnnnnnnnnnnnnnnnnnnnnnnnnnnnnnnnnnnnnnnnnnnnnnnnnnnnnnnnnnnnnnnnnnnnnnnnnnnnnnnnnnnnnnnnnnnnnnnnnnnnnnnnnnnnnnnnnnnnnnnnnnnnnnnnnnnnnnnnnnnnnnnnnnnnnnnnnnnnnnnnnnnnnnnnnnnnnnnnnnnnnnnnnnnnnnnnnnnnnnnnnnnnnnnnnnnnnnnnnnnnnnnnnnnnnnnnnnnnnnnnnnnnnnnnnnnnnnnnnnnnnnnnnnnnnnnnnnnnnnnnnnnnnnnnnnnnnnnnnnnnnnnnnnnnnnnnnnnnnnnnnnnnnnnnnnnnnnnnnnnnnnnnnnnnnnnnnnnnnnnnnnnnnnnnnnnnnnnnnnnnnnnnnnnnnnnnnnnnnnnnnnnnnnnnnnnnnnnnnnnnnnnnnnnnnnnnnnnnnnnnnnnnnnnnnnnnnnnnnnnnnnnnnnnnnnnnnnnnnnnnnnnnnnnnnnnnnnnnnnnnnnnnnnnnnnnnnnnnnnnnnnnnnnnnnnnnnnnnnnnnnnnnnnnnnnnnnnnnnnnnnnnnnnnnnnnnnnnnnnnnnnnnnnnnnnnnnnnnnnnnnnnnnnnnnnnnnnnnnnnnnnnnnnnnnnnnnnnnnnnnnnnnnnnnnnnnnnnnnnnnnnnnnnnnnnnnnnnnnnnnnnnnnnnnnnnnnnnnnnnnnnnnnnnnnnnnnnnnnnnnnnnnnnnnnnnnnnnnnnnnnnnnnnnnnnnnnnnnnnnnnnnnnnnnnnnnnnnnnnnnnnnnnnnnnnnnnnnnnnnnnnnnnnnnnnnnnnnnnnnnnnccttgctagattggggaagttctcctggataatatcctgcagagtgttttccaacttggttccattctccacatcactttcaggtacaccaatcagacgtagatttggtcttttcacatagtcccatatttcttggaggctttgctcatttctttttattcttttttctctaaacttcccttctcgcttcatttcattcatttcatcttccattgctgataccctttcttccagttgatcgcatcggctcctgaggcttctgcattcttcacgtagttctcgagccttggttttcagctccatcagctcctttaagcacttctctgtattggttattctagttatacattcttctaaatttttttcaaagttttcaacttctttgcctttggtttgaatgtcctcccgtagctcagagtaatttgatcgtctgaagccttcttctctcagctcgtcaaaatcattctccatccagctttgttccgttgctggtgaggaactgcgttcctttggaggaggagaggcgctctgcgttttagagtttccagtttttctgttctgttttttccccatctttgtggttttatctacttttggtctttgatgatggtgatgtacagatgggttttcggtgtagatgtcctttctggttgttagttttccttctaacagacaggaccctcagctgcaggtctgttggaataccctgccgtgtgaggtgtcagtgtgcccctgctggggggtgcctcccagttaggctgctcgggggtcaggggtcagggacccacttgaggaggcagtctgcccgttctcagatctccagctgcgtgctgggagaaccactgctctcttcaaagctgtcagacagggacacttaagtctgcagaggttactgctgtctttttgtttgtctgtgccctgcccccagaggtggagcctacagaggcgaggcaggcctccttgagctgtggtgggctccacccagttcgagcttcccggctgctttgtttacctaagcaagcctgggcaatggcaggcgcccctcccccagcctcgttgccgccttgcagtttgatctcagactgctgtgctagcaatcagcgagattccgtgggcgtaggaccctctgagccaggtgtgggatatagtctcgtggtgcgccgttttttaagccggtctgaaaagcgcaatattcgggtgggagtgacccgattttccaggtgcgtccgtcacccctttctttgactcggaaagggaactccctgaccccttgcgcttcccaggtgaggcaatgcctcgccctgcttcggctcgcgcacggtgcgcgcacacactggcctgcgcccactgtctggcactccctagtgagatgaacccggtacctcagatggaaatggagaaatcaccggtcttctgcgtcgctcacgctgggagctgtagactggagctgttcctattcggccatcttggctcctccaatccccgaagatcttcagatacagggaggccagcactaaactgtcagactgtgaatgttcttaccactgcaccatcctacccttctgatagtgactcataaatcaaaacctataacatcatacacagcatgatcgagacagtgttttctccctagtaatcttgcctgtagtgctggtgtggtgtttttgttttgttttgttttgtttaatgtgctgcctttctagagaatttaccaatagcccatttcatcatacctcatctcaatgccagcagtgtgctcccatgaattgaatcacccctgggcgggtgtcataggacggaaaatccttttagaaatgggagcaagctccctgtgatgcaaagaatattagcctggaagtcagaagacgtaaattttggtgtcagcttggctgccattatctggattgtgtagtttttccatccgtgcaatgagtgagactagcagtttcttcttggtcttggattatgtacttgtgaggtaccagagggaagactagtttgtggtgaaggcagtggtgcaggtctggtagcctgctgagacataaggaaacaggtcatgtaattactgaggggcagcttggttttagtcttaattttctgcctggctgctgtgtgagttgattttctgacagagggatatccctcttacaccttagtgtctgtctctaccagtggatacccaaaattttttttcttctttaaaaatattttcctcttatggcctcatttaatgtcagttaaatcaagtaaatcttcatttctagctactgtttactgtttaatagatctggtctattaaaacacatttgtaattaaaatctcattatgtttcactaattccagaatccttattcttatagaaaatacaatcttaaggcagattttttcttctagtgtttagaaataggtaactatgatttttataaagtggcatctgtttggggaaagatatctactcttagttcctgtctaccagagctcagctttttgttaaagccatcatttatggaggactctctaggacccaggcactaggactttccatgtattgatttactttatttttaacccaccctgtgagattatgtattattactgttcccacattacagatgaggaagcaactgaagaacgggaacattgactaatttgcccaaggtttttcagctaatagagctgaggcttgagctcagaagcattccttccagagcccacctcctaaccacagtatatactcagctgcctgataagcagttatgccacactccattgttgaagggtggtgactaaactgagctgctcaccacacaactccagagggctcctttgatagcatggcccatgtgaatggggcctccggatttgaatactccagagttaaacaagcagtagctgtttctaagcccatgtcattttttggtatctactgaccattccttgtttctgtatgcatgtgcaggcatgcatgtctacataggcacacgcttgagtcatcacacacggacagtcttgcacctgcatatactcttgcacagttctgttgtacataccttatggctatttgcagaaaattgcccagttccaatctaattttttcttaccaattatgtgttaaagtagaattgctgactttcataagcattttgagaactttcaatgttttatgaaacttttactgtattccttttgaaagttaataccaagtagtttagttcagagggagacactctggatgggccagtaacctaaatcctgcggccttgcattggcaagtgtggactgtgaataaaggtgtcccctctgcagggtggtacttgaatcccaccacaagggtttttcagggcaaggatagtactctccggccattctgtttccctstacctgcagctggtactgagagcagtgacaagagggtagcatccatctgtgcaatagttttgtgtctgtaattttggttcaatttatttttctccttaggcaaccagccacagcaaggagtgactccgtatgggcatccttcacacttctgaatctgcaagaggagaagacatgacgttttatgtttgcactgaaaaacagaaaatcaaatttaatgcattagtcatcttaaaaatgtccctttttttcatttctttgacattttactatattttatgctacatctcacaaaaaaaaaaaaggtgtttaaacaaaaagccaaggagaagttgtggtttgattttgttgaattcacctttaaagtaggtttacaaatgtgaatcatgcaggcaggcctactcccggaagagtgtgctagcagaccttttgaaattggtgctttttttgaatctcacatttctagaaagaatggattatgatggatctaaggtatttatgtatttcattcattaatgatgacgttgttkttttttttttaattttattttccaaactgtgctggaccaaactactgatttgaaaggcatgtcagatcttgacagaaacatggcctgtttattctgcattcacctgtgatggtgaaacggacatttatttgcatcgctctaatttgaaatgtttgtaatctcataagcactttataaactttgttcttatttatgtaggactcttctttgcttttgttgtggtcaaaaggtgctgaaacagattgttgcttmgtacttaaacttcttaaaccaagaacctaaaccaaggtttctttgagagccgccctaagatgtgcggaaacctgttagaagtagctgtactcaaatttgttttgaggcaagatcattgatgagagtcattgtgaaggtacaacatgtaaatcctaaaggcctgaaagaactgcagtggaatcgtccaactatttattgccagttttggttctcctgaaccttatgccaccttaaggggaaaaaaaaatccagtagctggcttgagattccagtgctcacacttgacatggtttccagagaatctggccccaaagtccagaaggctctggttttcataaaaggtgtatttgctgtttattttgtatggtaagtatttgctcttttgaatttaattattactgtcagtgtcagtcttggttgtgtattgcatatactgtatttataaattggtgcaaaaagcacaagtaaattatacatcaaatttattataaagaaatagtaactattttaactttgttcaagtatgtggtaatttgctcctattagagtaaaaaagaaaccagtaaattatcagtttgtgtaacttaagagtattctatataatatttttttagatttagatgcataaaattttgaatgtgaaaattgcagggcattttaaaacatatgtgggggatattttcccatgttctctgttatttcattttcttttgccatatgattttacatataatatagtcaagcatactgtgaatagacttgtctataatgagcagaccatgtaaatctactttttttaaaatgtagctagtacaactttagtagacattttcttttgcaaatcattatctataaataatttatatcttcctgggtgagttactcattgcaaagtttgactcatgcaaatgacctcaaatacatgtcagcttactttgctgtggcaacatccatgtgaactgctttgtacactgtgaaaatatttcactccagcctgcccattttgtgtttactctgggctggaaaagactttgccaaaacattaaaaactattcttttcactaaattaatagtctatctgctttcagaagatgtatctatctgtacacatttttgctggttttgtatatcagattttttcctctcaagaaacatacttagataagctaatgaagttgttttcttcaaagtaatatatctatataatgactgcattggcaaatcaaccgaaatgtgaatgttgtgcctagtgagtgagtcatgttccatcattatttctttccaaatttctttgccagttcagtttgaaccatatattttgtagctcagcattgcaaacaacagtaatactgttttaagaatgagtgttataattgcatagcatttgtatgcactttatactttgcagaggtgagttaaattattaatcattttgcacatgaaagctgtggggcatatcttttttctttttttaggtgaggaagttatgctacgactctaattaattccacgattctattgaaagttgaggaatgctgttttacccctgcgcattataaagaaaataactagaattactttagtcttcagattttctccctgttaattctgtatcttgagaggtttctttttttttttttttttttcttttcttgcaaatgcattcttttgcattaagatggtcacaaggtaaagccctgtggcagaacctggtactttaccttaccagaggaaattaccttagaataagatggagcgagaccccagctccccttaaagacaagaccttgaaatcaaatggagtcagctatacctatcaatcacagttcttggatataagaagcccatagactctcttgtttacactgtaggctttttcttaatagggttgcatttgtcagtcattgcatttacccttcttggcctggaagtagaggagatcaatgcgtagctttgaccacttccagccacagggtactaacatcagacataagttgcaaccaggtcacattttaggctgagatggggctaactgaaagtcagtgtgatgaaaacccaagggcgctattccacatgtctcaaatgattggcaggggctaacttattagtaattctcggttttgtgcactgagatatctaagacctatggcatttttttcccatttataaagctcctataattcttaagtaagtaagtactaggtgaatgtttgaatagatgctggagaaattacactggaaaaccccacccctagatttagataagatcaatcatttaatattccccaaattaattcaggttgaattaagcatgtaatataaattcagtgaattacaaaaacacattttgtgtaggattgatcagattttaaatacagtgaaacttcattatatataatagacctagaccctcccaagcattttcccatcccataaagaattaatgaaatgaaatgcttatagagcaacgattcctgctcagaaaaatttccttataaacagctccaaaccaggggtgcctgagctagattttaaagttataaagaagtttcattgtatttttaaaacctttttaatgggtgtatttggacaaaaataacccccttttcacattttatgatgtgcaggtattacattgctttttacatgtggaaaagtgagcctgcatttatttttaaatgcagttattaaaacatttttgtattccccatcaatgaaaattttcagtgtgaacaaatggtgaatcataagacagttcagtgcttattttctgtaggttttagcaaaaaaatttataaaccacaaaatatttatacatcaggatggtaaatttacatcataaagattgcagatttaatattttccattgtctctgttctgagtgccatgcttgtaacattgataggaggtggacactaggcaactggtattagaagttcatttttttactgaaaaattcaggtacattagccatttgttattttatagtgaaccgtttcaatgtttgtttattgttatttgttggcaaaataaaagtgccttaagttaaaagtttgttttgagatccattaaataaatcagtatcatcagttcataatgcatttatttacaagtccttttattttgcatgttcattgtaaatttaatactgtaaatgtattcaaattcatttacatgcctatggctgcctttgattaaacttcttccaaaaaataaattctgcccagatgttgttgactttattatttcatgtcagattacttgaatatacgttgctgcataatcactaccaagtgggttctttgctgtgcatttgtatatcccagaatcggaggtttggggattctgaatgactagggtaccttgtaagtgaagctgctcacttccatgtgtcctctctttacttgccgttgagagaagggagtggtcaggcatctcccacgtgatttctggcttgggaactcccaaggccacacagtggagctgaaaggctgcccctgtcctggtgacaatactcctgggtggacgatttgtaattcggggagggtaggctacaatcattactggaacagtaatcagtgtatgaccaacactattttgagccttacagatatagtttcctctgtcataagctgttgcttctttaatgactaaggtgccattgtcatgcaatatgtatttcccattaatttgaggcctgtctactacataaccacttggcatagtccatttgatatttggcttagggattccatcagacacacaatgcagtgatagagattctccactgatgccttttactgtccctggtgcataggtaagaataactggcttctggccaatttctaatatgactaatttctcaatatagccaactttattcctagctgcacagcgatattttcctgcatcctcccgagttgttttagaaatgataaaagaaccattgcttgctatcagatactgataactttgtggtccattggaaaatcgtgtgccatttggtaaaatccagattatttcaggtggtgggttaccatcaacagagcaattcaatgctgtggactttcccagctgggcaactattttttcattaaatggatttctaaatgtcggtcttctcagcatttccagtacttctaactgtactaccaacacgctctctccaccttcatttcgggccacacagataaagtcggctgaatctgaaagcctcacattcctaatttccaaggttccatttttatggactgtgattctgcttccatagtatggggctgtgaggaaaatattgtctggcatgatccacatgacttcaggagatggtgtcccttcagctctgcagtcaaagtgttttttggaatgtctcacagctgtggctttaataacagttctatttgtatacagaccattgattaatggaggtttagagaccacatccagtttgtacattttggtgtcatccccactgggatttcgggctacacatacgtactctccagaatcgagcagtttcactttgttgatggtcaaagacccattggcatgaaatgtgtacctatcaatggagaaggaaatcatgtcattggaaggcagcaaccaaaatatttttggtttgggatccccagtgacctcacagtcaaggacagctgtgtctccagctttgattctcttgttggttttgttactctgccttatccggggagcagctgttataactgttaagtggaccttcatttcatctttccctagggtgttctgggcatagcaagtataatctccttcctccgctaccccaactttgttgaagtataaagttccattgttgaaaagggtatatctcctagtcctgtggccactgtcatcggcttgcattgcattgttgatcatggttccatcaggcaaactccaagatatctctggcactggggagccggaagctttgcaatctacttggaaatctttcccatggagcacttgctttctaaaatactgcttgtggtcaattttggcaggtttcagtcttaggctaacatgcatcagtatcagatcatcccccattttgtttcttgccacacacaagtagacaccactgtctttttctgttactgatccaataaacagggatccattagggtagacgtggatccagctgcccactctaaggagaaaagagattcatttgagtgtgcagctgttagcaatgagggaaactgttttactcaggattgcctccctctgccccagctttattgaagcatgaccaatgaaaattgtgtatctttgaggtgtagaacatgacattttgagagagatatatatacattttgaggtgtgtgtgtatatatatacacatatttgagatatatatatatatacattttgagatatatatatacacatacattttgaggtatatatatatatagagagagagagaaatgaccacgattaactagcatatccatcacctcatagttacctgtttttgtatgtgtgattagctttaaattgttgcaataaaaaaataaaattactaccagcttattgtcttctaagccatttgctgaaagatgaaattatctaattgaacaggtataatttagtgcaagtaagtatttctcagatggaattcaaatgaatctccgttacatagtaattttttaaaaaaaatcttaatgaagaggcacatgctagaaatatgggagttctagacaccatgacttccttgaccatttcacataccaagtaaactaattggatccacaaacatggtgattttgtaatatatataggtaaactcagttgctcagaaaagatgccagatgatactttctaaacagttattagtaacaaaacaattactgaatcatttggttagaaaattctactttggctgggcacagtggctcacacctgtaatcccagcattttgggaggccaatgtgggcagatcacttgagggcaggagtttgagactagcctggccaacatggcaaaaccccatctctactaaaaatacgaaaaattagctgagcatgatggcacatgcctgtgatcccagctactcgggaggctaaggcttgagaatcgcttgaacccaggaggctggggttgcagtgagccgagatcacaccactacactctagtctgggtgacaaaaatgaaactgttttagaaaaaaataaattttactttgttagaataccaacgcaaggttccttagaaggttgttgcagcatctgccctctatgggcagctgtacagtgactagtttttgcactagattgagctgtgtggaataccatttttctccagatgtacagtggctgcacagcctatcattaccaaatttaaccaccagatggcagatctttcctggtaaaactaaatctacttttttagaccagtggagactcaactggtgctaaaagtgctatcagggatacctatatgagaaaacgtctttcttatttttgggcaacatgggctaagcaggtagataaaacgagaggaaagtaaaaactgttttcatagcataagtgctaaccaagtcaaacagcctcaagtcatttctctctctcctattttctatttactttatatttttttgagacagggtgtcactctggagcccaggctagagtgcagtggtgagatcacggctcactgcagtctcaacctcccaggttcaagcaatccaccaacctcaacctctgagtagctgggactacagacacacaccactatgccctcctaattttttt

SEQ ID NO: 5662 - DNA, 57665 bp, Homo sapiens
tatggtgaaaccctgtctctacaaaaaaatattaaaattagccaggcatggcagcatgtgcctgtagtcctagctacttgggaggctgaggtgggaggatcacttgagcccaggaggttgaggctgcagtgagccaagactgcaccactgcactccagcctgagcaacagaatgaaattaaacactgtgctgttttaacttaaaatttaaattaaaacaaaatttaatttaaaacaaaacaaacaaaacgaaagcaattaattgaggctgcagacttgtgatccctaattctagttcaatatctccatttaataaatgatgcctgggaagagaaggggtttgctcaagttcccacagctagaaactagagaatcacaattagaaccaaggttttcctactttctagcctagatatattctagttgagtacagtcttttttcctgataataaaattgagggtcagaaagattaagttacttgaggataattaacagccatttttaaaaaccagttcatctgatttctgcctcttttccatgctatctcaatttactgaacattatcattcattcattattcagtatgtaggagtatcttcttgtgccatgtcctttgctgggttctgttgaaacagccatagacaggacagacactgtccctgccctccctcatataattacaattgtgtaaatgttatgaagaagtatagagtagaagaaagagtatattggttgtgatgccagttaaatgggagactcagaaggggagttactcccaaaaaggagcttatgtttccaccgctggaggagggaaacactctgagatattagtttaattgcttattaggtagcctcaactcactggggacactgacaggaaatggtttaatttcttccaataattctcaaagatatttatatcaattcccattttttcctctgagccatagtttccttgatgacatcttgcctgcttccataattttcagccacttttagtaattagaacagacttgtttcagtatttaacactctgctctatttaatttctttatgctcgatttgaattaccacctggtgtcacttcctttcaggttgaatgattttctttattatttcttatagggcaagtcttataggactagccacaacttctctcagtctctgtttatctgggaatgtctctatctagccttcatttttgaagaatagttttgctggaaatagaattcttggttgacagtttttttcccctttaggattttacatgttatcctactgccctcttccttcattgtttatgatatgaagtcagctgttattcttgttcctctatctttgatgagtcattttcctcttacagcttttaagattttctttgtctttcaacagcttgactgttatgtgccaggttgaatgtccttgtgtttgtcctatttgaagatcattgagcttcctagatgtacagattaatgttttcatcaaacttggaaagtttttggctattttttttcctcaaatatcccccctcctccaaatccttctctccttctgaaattcccattacatacatgttggtatatctgatgatgtcacacagatctttgagaatcacctcattttttattcttttttctttatactgattggacaaattctattgatctgtcttcaagttttctaattgtctcttcagcccactcaaatttgcattgaactcctctagtgaaattttttattttttacttattgtacttttattctagaattccattgctttttaaaataatccctatctctttactgatattccctattttatgaagcattgttgtaatttttttgtttttgtttttggtttgtttgagcctgggtctcactatgttccctaagctggtctcaaactcctgagctcaagcaatccttctgccttggcctcccaaagtgctgggattacaggtgtgagctgccacagctggctgccatattttcacttagttctttggacatattttttttctcttttttttaaaatagagtagatgtgctgtgtgagacttgatctcatggttgagtaacttccttgaagtccttatatgctaagtccaacatctcacaacatttatactgattttcacctctgtgtatggtcaatttttctgttcatttgcatgtctgcttttttttaattgaaaactggacaatttagataatatagtgtagcaactcctgtgttttggtgtgcccctcagagggtgttttttgttgtttttcttagtttatacatttgttgtgtgacttgcctggactaattctgcagagtttctcttccatagtgtgttgacattgatgtttctgctcagttttatttttttctcttttacgtttatttctaaggttggttttctaaggttttcaccaaggtcaatatagcttagaatttagtcaatgattgatcagatgtggtaattagacacctcaagccagtaagacttctaccctttcttgatggacctgtgtcatctaaatgggttgaagaacattaaaaattcaggcaatttacaagactgctctgacttttgttttgctgggttttcttgtgtctcctctgcatctctgcaaggcttctctggcttttgttttcctgtgtctcctctgcctctgtgcaaggcttcatgttccgccagggttgagtagatgactggggcttttgccagactctcctgaactgacacagccttccagaccataagcgcatcgccaaagcccactatggctatctgattccctggatctcactgctaaacttccagcaggctttctaatcagttgtttgctcaaccagtcttgcagcccaggtaattgtgatgttggcattcccaatcaacctttctccttggccatggggttttgctggcaccactccttaccaagtcagccccctctggcagcaaagctgctggttttcacatttacgcagccctgacagaactattcccatggaactggaggagagggattgggaatttccccatggtaacgtgtcacagactctcactgttgttacccaaggtttaatagtttttcttgaataaatgcattttaatttatgttatacctgtggtggatttccaggaatttgaaatggttgttttttacaattgtgtccaatttcatcattgttttttggggaagagaatttgctgaattccttactctgccattccagaagtcacaatatagccccatttgtttaaaacttcatccttaagctctattcaaagttctttcccctgatctctggagcagactagcttggttgccctacagctctagagacttccttcttcccctttcttttctaggctttagctccactggtggcattagggcagggaggaggtgggaagaaaagagcaaattttctgacccattgggcaaggttgtagcctctctctgttgtgctgtttctctggctaatccaccctggccccaataatgtatgcatggcaggcatctatatgctgacctcttagggggtatatgtgggaattcttgaaatactcttttttggggcctgcccattgccattttttggaatatctgaattaagtctaaaatccacattcaataattcaaatactcaggacccattatgtgcacaggatcaggccaatttggccctaatgacaagcctacaacatggcccctagtcttcatcttcaagttgaggaaagtaagactcaaacaggttaagggctgggcacagtggctcatgcctgtaacctcagcactttgggtggctgatcaggcagattacttgaggtcaggagtttgagactagcctggccaacatggtgaaaccccgtctctagtaaaaatacaaaaaattagccaggcatcatggcacacgcctctagtcccagctactcagggggatgaggcaggagaaacacttgaacctggaaggcagaggttgcagtgagccgagatcgcgccactgcactctaggatgggcgacagagcaagactccatttcaaaaaaccaaccaaacaaacaaacaaaaaaaacccaaaaaaataggttaagtaatttgtctaagatcatcagtcctaacaaggagtccacattactccgaagcctgtacccttagactcaaagttttgtctccagattaaatattgggagtaattacagctcctgcttttcttcctctcaggtcaggtttcgtccaatacagtggaagactggttcctcctcaacttatttcattctcatcccttcgacaattaaaacactgtttctagagtcacactgacccaagtttgaatcccagttgttctacttttgcttctatgtggccatgggcaagtaactaaacctcactgaatctcagtgtcttcatctgtaaaatggtttaatatattaatagtagtatgattttattaggtagggctgtgtaaaaaacaatcctaaatctcagtgacttataacagcaaaagtttatatgtcactcatgtgacatctcaaatgtgagctgcttcacatcccctttttcttccaggaccaaggctgaaagagcagccccatctgacacagactattctcatgaaaggaaaaatttctctggttgaaatacgtaataactgttaatactactgctcagaaagaccccctgccaaaagaagatcatacaatcaagcctgacatcagtgaggctggaaagaatgctcctcctacaggatgcactgcagtcgcatggcaacrggcgatgatgtgtaatccttaactggaaaagcaacttaatagttaggaacaacaataccacctaccagagaataatagtaccttccttatgcatgtgagattaaaatgaagtgaggcacatgcaatgcttaacacagtattctacacttaataaaaggtttgataaatgttagatgccattattatgattaccacctcctggtgctgctgaaaatttttctcttcaccgtactgggctaaacctcacctgagagcaataaaagcaggagctgtaattacttccaatatttaatttggagacaataaagctttgagtctacgaggaayaggctttggagtaatgtggactccttattaggacagatgatcttagacaagttacttaaactgtttgaaccttactttcctcaactcaaagatttgagacttggaactgtgttgtaggcttgtcattagggccaagttagcccaatcctgtacacatagtgggtgctgagtatttgaattagtgaatgtggattttagacttatttcagatagtcaatgaactgtatgcataacataaccacagtactgccttttccatcctttgggtctcagctcaaatatcatcttctcagagagaccttccctgaccacctgatttaaagtacctcccgtgcctccagtcacttttccccgttttcttgtcgttacaactctggtaacgccctgaaattgtcttgtccattcactgttacgtaatatctgtctctgccactagaaagtaagcgccatgcaatccggatcatgttttcttatttccaccttctgccgtggacctctggcattctcgtctgtaaaacttaggggagatggtgaggaaagggagaaacacgaggtctagccggtccacccgggtctcaagccccgcccaactcaggcctcgcgttccttccaggctgggcaccgcctttggtcacccacgtggcccgcagtaaggccccgccctttgtgggtgtggcctttcacggcgtgcgggccgtccaccggcggcgagccacgtcacacgcacgcaggccatgcgccgcgcctgttctcgccgcgggcggaaaaggggcgtggccatgcgcgaggaccccgtagccgccagcgccaccgcctgagtcgcctgcaggtggctgttcgcgtctccctgccgtgcaggcagctcgaaagccactctgttgtggggtcctcgcttcccttccacgtctcccggaagcggtagcagggccccggcgggtcggggaggaggtttactcagcttgggccccctccgggccagccgccgagggggcgcggcccaggacggcggctaggccgtagtgcagcctctccggagtcctcaggtgaggcggaggcgagggcccactggacgagacgggggtgttaacggtcctaggagcgggggcgcagtcccttcagtggagaccctggtctctccgttttctttcgggtcgcgctcatcttcgccctgttaggggctgaggagggtaactggaragactccttgggcttcagccgacgtcgtttactgycctcctctgtcttcctttctcctgacccctgcctggcctggccgttcttcccgcacggaacgagatgggtggggagcagagtgggggtctctgctcgcttacctgagattccccaaactgacagaccccagggctctacggactgggcctgaccgactgacctccagcctccctccctctgtgctgacgcctggccttcgaagcaggccctgccgcagccctttgcagacccatccccatcccacgcaytctctgcccctgggcagtgtctggggaattgacgggtgcctctgaagtccttcgtgtctttgagatgtttgcccagggcccgtctaagtatttaattaggtaatcgacattaattgcaacattagtagcagttgcatggtatgttttaaagcccaattaattttgaaatgggaggcaagatataaagaattaatgagcgtgttttgattttttattactttttttgtagagacagggtcttgccatgttgcccaggctggtctcaaactcctggcctcaagtggtcctccccgctcggcctcccagtgtgttgggattacaggcgtgagccacagtgcctggcctgtatggtgttctgtatgttacagagcatttcatctccattttcatttgattttttataaactccgaaatacataggcatttaatagtcacatgtgtaaagaacagatttaaaggatgagtttcttcttgaggttttttagattttgagctgtatggtatagggaggcaagggttaaaagtaggtttggcactagggtaacttagacttgagtatctgagctgctgtctaaactctgggatctttctaaaccctttccacatttgctttaaaaaaaggatattgctgtttaccacataacgtggctgtgaaaattacatgtgataaaagatacatgtgtacctgtgtacagcatcagtcatataaaaattccactcagcagtatttgtgagtgcctactgtgtgctagactctgggaattcattggtgagcaaaacagacataatctttatccagccactgcccccctttccccaagaacaagaagcatgttaaaaaaatacgtaattataaaacatgaaggactgtgaagcaaaagaatagggtatgtacagataatgattgacctaacttagctggaaaggagaactctgaagcaaatgacatttgagtgaagaccaagaacaagaaagttaaccatgaaagagttcttggcaaaaggaacaacgtgcacattctagaaatggttgtggactttattatagagcccttctgtatctatatcttcatcattactttgatgtattgtggcacacaataagtactcaaatatatgtatggaatgagtggttatgcaattttggtttttattctggacttagcttaatgtgcacatggtaggtattgagtatgtgaattattgaacatgtactttagataaattatgtgcacacctaaattatatgtaatagtgctgcagtttaacattaagatagcttttgtatttaacggaaacgttttttcaagttttagcactttaaaacaaacttcagtgaattttatttttatttggttgtactggagttttgccatattggttatttgctgtttggatgttgttttaatttgctgctgtagcaaagtaccacagattgattggctgggccaacagaaatttattttctctcagttctgaagacttgaagtccaagatcaaggtattggcagagttggtttcttctgaggcctacttcttttgcttgcagatgtctgccttctccctctgtcctttctgtatgcctgtttgtgttgaaatttcctcctcttagaaggacatgccaattatatttgattaggggccaccctgacgactcattttaattatccttttagagatcctatctccaaaaacagtcacattctgaggtctgggggttaggacttaaataaaggaatttggagggatgcagttcagcccataacagatgcttttgctacattaagatttgcccggccgggcgcggtggctcacgcctgtaatcccagcactttgggaggccgaggcgggtggatcatgaggtcaggagatcgagaccatcctggctaacaaggtgaaaccccgtctctactaaaaatacaaaaaattagccgggcgcggtgtcgggcgcctgtagtcccagctactcgggaggctgaggcaggagaatggcgtgaacccgggaagcggagcttgcagtgagccgagattgcgccactgcagtccgcagtccggcctgggcgacagagcgagactccgtctcaaaaaaaaaaaaaaaaaaaaaagatttgcccttctttgaaatagtaataataaaaacagtaatttattattactttgaaatagtaataataaataataaaaatagaaataataataaaaacagtagtggtagttgtaataatggtaatagcagccactaaaatgagtgmttattatgtgccaagcattttgcaaagtgttttttatatattatttcatcataaaaccatcctataaggtaagtacactttcccccccattttctagataagatttctcagcctcatttaagtagttttctcaaggttacctagctagtaaaaggtagggttaggatttcaacccaggattgcctgactccagagtctggtcttaaccatttatcatactctgccactatgccacactgatcattttatgtcctttttacaggtttgccaataggattatcctgctgccatcatgtcttggtttgttgatcttgctggaaaggcagaagatcttttaaaccgagttgatcaaggggctgcaacagctctcagtaggaaagacaatgccagcaacatatatagcaaaaatactgactatactgaacttcaccagcaaaatacagatttgatatatcagactggacctaaatctacgtatatttcatcagcagstgataacattcgaaatcaaaaagccaccatcttagctggcactgcaaatgtgaaagtaggatctcggacaccagtagaggcctctcatcctgttgaaaatgcatctgttcctaggccttcatcccattttgtgcgaagaaaaaagtcagaacctgatgatgagctgctgtttgattttcttaatagttcacagaaggagcctaccgggagggtggaaatcagaaaggaaaaaggcaagacacctgtctttcagagctctcagacatcargtgtcagttctgtgaaccccagtgtaaccaccatcaaaaccattgaagaaaattcttttgggagccaaacccacggtagttaatcagtcctcttatttcttttagagttaagcaaattgaatgtgtcatcatatgatccgatggtgtttctcatctactgttatggaatctgtctccactggtgtaagggcagactctctgcaaatgtgtggtgtaaacaagggagacatcattgactactattagtcaatagacagttgtagcagggacttcatgttgtctggagggcaacttyacccactcagcatctaacaaagtatttcaaatttgtttctctaagacattttaagattaaaaaaagaaaattttgaaatctgaaagaaaacatgtcagtttggatcggggactatcccagttgatatctttttgttactaggattataaaaatgacaggaggctgtacttcacgtattttctgggttgtgttttttgtgtgtttttccccccacatcctccacaaataaagctgagagactgaactttgatccaagttgaagagttgaaggcattgacctagtagtgaagcaagagcttagaactcttgttttcaattgtttaattccctctgagattacctctacaagtacaccttctttcttgtgaaatgagattaacgtggtaaatgtggctaattcaagtacctactaactgttttaaaatagctataggctgggcgtggtggcttacrcctgtaatccgagcactttggaacgctgaggcaggcagagcactcgtgcccaggagtttgagaccagcctaaacaacatagcaaaactttgtctctacaaaaaatacaaaaattagccaggcacagtggtgcatgcctgtagtctcagctacttgggaggctgaggcgggagaattgattgagctcaggaggtcgaggttgcagtgagccgagattgtaccactacactccagcctgggccgtagaatgagacgctgtctccaaagataaaaatagaaaaaaggcaaaaaacttgatagtaggttcttgcagggattcttttgttgttttgagacagggtcttgctctatcgccgaggcttaagtgccgtgatgctatcacagctcgcactacctttgacctccccaggctcaagcgatcctcctgcctcagcctcctgagtagctggaactataggtgcacaccactgtgcccagctaattttaaaaaattatttttaatagaaacagtgtctcactgtgttgctctggctggtcttgagctcaagtgatcctcctactttgacctcccacagcattgggattatgggcatgatctaccgtggcctggccatagggatttttttttttttttcttttttgagacggagtctcactctgtcacccaggctggagtgcagtggcctgatcttggctcactgcaagctccacctcctgggttcatgccattctcctgcctcagcctcccaagtagctgggactacaggcgcctgccatcacgcctggctaattttttttttttttttttgtatttttagtagagacagggtttcactgttagccaggaggctcttgatctcctgaccttgtgatccgcccgcctcggcctyccaaagtgctgggattacaggcgtgagccactgtgcctggccttttttaatgtttttatttatttatttatttatttttttgtgagacggagtctcgctttgtygcccaggctggagtgcagtgacgctatcttagctcactgcaacctccacctcctgggttcaagcgattctccatttcagcctccygagtagctgggactataggtgtgcaccaccacccttggctaatttttgtattttttggtagagatagggtttcatcacgttggccaggctggtcttgaactccggacctcaagtcatctgcccaccttggcctcccaaagtgctgagattacaggcgtgagccaccacacctggccagggattctttatagagttgattattgatgggagattgtcatgttcttggatgttatagcttctttcattgtcttggctgttagtgaataaaatctttcttgtattttcaagacaaaaacttgtatagaagaagacgttttgggttgtgaaaataggatcaggcagtagcagttgattaatatgttcacatattccaaaatttcttctcagctatctttcaattaattacacaaagaacctactaggtgcaaggatatggaagtgtccagtgggtgagctagacatgtaaacagataatttacttgtggtctagtaaatgtagcaattmagtatggtcagagtgttgtggaagtatgaaggaggaagtaactaattgcctagggtattcagaaaggattcacagagggtctgtatttttagctgggtcttaaagaatgaacaggagtttgccaggtaaaaagttagagacagcattccatgcagagagaacagactctaagaggctagtagagtagaaaacattgtaacaaagttggaaacactgagtgagttggagggtgatgaagaaaatgtagctagcaaacaaagttgggacctgtttgtgaaggcccttgtgtcatactgtttatgcaattaaacccattacttctataatcattgttaaagattgattcctgaacaacaggctttagaatcgcttgtgtgttgttaatttaaaaatgaattattgagtgccttcccaggcttcctgaatcgttattttctggggatggagccagggcatctgattttgttgttgttgttctgtgggtggttcttagccaataaaagttgaaagtggctgccatagccagtgtgatgctagtagagatctttaagtcaagagttgacatmgcttatttttgtacttttaaagaaagcarcttgcatttaattagaaagaatggacctaaagggaacctcgttgtcagggaaatgaattagaactggttataatacacaggagttataaaaattgtttctcttgggtaggacctctcaaccttgagacttggtgttttgggccaaattaattcaatagtgtgggaagccctcctgttctttgtaggatgtttagcagcatctctggcctcttagcccattaggtggtagtagcacccccaattgtgacaaccaacaatgtctccacaaattgccaaatgtcccttgcagggcaaaatcatcccagttgagaaccaatgtcctgagatgcctagaaatgtgtagaaatgggattgctgagctgtagggtttaacaaygttcagctacactagtaatgccaaagtggctttctgcagaggttgtgccaatttatactctaaccagctatggttaagaacttcttttgctccacattttcaccaacattttttattttcaatttgactttttactttttgctgatcagatttgtcgttgatattatttccttcattactagtgtggttgaagatcttttcagatatttgactattgaactttcattttctggaagtgtcaagtcttttttatcaacttttttctgttagattatttgtcttttttcttcttgattcatagacattctttatatattctaaattctaaattcttttcctcctccagttttaccttggtttttcccctcccctctgtctatggcatctcaatgaatagaagttcttaatgtagatggcatgtggcttgtgttttttgtgtcttggaaaatctttccttacactgagatcataaagatatttttctgtattgtcttctatagtgtgcgataggcattcaattccctttttctttttttttttttttgccatagggaaatcagctattctagcatcatttattgaacagagtctcttgtccctaccaatttgcagtaccacctgtcttatatatcaagtattcattagtgtgtttctggccacttaattctgttttattggtttatttgtgtatccttgtgccagtgccaccctgttttaattaatgtagttttatgtgtcttgataactgatagggtagcttcttccaccttgtggtctttcttcagaaatgttttggctgttcatggacttttccactcctgtatgcattttaggatttgctcatcaagtttcacagaaactctgttggtctttttattgggaattaattgcttctatatagacagtttggtgagagtcagcacttttgctatactgagttttcttatccaccaatgggatataatttcaacatattttgtagtgtctttcattaaaattttattgttttctccataaagatcttatatactttatgttagatttattcctaagtagtttatattttttgaaacaattatatgtggtattccttaaaatgttttgctttgttattgctggtgtattttttgttgtttttttgtgtgtacatacatagcaatctagatggctcttaatcttcatgtttttctggacataaatttagattttcaacaacacaattatctgtgtataatgacagtttgtttcttcttagcccttttatcttttaaaaaatccttttcttcattggctaggactcaacgaccagttttgtatcttgttctttgtcttagagggaatactttgtttcactaagtatgattttacattaggtttttcatagtttttttatttgtttaaggaagttcccataaatgtctagtttgaggttttatcatgttgaattttagcaatgttttttcctctacccttggagataatatagtttttcttctttaatattaatatagtatacaaatcaatttatttatttttaataaatcaatttatttatttatttttaatagagatgggatcttgctgtgttacccaggctggaatgtagcggctattcacatgtatgatcatagtgcactgcagccccaaactcctssctcaagtaatcctcccacttcctcctcccaactcactgggatgcrggtgcacaccactgcacctagctccagctccagttgatacttttaaatataaaaccaaacttaactttcagtttgctaatattccctttaggatttttgcatttatttagttaatttaatttttatttattattatttttattattttgagacaggatctcactctgtcgcccaggttggagtgcagtggtgggatctcagctcactgcagcctcaatctcccaggctcaagcaatcctcccacctcagcctcaatagtaactgagactgcaggcacacaccgccatgcgtaggtaattttgttcattttttgtagagacaaggtctcactatattgccaggctagtcttgaactcctgagctgaagggatcctcctgtgttggcctcccaagtgctaggattacaggcatgagccaccacacctaaccttttgcatttattttataagcgaaatcggcctgcgatattgttaggttttagtattacagttatattagccttatcaaatgaattggaaagtattccttctttttctgttgtgttaattaattggtgtaagactgagattatttatttcctgaacgtttgctagaactctgtgctaaaaccatcaggacctggggtattcttactgaaaggttttaactattgattcagttggcttttcatttcttcttgaatctgtttttggtaagttacgtttttttccccaagaatttgtcaatgtcatacacattttgaggggttatacttatttaatttcaggaaaataatgtaggggtcacagctgaaactttcaacgcaaccaaacattagttattcataccaaccctgcaaaaaccaatgcttgatcatgcatactgtgtgaagaatatcagtatctggcatatattgaatccttaccctgtttctggcactgcactaaatgcctgctttttaaaacagctttaatgaagtataattcacatgcaataaactgcacgataagtattgtgcaattgatagatttcagtatcttgtacattttaaaatttgatggcctaatgttgtttatatctgtcccagggaaccacttttggttatgctgatcctctctagtatgtttatttcctcttttgttartttttgctttctttgggtttgttctgctgtttttatagtttttaagatggatatacaactcattagttttcttccttcctgcctttcatctttaatgtaaccaaggctataaatttccttcagaatactgccttagatatcatcccacatttggatatatacttaatttattttttgaattttaatattttattttttatattatttaaaaattttttgtagagacgagttctcactgtattgcccgggctggtctccaactcctggactcaggcagtcctttctcctcggcctcccaaagtgctgggattacaggcgtgagccaccacgcctggcctacttcatttctttttaaaatctttattttagaaatttcaaacataccaaaatagaacgtaatgacctcctattatccaactacagtaatcactcatggccattcatgtttcatttataccctcccatttcccatcgctttcttcacctgcaccctccgcacaattaatttgaagcaaatcacagatcttatatcattttttctataaacatttcattttcttactctaaaaatactctaaaagcaaatgttcacaccattatcaccttaaaaatrtaataatttctttctttttttttttttttttttgagacagggtctcaccttttgcccaggctggagtgcagtggtgcagtctcrgctcattgcaacctctgcctcccaggttcaagcgattctcctgcctcagcctccgaagtagctgagattacaggcacccgccaccatgcccagctaattttttgtatttttagtagaaacagggtttcactatgttggccaggctggtctcaaactcctgaccttgtgatccgcctgcctcagcctcccaaagtgctgggattacaggcgtgagccaccacgccctgccaacactcccatttttaagtcacgtcttaggtgcccattccctaccccacttgattattagctttttgtggttattttttcttttaggtaaaaygtacatatattaagatgcacacaaatcttagctatatgacgaatggcaatacctgtgtaacccacacctttaccgtgttatagatttcctttgccccagaaagttcctcatgttcctttccacttaatctcctcaccccgtccctgaaagcacccagtgctctgatttttctctccttagttttgcttgttctaaaacttcatataaattgaatcatatagtatatatactttctaatctggcttcttttactgaactgttagtgagattcatccatgttactgttctttttttattctgttttattatgtagtactctattatacggctgtaccacagtttatctattctcttttatggacattgggtttgtttccagttttggattattgtgaataaaactgctataaacatttttgtacttgcttttttgtgggcaaatgttttcatttctcttgtataaatacctaggagtggaattgctgggtgaaacggtagctgcatgtttaatttcataagaaattgtaaaaccttttcccccagtgattgtaccattttatagtcccaccagcagtgagaggtctagttgctctgcagtgtcaccaacatttggtgtttttaattttagccattctagggggtgtctgttggttctcattgtgattttaatttgcatttccttgatgactaaacatgttcagaactttttcatttgattattgatatttgtttatataaccttataaagtatcaagtcttttacccatatactgattgttttagtcagttttattatttagatatatagttcattttcatcacataatttttagagtaatttaaaagtatacttgcattatatttagtaacaaaaacaagattaatctgaattcatgtgtctctatctctttgggtaagacatgttagattccagtttgattaaaaaaaaaaaaamaaaaaaccttgtagtgacctgttattactcttcttgccttgaaacctgcagctactctattgtgccttcccaatttttcagtatttgagacttctcctggttttttttcccaaaagcattttggagacaaaaggaaatccaaacccattttacctgaacccaaccactcacatgatctctgatgttctccccagaatggtgttgtactgtctgttgtcattcattcagtgtatccagacttgagtatccttagaggtccatatgccccatttatgagaatgaaatttaatcagagggaagactattgaaaatttgtttatttatgtattttttttgagatggagtctcgctctgttgcccaggctggagtgcagtggtgcaatcttggctcactgcaacacctttggcctcccaggctcaagtgatwctcctgcctcagcctcctgagtagctggcactacaggtgtgtgccaccacacctggctaatttttgtatttttggtagagatggggtttcaccgtgttggtcaggctggtctcaaactcctgacctcaagtgatctccctgcctcggcctcccaaaatgctgggattacaggcatgagccaccgcgcctagctgagaatttactttttatggtgttttagctgtagcagtcaacttgagcatcctaccaaagcaagttgttaatgcatatgtgatgaacacgccaatgtaacaaaaacgtattcttttttttacagaagctgccagtaactcagattctagccatgaaggtcaagaggaatcttcaaaggaaaatgtgtcatcaaatgctgcctgccctgaccacaccccaacacctaatgatgatggcaaatcacatgaactgtctaaccttcgactggagaatcagctgctgaggaatgaagttcagtctttaaatcaagaaatggcctcgttactccaaagatccaaagagactcaagaaggtagaggcttaaattgttcaggattaggaatttaacttttaaaaataaacttaaggctggasgcagtggctcgtgcctgtaatcccagcactttgggaggccgaggcgggcggattgcctgaggtcaggagttcaagaccagtctggccaacatggtgaaaccctgtgtctactaaaaatacaaaaaaattagtcagrtgtggttgcaggcacctgtaatcccagccactcaggaggctgaggcaggggagttgcttgaaccagggaggtggaggttgcagtgaaccgagattgcactactgcactctagtctgggcagcagagcaagactctatctcaaaaataaataaataaaaataaaataataaacttaaaaactttaaactgttagaaatatttacatttaaactgtgagaaattagatgcgacttgtaaaatgatattttcatagaaaaactgcccagatttggaaatgggaccagtcatcctmccaccaacccaaaacataagagtattcgcttctttggtcatcctttaagaaccatgaaattgaagaactgagaggaacaaactagtagtagtctagttcattcatttattctgaactttcaagggaagctgttccattaaacaaagtagtaggcrctaatagagttgcagtgttgctgctctagggcayataaaaggtacatggaattcagttcagtgcccttgggaattgtgcagtgaggtggccctggagtagaaaacctcaagttcctcagaaataggtaattaagaaggaaataatctcattatggaggtagtgactgaggaagatgtgaatgttattgtaagtgtggctgagaagaaaacaagagtgacaaaattgctgccttggttcctggggctaattagaagggagtgaggggatggtgggaaaagttttgccaagccatggatagagcctagaagagaggaaagggaagatagttgaagactcactaagctaggcgtggtggctcacgcctgtaatcccaacactttgggaggccgaggcgggcggatcacaaggtcaggagttcaagaccagtctggccaacatggtgaaacccgtctctactaaaaatacaaaaaaattagctgggcatggtggcgcgtgcctgttattccagctactcaggaggctgagggaggagaattgcctgaacccagacccaggacccaggaggtggaggttgcagtgagccgagatcgtgccactgcattccagcctgagctacagagcgagactcgtctcaacaacaacaacaacaacaacaaaaacaaagtactcactagtcaggctgactttagaaaaagctttactttacccacactaatttagacatagaaatagagctgtttggccaggcacagtgastcacgcctgtaatcccagcgctttggaaggctgagatgggaaaattgctgaagccaggagttcaataacagcatgggcaacagagtgagacccctgggctacaaaaatcaatttttttttgttttaaattagctgaatatggtggtgtacacctgtaggctgagctactttggagactgaggtgggaggattgcttgagcccaggagttggaggttgcagtgagtcatgggccatgatcatgccactgcactccagccggggcaacagagtgaggctctgtctcatgtttttgggttttttttttttttctttaagaaaggtgtgtctcactggaaaaaaaaaaaaaagctttgagaccctataaagtttgattcagtatttttaaaatgttgtggtggctaactgcaattacatatggtatgtgagggtatggaaatgccattgtattctgaaatagagcactactttgctctttttgcattgatttcctaggtcaaaagaataacatctttttgcaacagtaattgaaagcaatagattcttttctgtgtttaggttttgttttgttcttactaggatgtacctttgatttggatttgcattcctttccctgtcactagcagaactttacaaaatatactctgctatctattaatactagtttcggctcccagatgctttatcatatagaaacagcattgtagaagagcagctagcttcacgcccctttctaatcaattaactataatctagctgtgaatattgcccttgaaaagtggatgaccctttggggcaaagaaaattgaagacgtgtaagttcccaattttgtcaataaggaaagtactaaaggcactcaaagtagaaactgtacgtgctctgagaaaaatrtgtttggttttgcttgtatagagaaatttaaattttttwatagaattaaacaaagcaagagcaagagttgaaaagtggaatgctgaccattcaaagagtgatcgaatgactcraggactccgagcccaagtagatgacctgactgaagctgtggctgcaaaggattcccagctggctgtactgaaagtgagactccaggaagctgaccagctactgagtactcgcacagaagcattagaagccttacagagtgaaaaatcacggtaggtgattctatgaataatgaaaaaaatgagcaagtaatggtaaacattgtagtgtatccacttatgaaacttagctttcttggaaatttacaagagggaatatttcttttggtagtgttagaaatgtgtatgattaaaatggattcattggctgggcgtggtggctcaagcctgtaatcctagcactttgggaagccgaggcaggtggatcacctgaggttgggagttcgagaccagcctgaccaacatggagaaaccccgtctctactaaaaatacagaaaaaaaattagccgggggtggtggcacatgcctgtaatcccagctactcaggaggcgaggcagcagaatcacttgaacccaggaggtggaggttgcagtgagctgagattgtgccattgcactccagcctgggcaaaaagagcgaaactccatctcaacaacaacaacataaaatggattcattgtttgaaccttgagatgcattgttagcaaattctgaatttaaaagcatttgttgtgtcattaatctttcattatacggtatgtacttaatatttggatgcctaaaaatgtagattatgttccattagaaaggaaagatttatctaagaatatttcagtcaaattatcttttttgtgcttgactaaagctgacgctctaaaaattattctgccttatcacttgtrcactgtagacatgagttatttcacatgatgcattttcctttagaataatgcaggatcaaagtgaaggtaacagcctgcagaatcaagctctgcagactyttcaggagagactgcatgaagcggatgccactctgaagagagagcaggagagctataaacagatgcaggttagaatgagagacagcagattcctattgtwacttggacacggaaaaaatgactttatgctgtttcatagcacattaactgtytratataattctgcartgcatttcagaaaattctgtttctgtgacaaaaatcagatatttgaaaatttagcttgatccttgctaaatgtatttaattttatgtgttgagagacaattaaaatagttaatgtgcattagagatatacatcttttacttaatttttgcaayaatcattgtcattatttgattaaatgctaatgkttgggggatcgtatttgttttttattaatttaagtttttctgattccagattaatctggctcatttatttcaggagaaaattgtatgtaatatgtaaagagttttactcttagrtgaatatttgcatttagttcagtcccagccctgtctacacgtgggaatcacttgtgtgataccttgtgctgtctgagctccatatgcagtcacattccattgtatgaggtagggactaggtattgacactttggttttagaaggttcacaggtgtatctaatgagcagtcagggttgcaaaccactggtctgggctagcttttcaacaggtgaaagtarttcagtcctgaaagtaaatatcaggtagtgtgtgtctcttaattttaacacaatatatccaaagtattaattatttcaatatgtagtcaatattaaaagttattaatgagatattttacattattttttgaatactggttctttaaaatatggtgtaatttacacctatttatttacttattaaattggaaacagttgatcagctagtatcagaccagacctagtatccaagtgaccaggttcacctgggaaatttcttaaaaaacagattcccagacccatcttgaaaattccagtttagtaagcttgggaaaggccttggatggctatatttttaacaaacttcctggttgattttaatgcattgccatgtttgggagttacaactttacatttcctatactttagctcctaacaaattaagaattttttcccatccctactatgttgtttggctgagctaataaatcccataagatatccgaatggatggttgtaaaatatgtttcaaagctaaatgatatcattaattatgatataaaaatttgtcacagagcgagtttgctgcacgccttartaaagtggaaatggaacgtcagaatttagcagaagcaattacactggccgaaagaaaatactcagatgagaagaagagggttgatgaactgcagcagcaagtcaagctgtataagttgaacttggagtcctctaagcaggaattaattgactacaagcaaaaagctactagaatactgcaagtaagcatgaaatgtacacttttggatgttaagatgtgcaagttaactgaaaggcaatttgagactgtgtagatactgtgtgaggtgctttgttcatgttcgtctgattggctagctttaggtgccttactctactttagaaattttattaaaggatgcagtgtttcttgttcctaccacttcttttaaaaaaaaaytcattctgccactgcctagttcaggtcttcaacctgtcaccttactcactgtgatgatattaatgcttgttgttgagcagctgtttattcttccttgttgatctcctattgaatttttgcagcaactgctttaggactcatccagttctcagaattgtctcacccagctttttttcccctccttcagatctaaggtgatcttaccctctactttactaagaaagactacagtcatctaatgtcgtttttgaattctctttcctttgtccctcagagggaaaacmtgtcctttcatttttttctaggatcattttcctgcctgtgcattgattccatctcccatctcatgtgtaagccctttctccrtagatctatgcccttccttcctgtgtgtgcctctctgctgctgctgccttctggctcagcttactcaagagcacatggttatttagtggaaaaatgaagactagatctcggactcctgcctaagagaaaaacagtctcttttagctttgtgaccactttgcactatttccctatcttcctttctttcagtgtcatgcttaccagaattgtgtacgtgctgtcttcatttctgtagaacttgttaactcttatctccttcttttcctactacatgtctgaaatttcttctcaaaaatatttgatgacctaaataaatattctctgtccttttcttagtctccataccttgtattttggtagaacatttggctctgttaaccctcccacttccttggaactcctgccttctatgctattcacatctccttggctctctttttgtcctcttctactgctgtttctgtctctcttgggcgctcttcccaatctccaaagagtcagagtcctcctaagctctgtcctgaaccctctttcattgtcctttcttaccttgcactgctgtatgctgcctctgcttctaatagccgcctgcatatgacttcaagcatgtttccaagcctgacctcctgacctcagtgcccagctgcctactgtgcaggcatggagtgttcagctcccagaccaacttctccctcattcttctgttctggtcaacgttactgccatgtggcagtaaagcttgaaacctcagggtcatttttgactttaccttttttctttagtctcaaacttctaatggctatgaatacctttttttaatgctacttccatgaagtatcatattgatctcctcctcaaactcttctttctaagtacttttttgtatcaccctaatttgttaattcattgaaaagttacttattgagcacctaactactcactaggcacagargatacaaagctcaaaagatgtgtcctcttcctttaagaaaacattcatcttagtggaaagaaacagataattgacgtaataaggttattaatgcagtacaatgggagcttgagagaagaatcccttaaaacttkcctgaggctgtcaaagatcactggactgaggagatgtggtataaagagaaacttgaaagatgaataggaagactcatgatagggaagagatttccgagagaacaacctgtgccagagcaagggggccagagagaacatggcatatttaagggactgcagctagttccatactgctggaacataacgtcttcagagatgggaggcaaaagactcataaagttcaacggcaggcagaagccatggtcaggtttgagtgtgagaactgtggcagcctgatgaaaaggttaggggagatttgggcctctgtcttgttcatcgttgtatccccagcacagtgcctggtattcggtacattgttgaaaacatggaagtgataaggggtggcatcaatggcatgtagatggtgaagaggtgatcataagaaataatgaggacctgatcaaagtttttggcagtgaggatggcaggcaggggacagctaagagatatgtgggagatagaatatatgacatgtggagatttaactggaaggatgggggaaaaaggcaaatggaatcyaggatgactccaggtttttggtttaagtgtatgaatgatgtttccttgtgttaataaaaggggaaacaggaaagagaacaggttagggttaaaggagagtatgacgaattatggtaagtatgcaaaattgatgcaacattgaggtgacaatgttagaaaggtaattagaagtaagttgggagagtaggtaagtttaggcaagagcgatgtgtaacctaacggggagaaaggctgaggtctaaaaacacagtcttaaacatcagcatttacaaattgggcaaaaggatagcctgcaaaagaaaaatactgagaaggtgagtggtcagagattggagagaaccaggaggagactgatgccatccaatgaagccaagcagagggagagtttcaagtggtgcatgatcaccaaccacagcasgcggctctgatgtgacaagtcccgagctaaattcctggacttggcaactaggaggtccctggggacctctcaacagagagttccggggtgcgctgggagctgaagacatggaggcagggtacttgaccatggacatgaggacagtagctagatgggggaatgaggttgggaggtttctggttttttattaaaaaaaatcttaaaatgttataaatgatcatgtttattatagaaaatttgaagaatacaaaagaagtttgaagaaggaaatggaaataacccataatcctaccacccagaaaaggaaaaattatttttgatggaggagaatgactttaaaatattttaatttaacgtgaaagctgctggtccttgttgttcctagtctagaattaggactttataaactggtctttgcatgtcaaatctcttcttcaaactcatcttttatctcaggggtcagaaaacattgagagggtcaaatagtaaatattgtaggctatgttggctacctgtagtctccatcacatattctttgtctttattatttatgatccttttaaaatgtaaaaaaaaaatttarcttgcaggctgtacaaaaacaggcccacggaccatcatttgtgagcaccttcttcatagcactgccaggttagcctcctaaaatgcatctctagtcatgtcactcctctctctactttttggtaatttgttttagcctgccacataatattaaaacattttagcctgagatcaggagcccctccaaattggtgctaaaatactatctgagctgcatctcacattattttcttacagactttgtgtgcttttgcatttttatgctttgctctctgtttttctctgcactttaaaaaagtctacccatatttcaaggccaacatttatgctctcttaaagtctcctcttacccagaagtggtttttcctctcagaactctgcaagtaatctgaccatatccttttctctacttgtgttgattgccttctgctggatacttgtaacttctcttttagtttgtaaggcagagggtactatctatagagagagacattatctttattgcgcagaacacttagcaccatttacttgttgggtagaatgtgttggaaaataaaaactatgagaagaaaatgtgagaaaagtcttgtttggccaggtgtgatggctcactcctgcaatcccagcactttgggaggctgaggcaggagaattcctggaggccaggagttcaagaccggcctgggcaacatagcaagaccgtatctcaaataaataaacacaaattttttttaatctttttttttttttttttttttttagacggagtctggctctgtcacccaggctggagtgcggtggcgcgatctcggctcactgcaagctccgcctcccgggttcacgccattcttctgcctcagcctccctagtagctgggactacaggcacctgccaccatgcctggctaattttttttgtatttttagtagagayggggtttcaccatattagccaggatggtctcgacctcctgacctcgtgatccgcccgcctcagcctcccaaagtgctgggattacaggcgtgagccaccgcacccagctggaaaaaaaaaatcttattcataacaagctttcaactttaccatgattgtggggctaaagtccaaggacattatacagcaaggctctgttgtgttttttatccttagggatttaagaaaatctgtggactttctttgatggagataatggaattttttttagtgggttattttctgtatagtagatratattcaatatacaaactaatctctgctttgcttaaacatatttcttcttttataatagtctaaggaaaaattgattaacagcttgaaagaaggctctggttttgaaggcctagatagcagcactgccagtagcatggagctggaagaacttyggcatgagaaagagatgcagagggaggaaatacagaagctgrtgggccagatacatcagctcagatccgaattacaggtaagattcatggtggttcagcttagtagacaccatttaccctcaggtgttaacagtttgagaggtggggaaacagcattactaaagcgataggtttctcgcttctcttcgcttcgcttcgcttcgcttctcttctcttcctcctcctcttcctcttctcttcttttggagtcaggatcttgctctgtctcccagcctggagtggtgtgatcatagctcactgcagcctcgaactcctgggctcaagcagtcttcccgcctcaggctcccaagtaggtggaactacaggcacatgccatcacgcccagctaatttttatattttgtagagacagggtatccctgtgttgtccaagctggtcccaaactcctggcctcaagtgattgtccctcctcagcctcccagagtgctgggattgcagggctgttgcagcccgtgctgggctaaagcagtaggtttctttctttctttctttcctttctttcctttctctcctttctttccttcctttctttcctttctttccttcttttttttgagatggagtctcggtctgttgcccaggctggagtgcagtggcgtgatctcggctcactgcaacctccactccacctgccaggttccagggattctcctgcctcagcctcttgagtagctgggattacagacgtgcgccaccacacctggctaatttttgtattcttagtagagatggggtttcaccatgttgcccaggctggtcttgaactcctgacctcaagtgatcygcccacctcggcctcccaaagtgctgagattagagacgtgagccaccatgcccgaccaggtttctaatccataagttgaccataaagttatggtgataaaaaacagatcaattcattcaacaaatagttaccaagtgcctgccatgtgcctaggtttggarttagaacagggtcttcataattatagatcttacattctagtggttaaaagcaaatcagatttgagctcctatgtgaagctgagatgttttctaatattagtatgggctcagggatgatcttctaattacagttttatccttattcttataatttatagtttatgtataattactatatttaaaagtaaagttgggccatttattttgcttaaacttcrgggtctttgacataaatatcgtaggaaggagtctctgaaggtgagagaagataaagtgcagcataacgagcttccttttcttaaaaggaagaaactttttgtagagaatgttcatccatgcattaactctgcacattgtgagacttgtgaactacaaaagaaagcgtgaaagttgtgagaataggataccttgtctagagcatagacttgaatagcagacagacgtggatagattctgtctttggtacttaacagatgctgcttccacaaggcacttcatcttgcggagctttaattttctcatctatagaatgcaggtaaacaaaggttctcttgacaataaaggataatatatgaagagcctagcattgtttctgacatgtaatagaccctcagttaaataatagctgctattatttctgggtttattgttattcattaaagtaggattttttttttaatctgtgaatttgaattccaaagaattcagtcctgcaaacttagaaattgggtagatgctaaacttactcatatctgttcatgtctttttggtgagattatgaaaaatacttgttttatttaatatatcagcatcattaatgacattgacccattttyttacccttctcaaaatttatgcaatgtataataagtgttaggtctaacaaaatgaaagaattgtaaataattacaatagctattgtttactgagcacgtatgttccagatactgcacagagcacttaacatatatccttacatttattccttaccataactctgtgagggagatgatgatattctcattttatagttgaagaaatttaggcatggagaaggaaagtaacttgctgcaagactagtaaagtggcagagccaggattagaacctagtctaactccaggacatgtttttgaccactgtgcatactgcctgcctctcaagaatttgcccgatgtagtcaaattgatgacaaagattaatctaccttctgctaacctgaaaactcaaaggtagggaaaaatagttgtcattattgctttttcctctaaatctacaaagttgtgtgagttcagaggattgcactgtgattatctgggcatcttgttagtcttagttctttcaaacagcatgtgaagttccaaggtttgtggtgatgagtatgaaacagaatgtaccaacagataaaaaagcaaaaataagatgctgattttaatcttctgttgtgccatatgaatggactcatgcttaatccatttggggaaaatatagaaacctagagccatgtttttgctactaggagatttgacaggaaatccagaaggtgagttcaaagaaatgagagtaagaaacataagaacatgtaaaaaccaataatagtaataaagcaataaagctaaaagaagaaaattatatgccaacttctggtgatatgcaagacaagttatattcttatcatatgttgattactggggaacagatgcacaccaaaactaattataacctgcaatttcaggggactaatgcagtgaagtcctttgtgctattatgtttctgattttttttgaaactgttagcttttgagtaaagatataagtctcccagtgagcctctgccgatactcgtgaaaccacatggcttatgtgctgcagcagctgtagcgccccattcattctgctgttagccatagtagacaatgaaggtgtcaggttatatgctccctataggctgaaaccatgtctcattcacctttattcctcagtgcctcctgagcccagcacatagtaattgcatggtagacaggttgtgtggctcaacacctgtaatcccagtgctgtgggaggattgtttgaggccaggactttgcaaccagcctgtgcaataaagccatatcccatctcttaaaaaaaaaaaaaaaaacttaagccaggcctcgtggcatgtgcctrtagtcccgctactcgggaggctgatgtgggaggatccccttgagcccaggagtttgaggctgccatgaactgtgattgtgccactgcactccagcctgggtgacgtragactcygattcttaaaaaagaaaaattgctcaataaatgttgaactgaatgttaattattgcttttmcatgtaagctttttctstttaggatatggaggcacagcaagttaatgaagcagaatcagcaagagaacagttacaggatctgcatgaccaaatagctgggcagaaagcatccaaacaagaactagagacagaactggagcgactgaagcaggtcaggatttgagattgatgactkctgagactctgtcctctagcggtcatatgagcagacctcccaggaaagcagcttactgaaatttttagagtatgggcttagggttaccccacaagttcctcctgccttcccatctcatctgaaggggtggcctgccyctccacacctgtgggtatatctcatcaggtgggatgagagactgagaaaagaaataagacacagagacaaagtatagagaaagaacagtgggcccaggagaccggcgctcagcatacggaggacctkcaccggcacyggtctctgcgttccctcagtatttattgatcactgttttcattatctcagcaagaggaatgcagtaggagagcagggcgatagtggggagaaggtcagcaagaaaacatgtgagcaaaggaatctgtgtcacaaataagttcaagggaaggtactatgcctggatgtgcacgtaggccagatttatgcttctctccacccaaacatctcagtggagtaaagactaacagagcagcattgctgccaacatgtctcgcctccagtcacagggcggtttttctcctatctcagaatagaacaaatgtacaatcgggttttatcctgagacattcagttcccatgggcaggcaggagaaagaggccttcctcttatctcaactgcaagaggccttcctcttttactaaccctcctcagtacagacccttgacaggtgtcgggctgggggacggtcaggtctttcccatcccacgaggccatatctcaggctatcacatggggagaaaccttggacaatacccggctttccagggcagaggtccctgcagctttccgcagtgcattgtgcccctggtttatcgagactggagaatggcgatgacttttaccaagcacactgcctgtaaacattttgttaacaaggcacatcctgcacagccctagatcccttaaaccttgattccatacaacacatgttttggtgagctcaaggttggggcaaagttacagattaacagcatctcagggcaaagcaattgttcagggtacaggtcaaaatggaatttcttatgtcttccttttctacatagacacagtgacagtctgatctctctttcttttccctacaccatcctccttgatttttgttttttaacagatgagaaatggaggcacagaatggtgatggcacttgcctggtacaactaattaaagatggaatagaaccaaggtttcctgtttctgagcccagaatgctttctattaccctgtctgtattttgttatatctcctagtatagaaaacttcaaaacatattatattcatcagttggttttcatagtttattgcatttgtgctttctaggaacagcagtaaatattatttaataaaaatacagatacaatattagtgccatattaactgttctttctgcttgagaaaaaagtcttatacagactcttctaacaaatcatgtttaaaattatatttcattgttcaattagcagttgcatgttcccaagccaaattattttactttaatgtactcatataatagtttcagtattaacagagttaaacatagccacattttcagaataagattctatatctaatgttaataacatcactaatttactaagtgacaacattgttataggcatttagtacatattatcttatttcctactcacaagtaaatcactactattctctttattttacagaagagaaaactattcttataattctcagtgctttactgttagtatttccatctttgtgtatttaaattctttaaagacgtttttcattaggatttattacttctgaaacttgttcttttctcagagaaatgttttttattataaaagttgtaattcaactctatttcctgagtactcagtgaaaaactcaccaagtaacaacgtgcagggtatgtcataggcagttttagataatttagttatgagattagcgtcctttcagaaattgcattttaatttattcaaggcactattatatattaaaaggcaacaatttaatgttcttgatgcttaatgagataattttcattttgttatggcagatggttttaccgtacctcttcccagtgcctttttaaaatgagggagttaaatagaagaaaatggagcttaatgtagctgtgggctatttatttagtatatgttccaaatggaaagtgtttaatcttgcaattgaagagtcctttagtgcttcttattaatttaagtaacaccaaccttaagttttgtacttgcctagagcttaaaagaaatcagacaaaccttgtaaagtgtgattctcctaccctaattacctttctcataatctcttttctcacctctcttgatttttttccatttgtgtgatgaacaacttgagctaaatgtttaacagagtctctagcagtgtgctgccatatcacctttactttttcagacagctcccgaactgctgctgtactcttcactgtcttcactgttaagtgaaaagcttttgaaagtacttagtaactccagttactccttctctgttctacgttgtatttcagtgatttggacacatttttggattggcatgtgctttactcttagattctgagctgtctctgagtgatccattgtacaaacgagcagtgcattagtgcagttgttaatgagtttagaggtattagcctttttggggagattagccttttgtctataatatgaattgcaaataatttttcccagcttgtcatctgtcttttagtttgcatagggtttttattttgttttgttgccatgcagaagttgatttttgagacggagtgtcgctctgttgcccaggctggagtgcagtggcgcgatctcggctcactgcaacctccgcctcctgagttcaagcaattctyctgcctcagcctcccgagtagctgggattacagacgttcaccactatggctggctaatttttgtatttttagtagagacagggttttaccatgttggccaagggctggtctcaaactcctgacctcaagtgatccacctgcctcagcctcccaaagtgctgggattacagttgtgagccactgcacccggccagaagttgatttttatgtagtcaactttatcattcttttctaccaaggcttctggattttcagtcaccgtgttcctctttgtgaaattataaagaaatttgcctctgtagttttcttctagtacttttttggtttgattcttgcatataaatctttgatttattaggaatttactctgatgtgtgaggtgagctacagatccaaccgaattttcttccatatggctacttttttcctagtatcattttttwaaatagtttattgatttgagatgtcacctttatcatgtcctaaattctcaaggtatctagatctgcttctggacttttgttctcttccattagtcactttgtctgtttatgcatcagtaccacattgcttttaatttctgagattttatatgttttaatgtctttatgacccgttytccttttcagagcttctggcttttctttttcttttctttttttttttgagccatggtttcactctgtcacccaggccagaatgcagtgatgcggtcacagctcactgcagcctcgacctcctcaggctcaggtaattctcccacgycaacctcctgagtagctgggattacaggcacgcaccaccgagcctggctaatttttttatattttgtagagatgaggtctcactctgttgctcaggctggtcttgaactcctggactcaagcaattcacccacttcagcctccccragtgctagaattacagttgtgagctaccgtgcccaacctggcttttctttcttacagttttccatatgaatactagaataactttacatagttttttttaaaaaaagcagcttttgtttttgttgagatcatgtcagacttatgaattaattagaggagaactgacatctttatgatgttgtattcctaagaatatgatatgactttttatatgttccagtattttttgtaccctttagaaatgttttaaagtattctttatatgtactccacacatctgttgttaaatttgtttttgctactattatttcttggggcctttttctcatatcttctaactgctttatataaaactattgatttttatatattgttttatattctgccaccttactgaattattgtttttctttgtctcatgtactttgcctatttttaaaatgttcctggtttgtgtttttaatctattttatgaacattatattgatctttatcatatattttatgaatattttttccagttgtcatattaatgctatataactgagattcttgaagagattatccattcttcctcattacaagataaacattttttgtttctgattatttacactgttaataattatttattatggatctttgtttacaatacatactgaagtgccagcttttcatcagacccatctgttattcacttarttatatactcattatataatacactctgttataaactcagttatatayggagttacatgttcagcacatactgattgtctaccatgtgccaggcactgatttaggtactgaggatggaataggggacacttayttygcttctgttttgtttgtgcctcactttgcaggagttccactatatagaagaagatctttatcgaacaaagaacacattgcaaagcagaattaaagatcgagaygaagaaattcaaaaactcaggaatcaggtatgaatcactattcacaacttgtgaaaagatgccactgataaagctacatttttttaaaaaggacacagtaagaactttccccgtgttttcasctgagttcttttgtaacagtggtracaaaagttcttttcaacctggtatagaaaattcatctaatgccatttgagtctacatttgctctgttctatgatttgcttcttatagaagtatcttgtagccaaagtcacgaagtagatgagaattaccccgaaatttcagacctttgacatcagtgtggttgtgctgattgccaggttcataattgtgatttcattttcctaagaaaaatctaatgatamatcttcctattaatgattgatcagtcttccataaagtcaccaagatatttttttaaccgtgaaaatgtaaaaygtacagaaaataatgacactcatgtgcctaccacccagacttaccaaagcctttatcattagctgatagagtcacacgttcacattccctgtaatcatagttgtcctttccttccttaggtttagacaattgatttaatggacttaataatcatttaaataatttacataaagattgagtctttattttttagttaatggcttagtttgaactatgaaaagtcaaataattttggtcttttaagtttccagacttgatagtagtccataattttaaatgttttgaaatactttgtcttaatttttataagagttgagaacagctcactgatttgagcattcccttcttcccttgcctattttgtgaaatacttacagatggtcacgtgatgtgctagcagaaagtcaaaagaaggagcaaaaaccaccaattggtttaatcctttttctrtatttactaaatatttattgagtacctactgtatctgaagtattgcaccatttttgttaatcaagaattaggccaggtgaggtagttcatgcttgaaatcccaacactttgggagaccgaggcaggaggaccgcttcagctcagcagtttgagaccagcctgggcaacatagtgagaccttgtctctacaaaaaatcaaaaaattaggcgtggtggcacacacctgtagtyctagctactcagaggctgatatgggaggatcacttgcgcctgggaggtcaaggctgcagtgagctctcagtgcacctctacactccaccttgagtgacagagtgagaccctgtctcaaaaaaaaaaaraaaaaacaaccatagggtggcttatgcctatagtcctaactacttgggaggctgaggcagggagatcacttgaggtcaggagttcaagatcagcctgggcaacatagcgagaccatcatctctaaaaaaatatttttaattaggtgcatggtggcacgtacctgtaagtcccagctacttgggaggctaagacataaggatcacatgagcctaggagttcaaggctgcagtgagctatgatcaccccgctgtactctagttgggcaacagagagagactttgtttcttaaaaagaaagaattaaccataggaggatttctctgaaaggtttttcatcaaattagaagagagcaaaacctttgtcccgtagaattaagttgacttgtacaatctgaaaagagatcagcatcttaatacattgccaaaaaaaaaaaaaatcacacaattggagtgagttaagatttattctgaatgaacaataaagaattatgcttattatttttgggctttctgcatgtaggttaaaaaaataggttgccagtttgaatgttttttcatttttcacacctgtaatcccagcactttgggaggccaaggtgggcagatcacttgaggccaggagttcaagaccagccaggccaacatagcaaaaccctgtctctattgaaaatacaaaaaaattagctgkgcatggtggtgcagacctgtaataccagctacttgagaggctgagacaggagaatcacttgaacccagaaggcagaggttgcagtgagccaagattgtgccactgcactccagtctgggagacaaagccagactctatctcaaaaaaaaaaaaaagaaaaaaaagaaaattattgcatgggagtagatgaaaacatacagagaaaaaaaatgaacctttatttttatcccctaattagacttgcaaagttaccaaaaattaatttgagatgacgctaagcctaagctataaagcttctaggagaacgtgtaggagaatctttttgcaattttgaggctgacagatttcttagagaagatacaaaaagcgctaactgtagaagaaaatgatacattgctattcataaaaattaaaattttcttctcatcaaaagagattataaaaataaaaacaggtaagccacagattgggaaataatatttactctctctctctgtatatatatatctgataaaggatttataaccaggataagaactcttaataataaggtgcacagccatttcttttaaataggtaaaagacttgaatagacccttccaaaaagaagaaaaaagcacaccttgttttattgcatttctctttattgcagtttgcagatactgcatttttaccaaattgaaagtttatggcaaccctgcatcaagcaagtctgtccacaccatttttccaacagcatatgctcacttcatgtctgtgtcacattttggtaattctcacaatatttctgattttttaattatatctgtggtgatctgtgatcagtgaccttttatataactattgtaattgttttgggggcacacaaactgcatccacataagacagtgaacttaatccataaatgtgtgtgttctgacagctccatcaactggccattcccacatctctttmcctctcctcaggcctttctagtctttaagacacagcaatattgaaattaggccaattaataaacctacaatggcctctaggtgttcaagtgaaaggaagagtcagatgtctctcacattaagtgaaaagctagagatgattaagcttagtgaagaaggcatgtcaaaaggcaagataggcccaaaactaggcctattggcaccagtcagccaagttttaaatgcaaaggaaaagttcttgaaggaaattaaaagtgctactctagtgaacatacgaatgataagaaagccaaacagccttattgctgacaaggagaaagtttgagtggtctggatagatcaaaccagccacaacattcccttaagccgaagcctaatccagagcaaggccctaactctcttcaattctgtgaaggctaagagaggtgaggaagctgcagaagagaagtttgaagctagcagaggtttggttttgaggtgtaaggaaagaagccatctcccaaatgtaaaaatgcaaagtgaagcagcaagtgctaatggagaaactgctgcaagttatctgggagatctagctaagatcattgatgaaaatggctgcactaaacaacagattttcaatgtagatgaaacagccttctattggaagaaaatgctatctaggactttcatagctccttctccaggagaggagaagtcactgcctggattcaaagcttcaaaggacgggctgactctcttgttaggggctaatgctgctggtgactttaagttaaagccagtgctcatttacaattgtggaaatcctaagacccttaagaatgatggtaaatctgtgctgcttgtgctctgtaaagggaacaacaaagcctagatgacagcacatctgttcacagcatggtttactgagtattttaagctcactgttgagacctattgctcagaataaaagattccttttaaaatattactgcttattgacaacattcctggtcacccaagaactctaatagagctgtacaaggagattaatgttgtttatgaaaacatttttgtttcatccattgtttatgaaatcatacctgccaatacaatatccatttggcagcccaaggtataattttgaccttcaagtctcattatttaattaaattaattaatttatttatttttattttttgagacagagcctgattctgttgcccagactggagtgcagtggcctgatckcagctcactgcaacctctgcctcttgggttcaagcaattcttgtgccttggtctcccaagtaactgggattacaggtgcatgccagcacactgggctaatttttgtatttttggtagagatggggttttgccatgttgggcaggttggtctctaactcctggcctcaaccaatccacctgcgtcagcgtcccaagtgctgagattacaggcatgagccactgcgcctagccagttaatttatttttgagacaaggtcccactctgtcacccaggctggagtgcagtggtgtgattttggctcactgcaacctccacctcctgggctcaagtgatcctcccacttcagcttcgcgagtggctgggattacaagtgcaagctaccacgcctggctacttttgtttttttgtagaaatgaggtctcactatgttccccaggctggtctcaaactcctaggctcaagtaatcctcccctctcagccttccagagtgctgagattacaggagtgagccactgtgcctggcgagtcttatcacttaagacatactttttataaggctattgctgccatagattccttagttggatcttgaggcacagtcaattgagaaccttctggaaaagattcactayactagatgccattaagaacatttgtgattcatgggaggaggccagaatatcaacattaacaggagtgtggaagaagctgattccagccctcaaggatggctttgaggagttcaagacttcattgaaagaagtaattgcacatgtggtagaaatagcgagagaactagaattagaaatggagcctgaagatgtggctaaattgctgcaatctcataataaaacttaaacagatgaggagttgcttcttaccgatgagctaagaaagtgatttcttaagatggaatccacttttggtgaagatgctgtgaacattgttgaaatgacaacaaagaattkagaatactacattaacttagttgatgaagcactggcagggtgttaaaggattgactccagttttgaaagatgttctgatgtgagtaaaatgctatcaaacatcattacatgctactgggaaatctttcgtgaagggaagaacccatcgatgtgacaaactttgttgttatcttattttaagaaattgccacatccaccccagccctcagcagccaccattctgatcagtcagcagccatcaacatcaaggcaagactctccaccaacaaaaagattaggactcactgaaggctcaaatgatggttagcatgtttatttaaagcaagcttgggccgggcatggtggttcacgcctgtaagcccaccactttgggaggccgaggcaggtggatcatctgaggtcaggagttcgagactagcctgaccaacatggtgaaaccccgtctctactaaaaatacaaaattagccgagcatggttgcaggtacctgtgatcccagctattcaggaggctgaggcaggagaattgcttgaacctgggaggcggaggttgcagtgaggtgagatcacaccattgcactccagtctgggcrgcagagcaaaactccgtctcaaaaacaaaagcaagcttgtccgacccatagtcaacccaacacagaattcgtaaacttaaatcattatgagattttttttgtgactggtatttttttttttttagcttatcagatatcattagtgttagtgtattttgtgtgtggcccaagataattcttctagtgtggcccagaaaagccaaaagattagacatccctgatttaaagtatgcacattgttattttagacatcatgctactgcactgttaatagactacagtatattgtaaatacagctttttgttgttgttgtttttgggagacaggatatttgctctgtcacccgggctggagtgcagtggtgcgatcacagctcactgcagccttgacctcccaggctctagtggtcctcccacctcagccccccaagtggctgggactacaggcatgcaccaccacactcggctaatttgtaaattttttgtagaggtggggtcttattatgttgcccaagctggttttgaactcctgggctccagcaatcctcctaccttgacctcccaaagtgctggagttacacacgtgagtcaccacacctggcctaaatataacttttatatgcactgaggaaccaaaaaattcgtgtgactgactttattgcaatattcactttattccagtggaccaaacccatattatctctgaggtgtgcctgtatatgaatgattaaataagcatgtgaataggtgctcagagtcatcactaaggtatactaccacacacccactagaatggctgaaatggaaaagattggcagtagcatgtgttggtgaggatgtggtgcagctggaactctcacccactgctggtggaagtgcacagcagcacaaccactttggaaaactggctgtttctgataaggctaacgtacatctaacctgtgactttagatatttacccagtgtaaatgaagatgtatgaccactagaagacttgtacatgaatatttgtaacatgcttgttcataaatagcccaaattggaaacaacccaaatgtccatcagcaggtaatggataaacaaattgcaaaccattcgkcaaactaacacaactcagatgaatttttttttttaaaagccatrtgcaaaaggattcatactgtgtgattccactcaggaaattcaagaataggcaaaactaaattctgctaatagaaatcagaatagtgattgtctagggtgatggaaacattgtttgttttgatcttgatgctgactataccgtcaaacatttgtcacagttcgttttttgcttaatacctgggtatttcactatatagattttaccttgattaaaaaatcttgaagtatgttgattaggggatcatagtaccatsttaaaattgagcattcttttaaaaatagtaaaccttagtttataytcaataaaattccatctggtagttatttgttgtggtgtgcttaatttgtggggagtgctgtaaaggattcataagaaaggaagctaattttttaagtgcctaccatatgacaggtaccatattaggtgttttatatgttaatttaagtaagcatcatatcctatgaacaaggaaacaggctcagatttaatagctttcccaagatactgtagctaggaaatgtcagagctggggttttaaacttagatcaaacttttttcaawactgtattgatgtagacaatgattcttgccctcatgaagctgacttacagtgtcattgaggaggcaaaattgactcccataaaacagcgttatcggagtgactgataaataccaagacatttaccaagaaagctaagattaacctgggctagagtgattagagaagacttcaacaaagagtatgaagtatgttgattaggggatcacagtgcaatcttaaaatggagcattcttttttaagtagtaaaccttagtttatgttcaatataattccatctggtagttatttgttgtggtgtacttaatttgtggggagtgctgtaagggatttataagaaagaaaggcaggtggagcctagataagagaaggggactgagtttccaaacagaggaaacgtggccggcatagccgaggctggatgagagtagagggagatggagacagataagaccagatggaagatggaatgaaggaagtcgttaagtatcaactttcagccagagtctcctaggacaactatcatttactgtccctaaataccatgtgcaacrggtgctgtcatcttcactaacagatgaggaaacagattcagagaagtatagcaattaacctgaagtcaaatagcttgaaaattgcagagcagagatgaaaacctcagagtgtgatctttgcrctgcaccgtaactgttgaatgayggaggcttttgaatccctgttgaaaagtgtggattgtgtcctctaaacccatgctttgaaatactttgaccatgacgcctcagtgagaaaaacagtttacatcgtgtctcagtactgacatgcacttacatgtaccaaactgaaacaggagtttcacaaaattatacttttatatatactatatgttacataaatatcagaatatgtcccattctattacattttctaaaatgctgattttgacccaccaaattgatttcatgaccccagtttttgaaaatcacttttgtagacattgagtcagtatagagttttgagaaatcaatgaatgccacaatttacctatgaaaatgtagtagtgtgatttctgtattgtatgactttcattttatgtaagaattttgtgaacactttctctttcagcttaccaataaaactttaagcaatagcagtcagtctgagttagaaaatcgactccatcagctaacagagactctcatccagaaacagaccatgctggagagtctcagcacagaaaagaactccctggtctttcaactggagcgcctcgaacagcagatgaactccgcctctggaagtagtagtaatgggtcttcgattaatatgtctggaattgacaatggtgaaggtaatcaaaaaaggaatctcaaaagaacatttcattcaaacatgcttttgaaaagttatagaaggactatttttatttgaaagaaacttcatccagtgaaggactcaattttctgatatgagacctgggccacgtactgtttagtattgttagtgaaccggataatggactaattaatattcctcaccagtattagacttggggaaagtagtctgaggattgataattatattgtaatgtctgagacacttaacaagatgatgctgacaaggcgaggaattcagtagagaggagctttcaggacacttgaaacaagatttgctttaataatcttccagtaaatagttacgggtattagagctaatacatagttcacataaccatatctaaagaaatctatagattcccaacatatgtaattaaaaaataatgtgtaagatagtataagcatcaacagatcagatttttaatcttggaacttcgtaaagtctacaaattgtcattcagcaaatttctcagttctttggctttaaattatttcttttaataaaaaaaattgtttaagagacgctgggtgccaggtatggggatggcactgtaatttaaaaagggtgatcaggaagacctcgttgaaaagtgtcacttcttttttttttttaatgtataattatcattttatttgtaattgttaattacaagtaaaaatgaaattataaataagtaaatcatactccttaatggcataaataaaaagtgcctcgcttaaattaataaaattttcctgaccataacttctgtgattttttwaagggttttcagtttcttttaggtttcaccttttttttttttwttttatttttttattattattatactttaagttttagggtacatgtgcacaatgtgcaggttagttacatatgtatacatgtgccatgctggtgtgctgcacccattaactygtcatttagcattaggtctatctcctaatactatccctcctcccccctcccccagccccacaacagtccccagagtgtgatgttccccttcctgtgtccatgtgttctcattgttcaattcccacctatgagtgagaacatacggtgaaaagtgtcacttctttaaagtcccaaaggaggtaagatagtgaacaatgaggaggcatagaaaaaaagtgttccaggcagaaagaagagcaggcacaaaggccttgaggcaggcatgttcctggcatatttcaggaacagcaaggaggccaaggcctctggagtagactgagtgaagaagacacttgtgtaagatgaatccagagagcttagaataggccgttgaggcctgtatggggacttttactctgaatgaggtaggaagccattgaaggatcttgagaggggggactgatctgacttgcaccttaataggctgcctctgactgccatgtcaagaatagactgcacagggctaaaagtggaagcagggagacagggcaagaggaggccggaggtgggtgggtagccattgcattaatccatgtgagagatggtagtctagaactgagtgggattgtgaaggtggactgagaatttattttaaaggtaagctgacagaatatgttggcagatgagatacggagtttgagagaaaggagtcaagagttttggcctgagcagatggaaggattggaattgtgatgtcctgagacagggaaatggcagctgaggcaggttgacagcgaggacaagaactctgaattgtagtgttaggcaggctttggggtgcccgttagatatctggatggaagcgaataggcagttggatgagtctggcaggggatgaagcctctgggctggagtacacatttgggagtcctctgcttcatagaaagaccacccggcctcactcctcctcacataggaacaaagggcccattaatattgactcttgtcaacgcttagtatttgtaaatttcttaatttttgctaaaatcattttcttatttaaaacttttttcttgttgtggatatggatgtttaaatatttatgtcatcaaatttacctgtcctttctttatagtttcatctactttggggtgatgcttagaaagttgcccttgaaaattccttccacatgtaatacagtgtatttccaattataattgtcttagttaatttttatgtcagtacactaatttattttcttatttaaacaggcactcgtctgcgaaatgttcctgttctttttaatgacacagaaactaatctggcaggaatgtacggaaaagttcgcaaagctgctagttcaattgatcagtttaggtaagcaatgccagtagggatgagtgatggaccatcagctgtttttacgtttttcagggtttcaatcacagtgactcccatcaggcagagtctatatttaaagtgacttactcctttcaagatattttatacttatatacacttttatttatttcacagttatattacactttcatgaagtgacttctttcatgatatttgaaatatcatgtcagaaattatgtcaagaggtctgccaatgcctacattttattgaagatgattaaccctgactatacagggtttwtctatmataatttttctataataaattctatttttaaaaacttcattaaattttattgagaaagcctctacttcatgtaaaagtatccatttgaatgttttatcccagaattttatcatgctattagaataaaagatgctactatatatagctgaacagcactcattgtattatatattttatataaataacaaaatttatgtttatgtatatgtaaattttttatattagcagacatctgccttatcaaaaaaatattttaatagtttacatatagcattgataaggttcttgtctaaataacctactgtaccctttttctttgtagtgtttataatgaaaagttttaatgaattgtggcataataatctttttgtacctttttgtgtcagaattgagctattgtattaaaaataagaatgatataccaagatgactgaagcctcagaactaggatgccatagccattatgtccaaattaagcacatctagttcaactattcatttattcaacatacgtagttgttagagaacctaagtgcaagacattgtgctagtggcaatgaaagaagcagaaaggggtattgcttctgcatgtayctgtcttgatagggaaaaaaatgttgcagaggcataatagatctggacatcatattgcttccacactatttattcaaatgcatgagtttatagctttgtaccttttagaagcatgtatctatacaaaagcttctagattagctatttgcaggttaatgccaaccagactctttttttccccagtcacatagttgacacccacctaatctttcgtaacttctktaattccactaaaaaaagatttaggccgggcacggtggctcacacctgtaatcccagcactttggggaggctgaggcaggcggatcacctgaggtcaggagtttgaaatcagcctggccaacatggcgaaaccccgtctctactaaaaatacaaaaaaattagccaggcgtggtggtagtggcgcacctgtaatcccagctactcgggaggctgaagctggagaattgcttgaacccaggaagcagaggttgccgtgggcagagatcgcgccattgcactccagcctgggcgacaggagagaaactccgtctcaaaaaaaaaaaaaattagggatcaagtttgcctcctacagttgtggctgtagaattaagagaaatacctgtgctgaagtttaacagccaagccccaaataatgataaaagcatttatttacctctatgacatttttatattattatttcaagtaatcatttaacagtctgctataaaaattgttcttytgtggtagccacataaatagtttaaatgagttaaatttatcagcatcattagatattaccacaggaagatttgttttgactgtgactcttctctctcctctccccctcacacctgtgtctgcacagtattcgcctgggaatttttctccgaagataccccatagcgcgagtttttgtaattatatatatggtaagtaaatttatttgaaaaaacaatgatgcacttgatttttaactagtttttttktttstttgtttgtttgttttggctacagatcttattgatattttagcaatcaatcaatttttttttgttttttttgaaacagggtctggctcttttgctgaggctggagttcagtggtgcagtcttggctcactgcagcctctacctcccaggctcaagccatcctcccacctttgcctcccaagtagctgggactacaggcgtgcaccaccatgcccagctaatatttgtattttttgtagagacagggtttcaccatgttgcccaggatagtctcaaacttctgggctcgagtgatcctcccaccttggcctctcagagtgctgggatttcaggaatgcgccaacgcacccagccagcagacagtttggaaagagagaactcagttttagtaattaagatttcttttggtagagtataaattgacaattcattatgtctagaatataaattcctcaaaggcttttcctacaaataaaattaaacgcagtctaatagttacctccattttaaagcccttctaatgataaaaacaatttgaatacaaaacaattttttatcttgacgttgtaaagttgctttaattgttttcatgtgttttgctttattttctaaaagagcctcaagattgatttactttctcccagatttcttacctctagtaaaatggttacggtagtttgggatgccatttcgcatgtaccgtgtgcctaaaaaggctgctaactatttggagtgggtatgtctaaaagtagttgggttgaatgaaaatgggctgttttcttgaaaagaaatttctttaaaaagaaatttctctgtgatccactagagggaagagttattcctttaaatacaggttttgtgttgttttttttttctgagactgagtctcgctctgtcacccaggctggagtgcagtggcatgatcttggctcactgcattctccacctcccaggttcaagcgattctcctgcctcagcctgccgagtacctggggctacaggcgcacgccactgcacctagcgaatttttctgtgtttgggagatgggttttcactatgttggccaagctggtctcaaactcctgaccttgagtaatccgccctcttcggcctcccaaagtgctgggaytacaggtgtgagccactgcacctggcataataacaagtttttaagaaggaaagcgtggggagtacaaaaaaaaattgaatggcatcagaaagcattcagaatatgccccagaggggttgatttcccaggtgttagtgatgatgagtaacacgggcactgtcatgagatggtgcccatgagatgtgatttctggcacacgacaaagtggtgaggcacttagtgatggaatctcgtatcatttcggtactacyatgagggaattaaatttgtcactatgaatcgtgttctgggccctacatcagcctctgaaacgacacattattyctgtctagaatattttcccatctcttcttcaccgaacattggttaaactctctttcagaataccaactataactgttctaaaagtgttttctaaccaacttcatgtgtatctagcagttttaatcactctgcattataatcaactgattattttgcatasacrtgcatattgtgaatgtgttgaagttcagagctgactcctctcaactgaattctgtaggagtagcaagtctttattaccttccattgcactgagctcatttagttgtttcattcattccttcatgtgtcccataggggatacagaggcaggtaagacacagtgcctgccctcagtgtacagtgggcctttggtaaaaattggtttattggctaatccacaaattgctttttctttctctaggctttgcttcacctctgggtcatgattgttctgttgacttacacaccagaaatgcaccacgaccaaccatatggcaaatgaaccaagcccagttgttgcagtgattggttgtctttttctagacttgggatctgcaagaaggccaattgcctaaaatttctgagaacagtgcacaagattattttatcactacaagcttttaactttttaagttattgtacaagtattctacctaaatcttccaatttcctttaaatggtaagagtttctaaaacagacaataatttaacaagctcagctctgctttatctgagtttagtggtcctaatatatatgtagagaaagawggtggggttgttcacctctgtacagaccawctgtatgttaggtgacattgattatgggttataatcagggaaactaattgtatttagtgacaaaaataaaaagtttttttttataattcagtctgcttttggattttcatatatttaactttgcaaaaagatttactttgtacatgttacaggcttgattggtgtaaatctttttataaatacataaataaaagaaaaatatgcatttttcttttctaaaataatggtttttcatccccattaaacaagacctttccagacggactttagtgagtagagccagacagaaagcagctgaagtcacttgtaagtaattcttagtgtttgccacttcttcccaatggatgctcctgtcttcccctttccagctccctgtgctgtcttccttggattcttactcactcattgccttccttttctccagcctatatgttgagttagctcgtgatatgcataacccctgcttgtagtgtttaggaatcaaacctgccttagcaacctatgcttttttaaggtactctagtgcagagatattattcgaaatgagacattttctttgaaaatgtccattgtattgtctcttttatattgggcccaatgtattatctgttttgactttcattttcatcttcatttttttttgttttttaaagaaacagggtcttactcttgtcaccaaggctggagttcagtggcacagtcgtagctagctgcagcctcgaacccttggactcaagtgatcctcctgccttagccttccgagtagctgggattacagacttgagctaccacacccagcgaagagcagttttaaattttgaggtgtccaatttgtcagtttttaaattttcttgttcatactttgtgttcctatcaaagaaacctttgcctaacccaaggttacaaagattttctcctatcatttcatctagaaattttatacttttaggctttccatttaagtttacgacccatgttgagttaatttttatatcaataaaccctccaacttgatttaaactttctcttttttttttaatttttagaaatggggtcttgctctgacacccaggctagagtgcaagggcaccatcatagcccactgcagccccaaactcctgggcttaggcagtcctcccacctcaggctcacaaggaactgtgactacaggcatgcaccaccacacctggctaatttttttttctttttttttttttgtagagacagggtctcactatgttacccagattggtctcaaactcctggcctcaagcagtcctcccacctcagccgcctaaggtgtgggaattacaggcataagccactgcacctggccctgcatgtctgaattattaagttgttctgtcacccggctactctcttcataggtaattaatatatgtggatcttgggctgtgcaagggtacagtccttcctgtcagggggaacatcttggaagcagtctgcttggtgcctcactgaacgtctgactgaagtttctactctttaaatgtgtctccatcatgactttaattgacatagaagccctataaattcttcagaagttctggtacactattagatgtgtatgtttcttatttttcattggaaaatgaagttttaaaggtcatcttaggtgtgtttgggcctttttttcccaacttggcatgggtgaaaaatgcagaaagttccccatcgtatgagagcagatgttgggattggaggtagaggcacatgacttaagtttgtctaggacttatggcacagtcttactctggtgtgatagcccatcactgtctaagctgttaagtcagggctgctctcaaacagaataaagtaacagtttagtcttgtgaatatattttattttatttttgagacagagtcccacactatccaggctggagtgcagtggtacgatcttggctcactgcaccttccacctcctgggttcaagcarttctcctgcctcagcctcctgagtagctgggattacaggcatgcgctaccacgctcagctaatttttgtatttttagtagagatggggtttcaccatgttgtccaggctggtctccaactcctagcctcaggtcatctgcccacctcggcctccaaaagtgctgggattacaggagtgagccaccacgcctggccttgttattatattttaaaggtttgattttttccccccctcttctaatttggaaatatttctggaaaatgattaaaaccaggttacaaacttcaaacagagaacagcccatgcttcatcatcaggtgttgccagactttccatctccatggacgtcctcctggcttttgttgagatgtctctaagtcctttgttcagtctttacacattcttggctttgaaaatagtttgacagtgtgcttccgggattgtttttctgcagttacttaaatatttaattgggtttcagtttcaggaaccttgactactaacaaactaggcagttttttaaagcgctaccattccttatcctcagatgacacaaaactttcttgacctaattaaaggggttgcatgagagcggagtttttttccttctcaaatcaatatatttatttaaagacattgtaaattgtatgcatatatttacacgtacatgttatcagagctcttatactgctttttatttataggtgtcaattggaaaataagattattctaaaatttccctttctctagactttgtgcttactgaaaaataccattttgggccaggtgtgctggctcacacttgtaatcctagcactttgggaggccgaggtgggaggattgcttgagctcaggaatttgaaaccagcctgggtaacatatttaaaaaaaaataaaaagaaaatgccatatttattgctgtggaacaaaaacttcaaagaaaaagcatggattttattaaaatatggtggaaataggctttccttgttagctctgtaaatgaggtaatagaatatctggtcagggcagttcagctttaccttaaaactaagacccatctcaccctgtggggcagggaggtggaagctacttaaatatgtcttgctggactccagctccctggtgcaagaggccagctgagtgttggaaaaggctggtatgtgtgtcttggtctggtaggaagtagaaggaaaggactagtaaagcctaaggggtagttaaggactaaagacctaagggacttcaggctctaattggccagaaaaaagaaatacctgagaagggtgtcttagtggctgttctgcacacattgagactgctaccgtattcctattctttcctgaatgagaagaacatgaattaaatgattctgaacttacatacttctttttttggtgggccagggacagagtcctgttctgtcgcccagtctggagtgcaggggcgcgatctcagctcaccacaacctctgcctcccgggttcaagcaattctccctgcctcagcctcctaagtagctgggattacaggtgtctgccaccatgcccggctaatttttgtatatttttagtagagatggggttttgccatattgtccaggctggtctcaaactcctgacctcaagtgatctgctctcctcggcttcccaaagtcctgggattacaggcatgagccaccgcgcccggccccaaacttccatacttctagtcggtgatctgctttccagacacaataaaaacacacaaacactcaaaataagtgaaactctttcataagcacacttgagcaacaaacatgatacataatggaaggcttatttagacaagatgtctcaaggaaaacagtgggtagtgaaataattttgttttaaaccactataagactgcaaagtaatttgaattatgaggaccctttgtgctggccactggaactggggatagagtggtcaacaacaaagtccctgcctctgcggagctttcactgaagtgggaaagacaagactacaaacatacacatcacgtcactcagcgttaagtgtatgaagaaaaatagaatggggtgaaggtatagagtaggttggagggtgaccagcaaagttgtctctgcagaagtggcagggcctgaatgaagtggtgggccatgggaaatacagggcgggatttctgtgcagtaggttcagcaagaagcccaaagcttctgagtgggcgcgtgcttagtgtgttcgagaactagactggcagggaggccagagtggctggaaggggacaagtggaggagaagaggagggtggagccaaccctgtagggacctgtatgccagcgttaggactttgtattaaaaatcgcttttttgtttctgcttggtaaccccctctgcccctgaaccactaccttctttaaacagagaaaacctttaaaaatctacatttgggcatctacagactacagttgttccacatgccaatgctgaatagtaagaattcattttgtggagaacaggctatacctgaggaggtactttgctatgtactaagaacaccaaatcagtgaatttgtagattccccaaaaacttttggtctccacattcacagtcaactcatctttattcaaatcagggacaaaccaaaagatgaaatcaagagtagagcccttcgtgtctgaaggcaaacatcttccatcctttgaccaaccctagtgtgactcactgcctggcatcaccgctcttgtgctgccagaactcataagctgaaatggcttcagacctttctgatcccctgagaggaatgacattacttttttagccactattgtattccccagtgcctagaacagtatctggcacgtaactggcctgcacttgatgttcattgaacctcattgaatcgagcaaagcactaagctcatgcacgagtctttaagcttcctagaccttcactcagcatctatcctatttatacagctcatctggtttctaaaaccatagcaaagaagagaaattgtaactggccaggtacgttgacaatagtgtggatttagatcgggcagcttggcagggcttcctccaaaacgggaaaagccataagaatttgaaagcaaaagatggcctgaagatattgctggccatagatgttcatagttgtgttagtctgttttgactgctataataaaagaacatagactggcttatcaacaacacaggtttacttctcacagttctggagactgggaagtccaagatgaaggcatcagcagatttggtgtctagcaagggtccttttcctcttagacagtcttcttactgtaaccttacatggcagaaggggtgaaggatctctctggggcctctcttttttgttgtttgtttttgtttttgttttgagacagtctcgctctgtcacccaggctggagtgcagtggcgcaatctcggctcactgcaacctccgcctcccaggttcacaccattctcctgtctggggcctcttttatgggcacttatcccattcgtaatccatcctcaggacctaatcacttccaaagacaccaccttcaaataaacttaactactagcaatttgctttaattcataaacatggcacaagtcacttgaatcaaagaattaaaacttaattaggactagaacacacattctcaacataggtgatgtcactcccaagggggttaaatttcctaggagggtaaagatatcttactgtttttatctataaagagcccagatatgcatgtggtatgtaacagtatatctgtggtattaggattgtatgtgtgggccgggcacagtggctcatgcctataatcccagtactttgggaagccaggataagcagattgcttgagttcaggagttcacaaccagcctgggaagcatggtgaaaccccatctctacaaaaaaaaaaaaaaaaaaatttaaagccggttgtggtggcatgcatctgtagtcccagctactcagtaggctgaggtgggaggtttacttgagcctgggaagttgaggctgtagtgagctgtgatcatgccactgcactccagcctggacagcagagcaaaatcctgtctcaaaaaaataaaaaagactgtattgggatagtaataatgaaaaaaagtattgagaaacactgggctagaatgataaggcagagacctatttcctgccctcatggagcctacattctaacaaatggaactgttttttaaatttttaaatcagaacatacatatttttggggta

SEQ ID NO: 5663 - DNA, 15804 bp, Homo sapiens
ccaaactgctgggattacaacaagcatgagccactgtgcctggccttgatttttttttttttttatgataatctgtagttagatgaagtttttaaattttttgtagagatggggtctcactatgtcacctaggcttgtctccaactgctgacctcaagctgtcctcttgccccagccctccaaagcattgggattactggcatgagccattgcatctggctttttttttttttttgagatggggtctcaccatgttgcccgggctggcttcgaatgcctaggctcaagcaatcctcccttctcagcctcccaaatagctgggattacaggcacgtgccaccacgccaggcttgttttctttccctgtccctccctctctatttcccactctcttcctccccaattcttctggccctataaaatcacatttgtggcctgtaccctgctaggctcgaaagacaccaaagtgaatccatctccatcctgaggcttgaaaaggcagcccaaaggtggcagttctcttgttcagcaagcactccctacggtggagggacacaggaacgcagacttggacctcagtgcagcaagtcccagccacagctgagcactcgattcctcacaaccccaagaggcagttaggttcacagagagatgatgccagcgtccatggtcaccagccagcctgtggcagggctgggattcgaacccaggctgtgcatatttacccactctacccaatggcctctcagcagcagagtggctcagagcctgggtttgggaggtgtggaggcttggattctgcccttgacacattttgtgagcatgagtgagtgacttaccctgtaagcttctataagtggtggtgaccccctctgtaagtgggggtggataaatgctgaccacatgggcttgtgtcgaccagatgaggtccttcaggtaatgcagtcatagcagggcctgggacgctgacctcagcggtagggaacccctgggcgatgggttaggagaagggagcccttgagggaggcctgagagcaagcccaagcctccagccggggtgagcctagagggcttcctggaggtggagtctagcctggcactcagggtgggtggaaactgatcgtcattttgcccacaggaatcctcgtagcycactacctccagagcatcacgccttgcctggccctgggtggagagctggtctaccaccggcggcctggagaggagggcactgtcatgtctctagctgggaaatacacatgtgagcctggcgcctgggtccgagggtggaggggctgggcccctggactcctcctgggtctgagggaggacgggctagggccctggacactcaggtctgagggaggaggcctgggttcccagatgcccaaatccccttggtaatgagaccccgcctccaccccactctctgacagtgaacaactggttggcaacggtaacgttgggccaggcgggcatgcacgcaacatactaccacaaagccagtgaccaggtgagtgggtgcagggactagctggtgctgccaggggctgctgggcctggaagtccaggtggggccacttgctaattctcatgtgttgctccggcccctccagctgcaggtgggtgtggagtttgaggccagcacaaggatgcaggacaccagcgtctccttcgggtaccagctggacctgcccaaggccaacctcctcttcaaaggtaaaggtctcggttcccctacgcgggaaacaggcaggaggtgactcaactctgagtggatgtgtgggccaccacaggtgctggaggacagtgtgctgccaccctgtgggcctccacattaccggggaacacttgttaaaaggtaggtggggccgggtgcggtggctcacgcctgtaatcccagcactttgggaggccaaggcgggccgaggtaaggagattgagaccatcctggctaacacggtgaaactccgtctctactaaaaatacaaaaacaaaattagccgggtgtggttgcgggtgcctatagtcccaactactgaggctgaggcgggaaaatggtatgaacccaggaggcggagcttgcggtgagccgagatcgtgccaccgcactccagcctgggtgacagagcaagactccatctcaaaaaaaaaaaagtaggtggacaaccctctactatgttttatgcttggaaaaaaaaagtaggtagagcagccaggcgtggtgactcacgcctgtaatcccagcattttgggaggccaagccaggtagaatacttgaggccaggagttggagaccagcctggccaacgtggtgaaatcccctctctactaaaagtacaaaaattagccaggtgtggtagcgtgctgcaactgtagtccccgctacttaggaggctgaggcacaagaatcacttgaacctgggaggcggaggttgcagggagttgagactgcaccactgcactccagcctgggtgacagagtgagactccatctccaaaaaaaataaaatgaaataaataaataaatgttaaaaaaaatctggtggagcatctgatgggtgtttgggccaagctggagctttgtccatcccctcttatttttctgcacttgactctcttatttttctgagactggtctccctctgtcgcccaggctagagtgcagcagtgcaactgcggctcactgcagcctccacctcccgggctcaagcagccttcccacctcagcctcctgagtagctaggaccacaggtgtatgccaccaggcccagctaatttttttgatagttttgggagacatgggggtttcaccatgttgcccaggctggtctcgaactcctggactcaagccttggcctcccaaagtgctgggattataggtgtgagccaccacacccagccagggtagaaggcactttggaagcctcgagcctgccccattcatcttacgttagtggaaactgaggcttccagaggtttcaaggtcacaactaaatccagaacctcatctcaggcacactggtcgtagtcccaatgtccagtcttaagtcttcttggatatctgtggctcacagattttgggtgtttgagcctcctgctgagcactgctggggccacagcggtgaccagccctgtcttcacgggactcagtgagaggaacagattcatccgcagagtgggcaggactaggttgggggaacccaggggtctagagggcttttcagagggcaggggtcactgagcggagagcagaggaggagtgagccatttgctccagcgtgaagttgttggtgtgatggggtttcagggtggcaggagcagtgtggttaaaggtctggaagctgtcggcatgtggctggtatccaaggtggccaggaactctgcatggatatggtgggaagctggcacgcctctcacctcagctcttccctgcaggctctgtggatagcaactggatcgtgggtgccacgctggagaagaagctcccacccctgcccctgacactggcccttggggccttcctgaatcaccgcaagaacaagtttcagtgtggctttggcctcaccatcggctgagccctcctggcccccgccttccacgcccttccgattccacctccacctccacctccccctgccacagaggggagacctgagcccccctcccttccctccccccttgggggtcgggggggacattggaaaggagggaccccgccaccccagcagctgaggaggggattctggaactgaatggcgcttcgggattctgagtagcaggggcagcatgcccagtgggcctggggtcccgggagggattccagaattgaggggcacgcaggattytgagcaccaggggcagaggcggccagacracctcagggaggagtgtcctggcgtccccatcctccaaagggcctgggcccgccccgagggggcagcgagaggagcttccccatccccggtcagtccaccctgccccgtccactttcccatctcctcggtataaatcatgtttataagttatggaagaaccgggacattttacagaaaaaaaacaaaaaacaacaaaaaatatacgtgggaaaaaaaacgatgggaggcctccgttttctcaagtgtgtctggcctgttttgagcatttcatccggagtctggccgccctgaccttcccccagccgcctgcagggggcgccagagggccggagcacggaaagcagcggatccttgatgctgccttaagtccggctcagaggggcgcagcgtggcctggggtcgctatcttcccatccggaacatctgccctgctgggggacactacgggccttcccttgcctgagggtagggtctcaaggtcacttgcccccagcttgacctggccggagtggctatagaggactttgtccctgcagactgcagcagcagagatgacactgtctctgagtgcagagatgggggcagggagctgggagagggttcaagctactggaacagcttcagaacaactagggtactaggaactgctgtgtcagggagaaggggctcaaggactcgcaggcctgggaggaggggcctaggccagccatkggagttgggtcacctgtgtctgaggacttggtgctgtctggattttgccaacctagggctggggtcagctgatgcccaccacgactcccgagcctccaggaactgaaaccctgtctgcccccagggtctggggaaggaggctgctgagtagaaccaaccccaggttaccaaccccacctcagccaccccttgccagccaaagcaaacaggcccggcccggcactgggggttccttctcgaaccaggagttcagcctcccctgacccgcagaatcttctgatcccacccgctccaggagccaggaatgagtcccagtctctcccagttctcactgtgtggttttgccattcgtcttgctgctgaaccacgggtttctcctctgaaacatctgggatttataacagggcttaggaaagtgacagcgtctgagcgttcactgtggcctgtccattgctagccctaacataggaccgctgtgtgccagggctgtcctccatgctcaatacacgttagcttgtcaccaaacatacccgtgccgctgctttcccagtctgatgagcaaaggaacttgatgctcagagaggacaagtcatttgcccaaggtcacacagctggcaactggcagagccaggattcacgccctggcaatttgactccagaatcctaaccttaacccagaagcacggcttcaagcccctggaaaccacaatacctgtggcagccagggggaggtgctggaatctcatttcacatgtggggagggggctcccctgtgctcaaggtcacaaccaaagaggaagctgtgattaaaacccaggtcccatttgcaaagcctcgacttttagcaggtgcatcatactgttcccacccctcccatcccacttctgtccagccgcctagccccactttcttttttttctttttttgagacagtctccctcttgctgaggctggagtgcagtggcgagatctcggctcactgtaacctccgcctcccgggttcaagcgattctcctgcctcagcctcccaagtagctaggattacaggcgcccgccaccacgcctggctaacttttgtatttttagtagagatggggtttcaccatgttggccaggctggtctcaaactcctgaccttaagtgattcgcccactgtggcctcccaaagtgctgggattacaggcgtgagctaccgcccccagcccctcccatcccacttctgtccagccccctagccctactttctttctgggatccaggagtccagatccccagccccctctccagattacattcatccaggcacaggaaaggacagggtcaggaaaggaggactctgggcggcagcctccacattccccttccacgcttggcccccagaatggaggagggtgtctgtattactgggcgaggtgtcctcccttcctggggactgtggggggtggtcaaaagacctctatgccccacctccttcctccctctgccctgctgtgcctggggcagggggagaacagcccacctcgtgactgggggctggcccagcccgccctatccctgggggagggggcgggacagggggagccctataattggacaagtctgggatccttgagtcctactcagccccagcggaggtgaaggacgtccttccccaggagccggtgagaagcgcagtygggggcacggggatgagctcaggggcctctagaaagagctgggaccctgggaasccctggcctccaggtagtctcaggagagctactcggggtcgggcttggggagaggaggagcgggggtgaggcaagcagcaggggactggacctgggaagggctgggcagcagagamgacccgacccgctagaaggtggggtggggagagcagctggactgggatgtaagccatagcaggactccacgagttgtcactatcatttatcgagcacctactgggtgtccccagtgtcctcagatctccataactggggagccaggggcagcgacacggtagctagccgtcgattggagaactttaaaatgaggactgaattagctcataaatggaacacggcgcttaactgtgaggttggarcttagaatgtgaagggagaatgaggaatgcgagactgggactgagatggaacyggcggtggggagggggtggggggatggaatttgaaccccgggagaggaagatggaattttctatggaggccgacctggggatggggagataagagaagaccaggagggagttaaatagggaatgggttgggggcggcttggtaaatgtgctgggattaggctgttgcagataatgcaacaaggcttggaaggctaacctggggtgaggccgggttggggccgggctgggggtgggaggagtcctcactggcggttgattgacagtttctccttccccagactggccaatcacaggcaggaagatgaaggttctgtgggctgcgttgctggtcacattcctggcaggtatgggggcggggcttgctcggttccccccgctcctccccctctcatcctcacctcaacctcctggccccattcagrcagaccctgggccccctcttctgaggcttctgtgctgcttcctggctctgaacagcgatttgacgctctctgggcctcggtttcccccatccttgagataggagttagaagttgttttgwtgktgttgtttgttgttgttgttttgtttttttgagatgaagtctcgctctgtcgcccaggctggagtgcagtggcgggatctcggctcactgcaagctccgcctcccaggtccacgccattctcctgcctcagcctcccaagtagctgggactacaggcacatgccaccacacccgactaacttttttgtattttcagtagagacggggtttcaccatgttggccaggctggtctggaactcctgacctcaggtgatctgcccgtttcgatctcccaaagtgctgggattacaggcgtgagccaccgcacctggctgggarttagaggtttctaatgcattgcaggcagatagtgaataccagacacggggcagctgtgatctttattctccatcacccccacacagccctgcctggggcacacaaggacactcaatacatgcttttccgctgggcgcggtggctcacccctgtaatcccagcactttgggaggccaaggtgggaggatcacttgagcccaggagttcaacaccagcctgggcaacatagtgagaccctgtctctactaaaaatacaaaaattagccaggcatggtgccacacacctgtgctctcagctactcaggaggctgaggcaggaggatcgcttgagcccagaaggtcaaggttgcagtgaaccatgttcaggccgctgcactccagcctgggtgacagagcaagaccctgtttataaatacataatgctttccaagtgattaaaccgactcccccctcaccctgcccaccakggctccaaagaagcatttgtggagcaccttctgtgtgcccctaggtactagatgcctggacggggtcagaaggaccctgacccaccttgaacttgttccacacaggatgccaggccaaggtggagcaagcggtggagacagagccggagcccragctgcgccagcagaccgagtgrcagagcggccagygctgggaacyggcactgggtcgcttttgggattacctgcgctgggtgcagacactgtctgagcaggtgcaggaggagctgctcagctcccaggtcacccaggaactgaggtgagtgtccccatcctggcccttgaccctcctggtgggcggctataccyccccaggtccaggtttcattctgcccctgtcgctaagtcttggggggcctgggtctctgctggttctagcttcctcttcccatttctgactcctggctttagctctctggaattctctctctcagctttgtctctctctcttcccttctgactcagtctctcacactcgtcctggctctgtctctgtccttccctagctcttttatatagagacagagagatggggtctcactgtgttgcccaggctggtcttgaacttctgggctcaagcgatcctcccgcctcggcctcccaaagtgctgggattagaggcatgagccaccttgcccggcctcctagctccttcttcgtctctgcctctgccctctgcatctgctctctgcatctgtctctgtctccttctctcggcctctgcccsgttccttctctccctcttgggtctctctggctcatccccatctcgcccgccccatcccagcccttctccccgcctcccactgtgcgacaccctcccgccctctcggccgcagggcgctgatggacgagaccatgaaggagttgaaggcctacaaatcggaactggaggaacaactgaccccggtggcggaggagacgcgggcacggctgtccaaggagctgcaggcggcgcaggcccggctgggcgcggacatggaggacgtgygcggccgcctggtgcagtaccgcggcgaggtgcaggccatgctcgrccagagcaccgaggagctgcgggtghrcctcgcctcccacctgykcaagctgystvagcggctcctccgcgatgccgatgacctgcagaagygcctggcagtgtaccaggccggggcccgcgagggcgccgagcgcggcctcagcgccatccgcgagygcctggggcccctggtggaasagggccgcgtgcgggccgccactgtgggctccctggccggccagccgctacaggagcgggcccaggcctrgggcgagcggctgcgcgcgcggatggaggagatgggcagccggacccgcgacygcctggacgaggtgaaggagcaggtggcggaggtgcgcgccaagctgraggagcaggcccagcagatacgcctgcaggccgaggccttccaggcccgcctcaagagctggttcgagcccctggtggaagacatgcagcgccagtgggccgggctggtggagaaggtgcaggctgccgtgggcaccagcgccgcccctgtgcccagcgacaatcactgaacgccgaagcctgcagccatgcgaccccacgccaccccgtgcctcctgcctccgcgcagcctgcagcgggagaccctgtccccgccccagccgtcctcctggggtggaccctagtttaataaagattcaccaagtttcacgcatctgctggcctccccctgtgatttcctctaagccccagcctcagtttctctttctgcccacatactggccacacaattctcagccccctcctctccatctgtgtctgtgtgtatctttctctctgcccttttttttttttttagacggagtctggctctgtcacccaggctagagtgcagtggcacgatcttggctcactgcaacctctgcctcttgggttcaagcgattctgctgcctcagtagctgggattacaggctcacaccaccacacccggctaatttttgtatttttagtagagacgagctttcaccatgttggccaggcaggtctcaaactcctgaccaagtgatccacccgccggcctcccaaagtgctgagattacaggcctgagccaccatgcccggcctctgcccctctttcttttttagggggcagggaaaggtctcaccctgtcacccgccatcacagctcactgcagcctccacctcctggactcaagtgataagtgatcctcccgcctcagcctttccagtagctgagactacaggcgcataccactaggattaatttggggggggkgtggtgtgtgtggagatggggtctggctttgttggccaggctgatgtggaattcctgggctcaagcgatactcccaccttggcctcctgagtagctgagactactggctagcaccaccacacccagcttttyattattatttgtagagacaaggtctcaatatgttgcccaggctagtctcaaacccctgggctcaagagatcctccgccatcggcctcccaaagtgctgggattccaggcatggggctccgagcccggcctgcccaacttaataatacttgttcctcagagttgcaactccaaatgacctgagattggtgcctttattctaagctattttcattttttttctgctgtcattattctcccccttctctcctccagtcttatctgatatctgcctccttcccacccaccctgcaccccatcccacccctctgtctctccctgttctcctcaggagactctggcttcctgttttcctccacttctatcttttatctctccctcctacggtttcttttctttctccccggcctgcttgtttctcccccaacccccttcatctggatttcttcttctgccattcagtttggtttgagctctctgcttctccggttccctctgagctagctgtcccttcacccactgtgaactgggtttccctgcccaaccctcattctctttctttctttctttttttttttttttttttttttttttgagacagagtcttgctctgttgcccagcctggagtgcagtggtgcaatcttggttcactgcaacctccacttcccagattcaagcaattctcctgcctcagcctccagagtagctgggattacaggcgtgtcccaccacacccgactaatttttgtatttttggtagagacaaggcttcggcattgttggccaggcaggtctcgaactcctgacctcaagtaatctgcctgcctcaccctcccaaagtgctgggattacaggcatgagccacctcacccggaccatccctcattctccatcctttcctccagttgtgatgtctacccctcatgtttcccaacaagcctactgggtgctgaatccaggctgggaagagaagggagcggctcttctgtcggagtctgcaccaggcccatgctgagacgagagctggcgctcagagaggggaagcttggatggaagcccaggagccgccggcactctcttcycctcccaccccctcagttctcagagacggggaggagggttcccaccaacgggggacaggctgagacttgagcttgtatctcctgggccagctgcaacatctgcttgtccctctgcccatcttggctcctgcacaccctgaacttggtgctttccctggcactgctctgatcacccacgtggaggcagcacccctcccctggagatgactcaccagggctgagtgaggaggggaagggtcagtgtgctcacaggcagggggcctggtctgctgggcctgctgctgattcaccgtatgtccaggagctggagcagcaccctctcagagcctcagtttccccagatgtcaatgagagaatcagcatcagccacatctcccacctgaagaatcgaaccttgagttctcacctttaagaatttttttttttttttgagacagtgccttgctcagtcgaccacgctggagtgcagtagcacgatcatcaatcactgcagcctccaactcaagcaaccctcctgcctcaacctcctgagtagctggggccacaggcacccaccaccatgcctggctaattctttcttttttgagatggagtctcactctgtcgcccaggctggagtgcagtggcaccatcttggctcaccgcaacctctgccccccgggttcaagcaattctcctgcctcagcctcctgagtagctagaattacaggcgcacaccaccacaccaggctaatttttgtatttttagtagaaacgaggtttcaccacggtggtcaggttggtctcaaactcctgacatcaggtgatccacccgcctcggcctcccaaagcactgggattacaggagtgagccaccatgcctggccatattttaaacttttttgtagagatggggtcttactatgttgcccaggctgatctcaaactcttgggctcaagcagatcctcctgccaaagcttcccaaagtagttggattacaggtgtgagccaccacgccccaccaacctatgaagatgtctaagcagacagggtgccctatctcaccacatccccagtcagatccagaggtgggacaaggatgggaaggaggttccagaacaaaggctggcagggagtcgtatgggacaggagctgacccagcaaccatccacagagacatcctggagcctgggaaggagaaggacaaagagcccccttttttaaattttttttatgtttttgagacggagtctcactctgtcacccaagctggagtgcagtggcacaatcttggctcactgcaacctccacctcatgggttcaaacgactctcctgcctcagcctcctgagtagctgggaccacaggtgcacaccaccatgcctggataatttttgaatttttggtagagacggagtttcaccatgttggccaggcaggtctcgaactcctgacctcaagtgctccgcccaccttggcctcccaaagttctgggaatacaggcgtgagccactgcaaccagccagtagcccccatctttgcccctcgctgagccctactggatgttcttggttatgcgacagtttccccatctattaaagagaaacccctatagcagaggggaggatgaggttggaaaagcaggagcattgttatgctattcttgtggggtctgggaagcagacatctgggtggatgtttggggggtgctgggcttagttggggaagtaggggggcccctggggcttacagggactggaagctctgagctggccagagggatgttgcaatcctgccagggtcttgtctatgctgtccttttcacaaccatccccctactgccaggctgacacgtggttgcgggggcacaaggccagccaacctagagtctgaggctaggcggaggacaccctccccaccagctgccagggtcactggcggtcaaaggcagctggtggggaaggcattggactccagccttgggggacggatgtagtgatggtgggaagcaggcttggtgccaggaggggcgtcagagggtgaataaaagcagatagagtgtttgggggaggtagccagccaaagggggtgaggcccggtggaagggaagaagggacatacacgcagagctttgcagctgagggttttaattttttgagatggggtctctgtcccaccaggctggagtgcagtggcacaatcacagctcactgcagcctcgaactcctgggctcaagcaatcttcctacctcagcctcttgagtagctgggactacaggcatgcgccaccacgctcggctaatttttgaacttttttgtagagatgaggtctccctatattgcccaggctggtctcgaactcccaggctcaagtgatcctccctcttcagcttcccaaagtgctgggattacaggcatgagccaccatgcctggctaatgcaggtgaggtttttgcagtgtcatccagctaaggcgacccgttcccctcccaaaaaagggagactgagaaccatgaagttaagagcccagagaatatcacggtggtctggggtgcttcaagggctggtctggaataaattggaggtggcacgcagggtaggagcgccgggccaactgggagacccagcaacataaaggaaaagttgttggggctgaggaggcttgctgagagaggggaagtgagggaaagaggtgatctagggacacggtgtgaatgagggggggatgagatcacagggttattactgggagacccctgagggaagatggccacagggacaggacaaggctgtcttcttaagggaggagaccacccctcatattgtcttatgcccaatttctgcctccaaagaaagaaaaagtaaaaactaaaaggcagaaatgaaatccacaagcagacagcccgcgccacaccctgggcctggtggttaaagattgacccctgacctaatccgttaggttatctatagattacagacattgtatagaaaagcactgtgaaaatccctattctgttttgttccgatctaattaccggtgcatgcagcccccagtcacgcatcccctgcttgttcaatcgatcacgaccctctcacgtgcacccacttagagttgtgagcccttaaaaggaacagggattgctcactcggggagctcggctcttgagacaggaatcttgcccattccccgaacgaataaaccccttccttaactcagcgtctgaggaattttgtctgcggctcctcctgctacattctgagtggggaaagggactaaggtggtctgaggaccccacagagtcaggaagattgagaggtgagagtgctgaacggggaggggctttggggctaagggaagtgcccgggaccccacctgaccccaacgctcacgggacaggggcagaggagaaaaacgtgggtggacagagggaggcaggcggtcaggggaaggctcaggaggagggagatcaacatcaacctgccccgccccctccccagcctgataaaggtcctgcgggcaggacaggacctcccaaccaagccctccagcaaggattcaggttggtgctgagtgcctgggagggacacccgcctacactctgcaagaaactcaaaaagggagatgaggggatcgtgggagggaggtagggagggaggagggtgccactgatcccctgaacccctgcctctgcctccagrgtgcccctccggcctcgccatgaggctcttcctgtcrctcccggtcctggtggtggttctgtcgatcgtcttggaaggtaaaagtgggatgggagaattgcggagttggagatttggaagagtgaaggtggctacaggcctggggtcccggcttagaggacctctgagagctccggggccccttctgggtcgtggttgcctcatcgtggtcgggtgggtctccaggttctcccaggctcagtcccgcaggcgccaaatctgcgcaggagagcactagcaaccgatgacgtattgaggcccacacctctgggattggctgtcctgcttcgacagccttgaaagtgggtaagctgggtggggggctctgggagaggtcagtgctgagtaaggcaattcccagcagcttgagccccaccaggtcactccagtattcctccccattctttttttttttttttttttttctcttgagacggagtctcgctctgtcgccgaggctggagtgcagtggcgcgatctcggctcact

SEQ ID NO: 5664 - DNA, 81210 bp, Homo sapiens
gtcctgtttctttttctttctctcattttaatccttcttgagctttttcaaatgtgtcatgtttaaaagtggactcatcctttcttttcttttttttttgttcttctttctttttttttgagatgaagtttcgctcttgttgcccaggctggagtgcaatggcgcgatcttggctcaccacaacctccctgtcctgggttcaagatattctcctgcctcagcctcccaagtagctgggattacaggctaccagctaattttgtatttttagtagagatggggtttctccatgttggtcaggctggtctccaactcctgacctcaagtgatccgcctgcctcagcctcccaaagcgctgggattacaggcatgagccaccatgcccggcccatcctttcctttctaacccagttcctggttgtccccctgctgagtagacagcaccagccatggcctcagccaggcaccccactctccctcacagttcacattttcagtgagtgctaggctttctacttccttctctctaattcactcttcattttctccaaactcctgctatcccccaggaacagggaagcatcctctcttgctagattatagcaggagcctccctatctcctgagatcatccaggctgatcttgctaaatgttcaactctgttcctgtcttgcccctctttaaaccatatacttccatagaattaagcccaggttcttttgtcaattgttttcctttttattaattaattaattttttttttgagattgaatcttgctctgttgcgcaggctggagtgcaatggcgtgatctcggctatccacaacctctgcctcctgggttcaagtgattctcctgcctcagcctcctgagtagctgggaccatgggcacacaccaccatgcctggctaatttttgtatttttagtaaagacggggtttcagtgttggccaggctggtcttgaactcctgacctcgtgatctccccacctcagcctcccaaagtgctgggattacaggtgtgagccactgcacccagccttattattttttagagatggtgtcttgctgtgtctcccaggctggagcgcagtggtgcgatcatagcttacctcagcctcgaactcttgggctcatgcattcctcctgcttcagcctcctgagtagctgggaatacaggtgtgcaccaccacatctggtcaatttttaaattttttgtagagatggagtctcactatgttgtccattctggttttgaacttctggcctggaaccttccatcgatcctcccatctctgcaagcctagacatttaacatggtctagaaggcctccatgagctccatctcacctcttttttgctccttccgctccggacctttacaagttgtggccattccaaactcctttcacttctgattatctcatgttctctctcacctccccgcccatgcaatgaggttcctccccaactagattcttattcctcttagattctcagagaagccttccctgaaagaagccgtctcccatctcccagattgggttaggctcctcctgtgtgctgacttcattgtctctctccaacattgcttagaacgctaagttgcaactttatgtctaattgattgctccactagtccataaaatctaggaggaaagggctgtatccttagcccttgacacatggccttgtacatcttaagtttgcatatgaaccgctttatttacctgggatattatcttacttaatccccaagacaaccctatacgttgtgcatgattattccaatggtcattactgttattttaaatagagatgggggctcactatgttgcccaggctggtcttaaactcctgggctcaggtgttcctcccaccttggcctcctaaagtgttaggattacaggcatcagccaccatgcctagtcgattatgccccttttaatggatgagcaaagagtcgaggttccactggttttccactgcagtgtctctgctgaaggattaaaaaaaaaaaaatcacagggctgtgctggactcctgggacttccagaggacaagtccctctcttcagtgaggctgacctacacagagccagccctccttcccctcccagccacagctgtgtgttggaaagctagaggcctgggcccctaataaagagcagacctcccaatctcctcgttccttccccctcccctcatatggtttttcaaattaaaagcaactaaaaccaaagacctaaggagcaggagagggcagaggcacaacaacatccctaaactgaggaagggggctctctagcgagggagggggtatccaaaagccagatccagagggttccagtcctaccagtctgtcccaggctctaaggagtgtatggcccaccgggctgggctggaccaggaaacaagctcttgtcctcaggtctgtaaacaggctgcgttgttaggaaccctctgcttctacttcctgaagagcaagccccccaaacccagaagagaggctgcaccttgagatccagccagcaaggtgggtgcggagtcctggggagggaactttcacctcaagctgcacagacccatctcgatctttttagagaattcctccttttccaggactagtgccgttctgaattctgagcgtgcaaagagactccttagagctagcttccgagcctcagctggggcagaccagaggccagggcgtctctctgtctgcggggaccccccacatctgtgcgtcacctccaccacctccgggcaaaggacccttcctcgctggacccagggaggcggctattccagatgcagccaagggttaaagggggtgggagaaggagcagttagcaccgttttcttttgcaaaccaccaaacgggcccttcattttcaaattgtgaagccagaaacatcccccgttcccttgccccgcccatcaccatttgaaaaaaagaattcacaagtttaaacgtgattttcacaactaacggctttgataactgttaaattcgtacggcttctagggcaaacggacctgaattcttcaaggaaagtagaattggcggtggagctggggggcagaggaggagaagacacaaaaagccaactcagtgggaagcgccctcaaagccaaaggtgtggcgctcggagctgtggccgccctcgcccgggagtcggggccaggagaacgggccctggaggcagggcagggcacggcgagattttgcttttgtttttagtgaccattttgatctggttgtaaaaagtttacgaggccttctttttgaaagtcagctaatcgactgcacctttttatacccttgccctcaatttcatgtcgcctgctggcctagacgcgcaaggcggaggacagaactgtcacagtccctacccttttctcccaacttctcggcccggctcaattcgggagttgggcctccttcctctcggctcgcagcctccccgactcccactttggggagaaaacccacattcttaaccccttgataatccctcaaggaaaaaacaaaacacccaaccccaagaggtgaaaattagaatccgggcgcgggttgagatcttgcgcaaaactggccaagcccagtgcatgtcgctcctctcctccgggtacataataggggggctggggcccttccccccccccccccacaaagggggcccagtggggaagcacaagaaagggggagaaaagacccgcacccccccctcaggagggcaaggtttctagccccctgcggctccgggaccacccaggacccggggcgtcgtgggaccgatctcgaaggatcttagaacgacactgggagagcgcggcaagaactagccccaccttcccccgacgccccggactgactgccgggcgcagacccgacttctcccgaaccagcctcggaccagccttagaaggcggaaaacaggattcaaacccgcctatgagcagtggtaggggcgggggctgtgggggcaggactcggcttaaggaaccaaccgcctcggttcgagggcctcctgtccggaggttgctcctgaccactgggtttattttgcttttgcagaggaggcagatgttgacctctcttctttgcacagtctctccgcaaaattttcccccaaccatttgctttcttgcgccaccccccaccggggcactatccctggagtcagctcctcaggcctttaaaccttccagaatgtcacacatggaaacctttagcaaatgtttgttaatgatcataacaaaggcatcattcaaattaggcaggtaattactaccagaaggacaactgggtgctcgcttgctcatccattgctttctgctttaaactcccgaggagtcgctgcctggagacactcccgcccggactgcttctcgggccccattaaacggctctgaaatgaactgtgaagttaccatttgtgggcggagagcgctggggccctgcggacggaagaccctggcttgaccggactaacagtgtcgccgaagcaaagcagcccctctgggtaggctgtctgtctcgcctcctaccctctggggcaactagcctaaaaacccggttctcaacttaacagcatgtggcccagcacccgcttttgccttttattccgcactctgatttttggggggatcgtttgttcccgctcattttctacaaacattacggtatcctgttagcattccgaacarggggctgttcatatatttgccttcaatgatttcctgaagggacatgtggaagtaatagcgagcggtgcagtcacccaagctgaagatgcacgagagcgggtcgcgtagaagaactgcggcaatgggacccccagcgcagccccaggcgccctgttttcgaggctgacatcccaagatcctgtcctggttaggcacagcaccgcgcccgttggagtacttctctgtgactctcccctgtccactgcactgtgtccaccctcctggtgaaggaggagacggctgttggacatgccagtcccaacctggccactttggccattttcagagtgcgtgtgttggggtggggttgagggagaaggatgaaggatgacccccaaccccaacaggagaattcaaaaatcagagagcgatgaaggtgaacgcgctcccctcccccgctgtcgctgggaagccccactctgcccaggtctggttcctggagcatcagcgccccctttccctcgccggcaggatcgtttcctcccgacactggcctctcgccttgggcgcaggrtttggggctcagctgtcaattccaaggaattcgtagggttcgacccacgcggcgggagggaacggagggagaatcaaaaggcatcctcccccacgacgcggaggcggtggtacgattcctcaaacgcccaagcttgagctttttttgtatgcgagatagaagccagggcaacctcgcccagataaccccgaaaacaaaggcacgaccagataagtgacttcaagggagtaaaggtcgttctatcggagaacgttccaaacctacacagaccctcttttctttgtaccgtatttcagaccacccagtcttgtacacacacacacaccacacaaaacaaaaacccatcattgtcatattggactcaacagtttgcccaatcctattaaataactagcaactatatagcccttcccctaaaagacccctagttcaaaacggcgcaaccgcttggagatttctcccgagggccctatttctcgttgggccgagtttgtagaagggacatttcttgattctagatttatattctctctgggtattaaatgcaattttgtatgttccttttcttcttttcaaagagaatacaaaactatagcagtctaagaaaataaccccaaaatggggaggcaaactcattctggaaatgatgggctgtttgtagtttcacaaaacctctttcccggcagagcaccaacacctcccccttccaccaccccccatcccatctggtctgcttctccccgccccccagttgttgtcgaagtctgggggttgggactggaccccctgattgcgtaagagcaaaaagcgaaggcgcaatctggacactgggagattcggagcgcagggagtttgagagaaacttttattttgaagagaccaaggttgagggggggcttatttcctgacagctatttacttagagcaaatgattagttttagaaggatggactataacattgaatcaattacaaaacgcggtttttgagcccattactgttggagctacagggagagaaacagaggaggagactgcaagagatcattggaggccgtgggcacgctctttactccatgtgtgggacattcattgcggaataacatcggaggagaaggtaagggaaaagaaaaaatgattttttgtttataagggaagtccctgatcagactctgggactggagaaagcgaagtaacttcaaactttgggcgacaagaaaaaaaaaaaggagctggattccagttgtgtgtccagagagtaatttttttttttcggaataaacttcacttggggacgggtgggagataaccatagagttagaaagtctaggtattttttttaaacacacattttccagacctatttttaaaaacaatgtttttctaacaaccctatggcctcccaaagaaattgtttaggcttacatttttgaggtttcttttgggagtgggggtggtgttcgtgaatactgggccgaacaccaaggaactgggggtggaggcagaggtgtttgccctcttcttggcagtgggtcctggaaggcgacaggttttaaatgagtgttttcattcctcgcctgcggtttggcgggacagcgctgcagcccatggtgtggagcgcggctgggggaccagggggaggtggggagaggggagcgtggaggggagcgtggaggggggcgcgcgaaggggttgcggggcgcaggaggcgggctgggctcggctggagaccggacctcggtgttggcctacagcacagggagccggccgaatgcgcgtgattactggacggcgctgctctgggagagagtcggggccagatttggcgcggcggtgaggcggctgcgggacaagcagaggcgcgcgggcgtgggcaagggtttggggcgctctggagcggtttgttgggtcagtgaggtgccagggagagcgggtgcctgccgggcagtgtgctcgggttgcacgccctakcgcgggggcgacagcggcggcgcgggcgggcggtctggaataatgacaaacacatttggccctgagtgaagaagtcgtcgtcgcctcgcattccagcaactgggatttgaggaatttcgaaccgcacaccaaggggccctcattgtgctccgtggcccccgcccccgcctgtcttcccgcgccccctcctcggtggaatcatttctgcattgcccgggggctctgctttcgctcagttctggccgcaggcaggaagagaggaaaggtctccaggaaggtgccgaacttcttgtgaggaagttagggacgacttggaactggggaaacttgtttgcaggtaagacagaaaggtgggaggtaaaccatattctccctccgggcacccgagccctggacaccccctacccggcacccttctccgcgcgggggtgcgtggcacttgccgtctgagctcgcccagcgctgctcggtcctctctagttggccttttttccattcctctccctgccggcttcagagccgtctgtgcgtacttctccttcctctgctgtctacccccatggaaaccagatttacacacgaaattaactccgcccggctgcgcccagggagcgggcggcgtccatttggcattgaatatgtgggatcagctgttctattccgggagggtgtcggccaggtcggagcgacgagtgtggcccaacccgagtacgttgccagagggagccaggagcctgggccgggccaggtgtgcgagagctgccgatggcctggcctcgcgtcttggtcgggaaggacttgctggcctggcaggctgtgcgttgtgcatccctcccgcagccagagcgccggtcccgcacttcgctccccgaattgtgctaagacctcaggatgtgcgcaaggagtgcctggaagaacttgccactcactccatcttcctgggtgggaggcaagcatggatggggcccmtatcaggtccctaccgccccgcgtccgaaaagccgcgggctgggcggtgtgggaaatggctttttggctccgaggccaaattgctcaatgttttggaccgactcgcctcgccgcggtcgctcctgacaagaactagacagatttttggagcagggagcatccagggcaaacgcacgacagtcctccgcagtgcatctcaccggacaaacatccccggagccacaggaggggaggaaggggctctccgggcgtgcgcacctccccagccgccgcgctgtcycatccccgacccctaatctggtcaacctggaccccggcactgctgaattgcatcccctcttctccctttctcctcggcctcctcctttccacaaccctcaagatgaggaggccctgcctcgactccccgacaggcgcaaggccgaccagsctcgctttgacgccctggtcaggccctgcttcggagcttgcagttttgggttgacccaagtgcagctggacctcgttcacaagagtgaggggaagccaagaatgaacccgtcgttagcccccggtgccctggctcttgtttaaatccttagatcgagaaggacttgaaggagatcccaggctcccagctctgcgcccctgggccagtttcctctcgggacgcggactgaggagggatgcagggggaggggcattgggccgggctttccagctgcaaacacgtctggcgccgaggcgggcccattttgtgcctcctggggacggaccgtgggcggcgcgcagcggcgggacgcgttttggggacgtggtggccagcgccttcctgcagaccccacagggaagtactccctttgacctccggggagctgcgaccaggttatacgttgctggtggaaaagtgacaattctaggaaaagagctaaaagccggatcggtgaccgaaaggtgtgggtctcagggttccccgggtctaactcgccgggtccaaccgcagcatcagccttggggcggcagataatctttcggtctcgcctggggcgcaagatgcaggatcgggggcaaatggcttctcccaacttccccctaattcgggttctgccagatggttgtcgtttgctgaagtggctcggcggcatttccttttgttttaaactgatcaatgagcgaacctgggatgggctgaaaaagtagattgtaggagggaataatgggaaacccgacttggggcgcctccttccctgcctcctactgcagtttctcggcccccgcgaaaggggagcgacaagcgcgggtgggcgcggactcttgagggggcagaggcggctatggcgcgtgtcgggcaaggtggcaccagaaggcacttttgtgtgtgtgtgtgacaagagtctcgctctgtcgcccaggctgaagtgcagtggtgcgatctcggctcactgcaacctctgcctcccaggttcaagcgattctcctgcctcagcctcccgagtaactgggattacaggtgcccgccaccacgccaggctaatttttgtatttttagtasagacggggtttcaccatrttggccatgctggtctcgaactcctgacctcaggtgatccgcccacctcggcctcccaaagtgctgggatttacaggcgtaagccamcgcgcccggccaggaacggttcttaaatgccgagagggcgcatgctagctctcctcagcattcccggtgagccgctacccacggccgtgcggctctcgtgcccataggaggcgctggcgagckcctgtaaccctaaacccctcggcccctttccccccacccgcccggattctcttcccgctctcccccctctctccacacccgcccggccccctctcgggtctcagttgaaaacaatgcaaacgcagagcgtcgtgcctggggcgcagcggcctctgcagctctgaggttcagagcgcggcgcgcaggggcgcaggggcgcaggtccccggagcggctgggcatcgccgccaaccccgggacaaccaagccgccgaggacttggtggaggtgggagggagagcggaccgcgcagtgttcctctgggtcccggggtcagaagccggacagtggcgggggctggacagtccgagcgcagagcctcccgggcgaagtctgcgcgcagcactcccggctgcgctgtcggggaccaggagcctgggctgcgggcgagctagctggcgagccgggtaagattcgcggggctgtcgcgccctctagtgggctccggggacgcatcccgctttccccagccccgggcggtcggcgccgctatctcagtggagcgcagcgctggaaccccgggggcccggagcggaggctaatctgggtcacctttcccctcctccgggcagccagtggactcctcgcaggctctgtgtgggcccgggaggcgccgggtggacgagagggggccgaggtctctgggtttggattgagaatgggacgtccttgtaattcaatgtgggagaagcaggggagtgtggaggaggacgggtcccgtgcgttcttggggggcaggcgccgtcttctgcgttccagcccctcgccagctcccttgccccgcgggcggcctgttgctgtttgtttgttttacgaccctgcgttattgtgcaacggtaacagtcgtttccaatcagctgcgcggccgtcgcggccctcgccaggctggtttatgggggcggcggtggcgcgcggacagataggacagcgcggcccgggaacggcgtcgaggtccaggcggtccccctgccccgagggggcggaaatgctgaggtggcgagagcgtgggttgcacagaaccctagtagcgagtccggctgagcctctgcggcctagcccagcagcgtcgtcttcccggctccgaagacgtcttcccgaagccccgctgccccggcgcaccagctcccggtgatggggatgatgatggggatgatggggagatgtccccgaattctcctggggtcccgaggagatttagccattttcaacagcagttttcctatttctgcttaaaccccgcgggctttcaactgaggtcaccacgaaagctaaaagtacaacctaaggaaggaagagactggaaattaacatttggggtagtggagctcagaattcctcgcagcggcgtctgtgtcgcaacccgtggacgcacgtccttggaccaacactgccatctgctggccactcgtaagaactactgcgacccgctgtgagaatgggcttcgcggagaccattaggaaggtgctttattttttattttttatttattttttgctcagtaggaccgtaataggtgactgattttcttttgctgtgaggctacaagaattgctggaagacaacatttttatttcgtggaaatttgtgttgtgtttctccttggttgttaatgctttgcatttacatrgtgaacatcttattatcagagctggcctgtgaggagggtagtgggggggcattgatgttcccgtttctgagtgaggagacctatgtcggggccttggtgacctcaagccgaatgctcaaactgctactgctactcctaaggttgtgccattaggagtcacacccgtttggtgatattcaaaaggatatgtcattttattctcccgtggttaaatatatggtgagaggagagcaggcatgtttatgagcccagattgtcccataaaaggctcctgtttaaaaacactccagccccctcccattactggaatgtctgatggagctccgggagatcaaaacaacaaaacaggctctggtagggtgcagaggtcctggtaaacacaccctctgctggaaaacagggagaagtttccaccagtgtagacctgcacttggtttgcctgggctgaagttaggagactgcgtagaaaaaggaaaatgtgtaattttcacagttagaattaacttaggagagctgaaattaactgagcctcggaaatctgaatcttgaagtcaccagtggcttttggggctgtgagagagtctcctgtggtctttaatcatgtgagggtggggtgaaattcaatattcagtggttctgcaatgggatgcactgtgcaattggtgattgagaagccaactctctggctttaggagaagaatgtcttgctgttagtccttctggaaatagagccttgcattgcctactgtctgtttacactacctttgcacattgcctttggttatagagtcatgtccaatggctctttacttctgtttgcagggcaggagatggcaccctgttaaagagaaaggatagtagctgcaaagtcatttgtttctctgtttctgtgactgtatatattggctcatctttgaatggtctttatagccacaccaggctggaggtaacagggtcatgggagtggactgctggtgtgggctgaatcagagttcagatccatgtctccaggaggtaggaggtgcagggcaagtcatgtggcttctggggcatccctcactttcttagttaaggagaagttgaaggagccgatctaaaatatcttgggagtctgcagaaaaagtcgtgaaaatcaaagcactttcaattaaactatataatttagtccttacaagaatgccacagggcaagcaaccagtcaggccttggtagtcgtgcttcctagaagaaaagactgaggttcagagagttggatagagtatcagatttgggatcagtggctagtccaatgtgatttccatcctttcttctgagagaaagcataagaaggccaagaggatggtggaaaagcacaagtcacctgcctgagagtcaacagggcggggggtctctttctcagtttgttcctctaagttatggcaaatgttttttgagctgtgattattgagaatgggggctgaagttcaacatgtagttggcatgagggaagtaattatgattgaagaaaagatttgggtgaaatctagtgttcttccctgcaaagggggttgttctcacggattcttatggtgccatgtttctcagaatttgtagyttcagttacttatatttgcacacctgactttagatgagctccagaatagcagttactaattaaggatgagcatttagagtagataaaagtggcaggaacagcaagactcactcccagagagcctcactacaggwctaataggtgaggaaattccccatgtttcccatttttcttcattacctccctgtggggcaagcactgccattattcatgagtaaactgtctgagttatagataagtaatgacatgaaacttcacaaacacgctgagcacagtggctcacgcctgtaatcccagcactttgggaagccgacgygggtgaatcacgaggtcaggagttcgagatcagcctgaccaacatggtgaaaccctgtctgtactaaaaatacaagaaattagctggccatgatggtgggcacctgtaataccagctactcgggaggctgagacaggagaatcgcttgaacttgggaggcagaggttgcaatgagctgagatcatgccactgcactccagcccaggcggcagtgcaagactccatctaaaaaaagaaaaagaaagaaagaaaaaagaaaaaaagaaagttcacaaacaggcctgatttctacccagggaaccactgttatcagagattggggtttggaatcttaagcaacaaacacatgtttattctcttccttcctgatggcttgctcagaggacctgtttccattgcccactttttttttgagacagaatcttgctctgtcacccaggctggagtgcagtggcgagatcctggctcactgcaacctctgcctactgggttgaagccattctcctgcctcagcctcccgagtagctgggattataggtacctgccgccatgcctggctaattttttgtatttttagtagagatggggtttcatcatgtcggccaggatggtcttgaactcctgacctcaagtgatctgcccacctcagccttccaaagtgttgggattacagatgtgagccaccacgcccggcctcattggccactttatatgtcagtaaataatctttcctggcagagggtccactgtatctggaggcactgaaggaaatctgggagtgtctggccagggcaaagcactgcttagagcttgcacaggaaaagcagtgagcccttcttttaagctggagaaagctttaaagatgcatctttggcaagtcttgccaaagaaatatgggttctaaatgtgataaaaccaaagacatcaagctggctctggaggccttgtttgaagtttgctgagtggattgtcagtgggaggctgatatttatatgtacaaacacacaagcattactgctaattgtggtaaatcaggctggccagcctggctctggggcccactgtgcctgccaccgcagcagtgtggaagccttgcatcccaggcacatgtcaggatcctcggaggccatcagccagccagcattgtgtgaattgcatttgggttcacagcactgtaattgtgtttctcctgctgtggtgagcaaaggaggaaaatggaaggaggaggtataatttgccctaggaaatagtcaggcaagtaggtggcacacaggggtgggatatggctaaaacactgaccttcccttgagagagaccatatggtgaagtggagagggcatggcgtttgtatcacacgaccttgtgttcaaatcctggctctgtcactggctgtgtgactttgggtcatttgcaaaacctctctgagcctcaactgccacttcttaaaatcagctctaagtaatcacagggttattcttcacaaacacagcatgcacatgcaaactttggcttagtaaataatggtttctccttctcttactttgttttctacataccccactccccttcctgtgaggagccttccacctttttctctgtgttctcttcctctcccattttcctggtagcattcaataaaacagaaatctgatttctgcaaagtaggccaccttacggtagaaatacatgattaggccccaccaaaaactttgattaggctattatcttctggatcctggatcccctccaaccaaaccaaacccaactagggctaaacacagcaatatatgaatacattgaatttctctctcactctttcttttttttaaaccagtttactcaggaatcacatgcacacatattttagcttccaaagccaatgatggaacaaattgtgtcccattaggctcactccattgtatgagttagcatcagaggagttcataccagagtgacttcatcttgaatagggcctaggtaagaagaggatgagacctgctgggctgcattcccaggaggttacacatttgtagtcacaggagagaaaggagttggtataggagttgatagatacaggtcataaagaccccagtgataaaacaggttgcaggccaggtttggtggctcattcctgtaatcatagtactttgggaggccaaggcaggaagattgcttgagcccaggatttcaagatgagcctggacaacatagtgagaccttgtctctacaaacaataattttaaaaacatgagctgggcatgatggtgcaggcctatagtcccagctactggtctgaggggcagttgggtggcaggctgagatgggaggatggaggctgcggtgagctgagatcaggccactgcactccagcctgggtgatggaataagaccctgtctcaaaaatagataaataaataaataaataagccagcaaaaccagaatgcagtgaagaagctggccaaaacccaccaaaacgaagatggtgatgaaagtgacctctggtcatccctactgcttattacacactaattataatgcattagcatgttaaaagacactcccaccagtgccatggcagtttacaaatgccatagcaatgaccagagatactctatatggtctaaaaaggggaggaaccctcagtcctgggaattacctgtccctttcagggaaaactcatgaatcttctaccgcttgttgagcgtataatcaagaaataactataggtatactcactcaagcagccatgcagttgctgtgcccatggagtagccactcttttattcttttactttcttaatatatttgctgtcattttactcttttggcttgctcttgaattccttcctgcatgaagccaagaacctttgtgacctcccaggctgaaccccaattttgagttccaccctatgacatcttttctggtgaccaatgaagggacaatggtaacctcccgttgactttaaattaaaactgattggcactgtttgggcttcaccggtgggtgagtctctccttgcccagattcaacttgctaacatttttttctcttcaattttggctcctttgtccttcctaatgttcttcattttggacagatgggaaagtggctgtgaggcctctggcttagcagcctgatagcagcctcctgttgtctgggtgccccagatgggagcacgcctggctggccacatcttttgcaacccaccttgtcatcccttctctgggaccttttctctttagtttcttttttaaaaaaaattttaaattatttatttatttatttatttttagagatagcatctcgctgtgttgcccaggctggagtgcagtggcataatcatggctcactgaagcctggacctcactggctcaagtgatccttccacctcagcctcctgagtagctgggactataggcatgcaccaccacgcctggctaaattttgtattttttttgtagagacggggttttgccatgctgcctagactggtcttgaactcctgggctcaaatgatctgcctgcctcagcttcccaaggtactgggattataggtgtgagccactgcacctggcctctctttagtttttaatgactggctgtttgacttctctgctcttcaggctgaaattcttatttcatgtttgtagtctttgccttggctatttggcaactgtttaaggcaagacacttggttttgagagttctcccgttgtgttgaccctgggacaccagggtcattgttctgtagctccaattatgttaggtctcatgcttttgggtttcactattggccaccccccagatgctctggggtttttggcatttggtgtggggacccttgttagctgatactctgggcttttcggcatttggatgctccagggtgtttggcactgacattcccctctagcattgtgggttagagtcccacccaggggaaatcttggttttgccttttcttgttttctactctaaagttatcattttctataaaaacattttcttttcttattgtcactttgtttaatgctttgctccaggaggtgggaatttgcaggggaaaataattgggctctccctatacttagaaaaacttctgtgtctagtagagatccttgttagacaaagggacagtggtgagtcccagagaactcgtcactagggtgccttttaggcaattggagcaaattcaaattagcaaactaagtttggccatttggataagtcccagttttgtcagggaaataatttgggtccagctatcttttataaaatagtgcgtttgcgttcctacattatggctagagctcaaagataaaagctattggatctttgtttatgtgtgtgtataaatgtctagatgtgtttatgtgtatgtacatttattatgttatatattgtatctacagggtaccaaattggcttataaataaaagagtgctcataaaaagagtaaataagtccaagcatttctcaagctcatgtaacttaagtttactaaaatttagagttactaaaaattcatatataactctgtataaatgtgccaaagaagatatgctcttagtgaaaataaattctttttggccaattcagatgtcatttatatgtggggtttaaaatatgaatttcgaaagaaaataaaaacaagtagaaagaaataaaaaacaataagcagtggagagagatgtgaggaaagttatgaatatgaagacgtatttttggtaaggaatgttataaagaaattttatgagaaaggatcttatatgataaattcttgtcctaaggtagaatgactgattgtttagaaaagaaggaaatataggacaagtcagaaagtccaagcatgttgtagatgacctatgtaagtcacgataaagtttatacaagagaatttattaaaatttagatgtaattagccataactgaaaggaaawttatttatttatttatttatttatttatttatttatttatgatttattttgagaaggagttttgctsttgttgcccaggctggagtgcaatgtcatgatcttggttcactgcagcctccgcatcctgggttcaggcatttctcctgtctcagcctcctgagtagctaggattacaggcatgcaccaccacacctggctaattttgtatttttagtagagatggggtttcatcatgtttgtcaggctggtctcaaactcctgacctcagttgatccacccaccttggcctcccaaggtgctgggattacaggcatgagccacctcatgcacccagccaggaaatttatatataatactctatctaaattttggtgccctatgttaaaacaagtttttcttcaagtattggtttgctttcagtaagattgcaagaaatattgacttttaattctagaatctgtttcctttgaaggcctctcagatttatatcttttccttttcccttgaaaaggtatagcctttgcaagttcaaaactgacttccctagactccttttaggaaaagcaatacagtggttgtttcaggctgtggctcaatagctaagcctttgttctttcatggtggtggcctgggttcagttcctggcttagagaatgagaggtttccagtttgctacttctgggacttttgtcatttatttattctttttgtctccatcgacagcttctgattttctcacttgaatttttttttctgtgagctaccttaagggtaatgttggatcttgtaaaaattgcttgccatctctttggagatacctcttgtgtccatggttaagttataaccttggttaaggcctgttggtttcactagggaaaatacctttaaaaaaaggcttaaaagccagagatgttggctatttgtcctggctagagtctggtattaagggatttaaaaggattttttaaaggacctctatagttataagtcagcttaattaaaaatggatattccatagtcatatttatatatatatacacacacatatatatgtatgtatgtgtgtatatatatatatttaaaagacctgtatgatttttttcttcttggaacttatttttttgagagaaagtgttttgtgtgtttgttgtttgtttttcttctcagtggactgaattatttctccattctgtctttttaccccctttaatgaccatattagaggacctaagataatttctgacagcctgggactccttgggaggaaacagaaggtgccacagacctcgttttgggagaaacctctgttttcctcatggaaccccaagagctgtaagcagagagttctccctcagaatccaaggctctgctctgtttacgtcacattacctgacctttgtgacttttgggggcatcagaaattactttgcattatgagggaacctttagcattggtgtgtattacctaggtaggatgtgtacttttagggattgcagttgcttacatgagtggttattactacagaccaatacttctttcttctcacatttaaatgaaaaaaaagcatgctcttgggcatccacctatgaatggaggatgggctgatttgctttaggttggccaccagcctttggggaacatcgttgcagtgaaatgcttggtgaaagcattgcactgtctgatcgcatagtgcacttctatgcacttctgcctgatgtcctaggctcaacacctgctacataattaagatcacttacttatcaggtttttaatcaaaatgaaatgttgctaagagttaacattatagcatatgtaattgagattactggagaaagttttacctacaagatatgtaaggaaagcaaaatgtgtttttggtaaaagattataggaaggtgtgccagtatagttttttattttgcttactttaatgggttaaaggattgttttaagtttgataggagaaagctgaagcatgagcaagttgtggaaggtatatgaaagattaacattttaaaagaaattctgtgtgtaaacattggctaaagttaaaggaggaggttggagccaagatggctgaataggaacagctccggtctacagctcccagcatcagcgatgcagaagatgggtgatttctgcatttccatctgaggtatcaggttcctatcactagggagtgccagacagtgggcgcaggacagtgggtgcagcgcaccgtgcgcgaaccgaagcagggcaagccattgcctcactcggaaagtgcaaggagtcagggagttccctttcctagtcaaagaaaggggtgacagacggcacctggaaaatcgggtcactcccaccccaatactgcgcttttccgacgggcttaaaaaaaggcacaccaggagattatatcccgcacatggctcagagggtcctacgcccacagagtctcgctgattgctagcacagcagcctgagatcaaactgcaaggcagcagcgaggctgggggaggggtgcccaccattgcccaggcttgcttaggtaaacaaagcggctgggaagctcgaacagggtggagcccaccacagctcaaggaggcctgcctgcctctgtaggctccatctctgggggtagggcacagacaaacaaaaagacagcagtaacctctgcagacttaaatgtccctgtctgacagctttgaagagagcagtgattctcccagcacacagctggagatctgagaacgggcagactgcctcctcaagtgggtccctgacccctgacccctgagcagcctaactgggaggcaccccctagtaggggcagactgacacctcacacagccgggtactcctctgagacaaaacttccagaggaatgatcagacagcagcatttgcggttcacgaaaatctgctgttctgccgccactgctgctggtacccaggcaaacagggtctggagtggacctttagcaaactccaacagacctgcagctgaggatcctgtctgttagaaggaaaactaacaaacagaaaggacatccacaccaaaaacccatctgtacatcaccatcatcaaagaccgaaagtagataaaaccacaaagatggggaaaaaacagagcagaaaaactggaaactctgaaaagcagagcgcctctcctcctccagaggaacgcagctcctcaccagcaatggaacaaagctggacggagaatgactttgacgagttgagagaagaaggcttcagacgatcaaactactccgagctacaggaggaaattcaaaccaaaggcaaagaagttgaaaactttgaaaaaactttagacgaatctataactagaataaccaatacagagaagtgcttaaaggagcagatggagctgaaagccaaggctcaagaactacatgaagaatgcagaagccttaggagctgatgcgatcaactggaagaaagggtatcagtgatggaagatgaaatgaatgaaatgaaatgagaagggaagtttaaagaaaaaagaataaaaagaaacgaacaaagcctccaagaaatatgggactatgtgaaaagaccaaatctacgtctgattggtgtacctgaaagtgacggggagaatggaaccaagttggaaaacactctgcaggatattatccaggagaacctccccaatctagcaaggcaggccaacattcagattcaggaaatacagagaacgccacaaagatactcctcgagaagagcaactccaagacacataattgtcagattcaccaaagttgaaggaaaaaatgttaagggcagccagagagtaaggtcaggttacccacaaagggaagcccatcagactaacagtggatctctcagcagaaactctacaagccagaagagagtgggggccaatattcaacattcttaaagaaaagaattttcaacccagaatttcatatccagccaaactaagcttcataagtgaaggagaaataaaatactttacagacaagcaaatgctgagagattctgtcaccaccaggcctgccctaaaagagctcctgaaggaagcactaaacatggaaaggaacaaccggtaccagccactgcaaaatcatgccaaattgtaaagaccattgaggctaggaagaaactgcatcaactaacgagcaaaataaccagctaacatcataatgacaggatcaaattcacacataacaatattaactttaaatgtaaatggactaaatgcttcaatcaaaagacacagactggcaaattggataaagagtcaagacccatcagtgtgctgtattcaggaaacccatctcacgtgcagagacacacataggctcaaaataaaaggatggaggaagatctaccaagcaaatggaaaacaaaaaaaggcaggggttgcaatcctagtctctgataaaacagactttaaaccaacaaagatcaaaagagacaaagaaggccattacataatggtaaagggatcaattcaacaggaagagctaactatcctaaatatatatgcacccaacaatacaggagcacccagattcataaagcaagtcctgagtgacctacaaagagacttagactcccacacaataataattggagactttaacaccccactgtcaatattagacagatcaacgagacaaaaagttaacaaagatagccaggaattgaactcagctctgcaccaagcggacctaatagacatctacagaactctccaccccaaatcaacagaatatacatgtttttcagcaccacaccacacctatcccaaaattgaccacatagttggaagtaaagcactcctcagcaaatgtaaaagaacagaaattataacaaactgtctctcagaccacagtgcaatcaaaccagaactcaggattaagaaactcactgaaaactgctcaactacatggaaactgaacaacctgctcctgaatgactactgggtacataacgaaatgaaggcagaaataaagatgttctttgaaccgacgagaacaaagacacaacataccagaatctctgggacacattcaaagcagtgtgtagagggaaatttatagcactaaatgcccacaagagaaagcaggaaagatccaaaattgtcaccctaacatcacaattaaaagaactagaaaagcaagagcaaacacattcaaaagctagcagaaggcaagaaataactaaaatcagagcagaactgaaggaaatagagacacaaaaaacccttcaaaaaattaatgaatccaggagctggttttttgaaaggatcaacaaaattgatagactgctagcaagactaataaagaagaaaagagagaagaatcaaatagacgcaaaaaaaaaaatgataaaggggatatcaccaccgatcccacagaaatgcaaactaccatcagagaataccacaaacacctctatgcaaataaactagaaaatctagaagaagtggataaattcctcgacacatacaccctcccaagactaaaccaggaagaagttgattctctgaatagaccaataacaggctctgaaattgtggcaataatcagtagcttaccaaccaaaaagagtccaggaccagatggattcacagccgaattctaccagaggtacaaggaggaactggtaccattccttctgaaactattccaatcaatagaaaaagagggaatcctccctaactcattttatgagggcagcatcatcctgataccaaagccaggcagagacacaaccaaaaaagagaattttagaccaatatccttggtgaacattgatgcaaaaatcctcaataaaatactggcaaacagaatccagcagcacatcaaaaagcttatccaccatgatcaagttggcttcatgcctgggatgcaaggctggttcaatatacccaaatcaataaatgtaatccagcatgtaaacagaaccaaagacaaaaaccacatgattatctcaatagatgcagaaaaggcctttgacaaaattcaacaacccttcatgctaaaaactctcaataaattaggtatgtaaatgggacgtatctcaaaataataagagctatctatgacaaacccacagccaatatcatactgaatgggcaaaaactggaagcattccctttgaaaactggcacaagacagggatgcgctctctcaccactcctattcaacatagtgttggacgttctggccagggcaattaggcaggagaaggaaataaagagtattcagttaggaaaagaggaagtcaaattgtccctgtttgcggatgacatgattgtatatctagaaaaccccattgtctcagcccaaaatctcctgaagctgataagcaacttcagcaaagtctcaggatacaaaatcaatgtacaaaaatcacaagcattcttatacaccaataacagacaaacagccaaatcgtgagtgaactcccattcacaattgcttcaaagagaataaaatacctaggaatccaacttacaagggacgtgaaggacctcttcaagaactacaaaccactgctcaatgaaataaaagaggatacaaacaaatggaagaccattccatgctcatgtgtaggaagaatcaatatcatgaaaatggccatactgcctaaagtaatttatagattcaatgccatccccatcaagctaccaatgactttcttcacagaattggaaaaaactactttaaagttcatgtggaaccaaaaaagagcccgcatcgccaagtcagtcctaagccaaaagaacaaagctggaggcatcacgctacctgacttcaaactatactacaaagctacagtaaccaaaacagcatggtactggtaccaaaacagagatatagatcaatggaacagaacagaaccctcagaaataacgccgcatatctacaactatctgatctttgacaaacctgagaaaaacaagcaatggggaaaggattctttatttaataaatggtgctgggaaaactggctagccatatgtagaaagctgaaactggatcccttccttacaccttatacaaaaattaattcaagatggattaaagacttaaacgttagacctaaaaccataaaaaccctagaagaaaacctaggcattaccattcaggacatagggcatgggcaaggacttcatgtctaaaacaccaaaagcaatggcaacaaaagccaaaattgacaaatgggatctaattaaactaaagagcttctgcacagtgaaagaaactaccatcagagtgaataggcaacctamaaaatgggagaaaatttttgcaacctactcatctgacaaagggctaatatccagactctacaatgaactttaacaaatttacaggaaaaaaacaaacaaccccatcaaaaagtgggcaaaggacatgaacagacacttctcaaaagaagacatttaagcagccaaaaaaacacatgaaaaaatgctcaccatcactggccatcagagaaatgcaaatcaaaaccacaatgagatagcatctcacaccagttagaatggcaatcattaaaaagtcaggaaacaacaggtgctggagaggatgtggagaaataggaacacttttacactgttggtgtaaaagtgttggtgggactgtaaactagttcaacccttgtgggactgtaaactatttggttggtgggactgtaaactagttcaacccttgtggaagtcagtgtggtgattcctcagggatctagaactagaaataccatttgacccagcaatcccattactgggtatatacccgaaggattataaatcatgctgctataaagacacatgcacacgtatgtttattgcggcactattcacaatagcaaagacttggaaccaacccaaatatccaacgatgatagactggattaagaaaatgtggcacatatacaccatggaatagtatgcagccataaaaaatgatgagttcaggtcctttgtagggacatggatgaaattggaaatcatcattctcagtaaactatcgcaagaagaaaaaaccaaatgccgcatattctcactcataggtgggaattgaacaatgagaacaacacggacacaggaaggggaacatcacactctggggactgttgtggggtgggggtagtggggagggatasctttaggagatatacctcrtgctaaatgacgagttaatgggtgcagcacaccagcatggcacatgtatacatatgtaactaacctgcacattgtgcgcatgtaccctaaaacttaaagtataataataataaaataaaaaaatttttaaaaaataaagttaaagggatattattattattatttttgtaagttaaacattaggattaaaaagcacaacagagttttctagagcactgatctactctgtaacagaaaattgtaaagggtttaaaaggtttatgagaatcttaccttatggtcaaactggttaagattgggaagatttgtctataaagttttattaagaattgggtttgacattaatactacactaatgcaaacgtgaaatgtggctttctctcttgaataagattttcatgtattattacaagataatgaaagatttttatttgctttttaaataaactataggaaaaataagggagagaaaagtgacagatcatttggaaacccaagtctcccctatatcaatgagtaaaagtttttacctttttgaaatctttgagttatcattttggctaaataaatgctttatggtgacctgggattctattttgtaatatcaactgtttaaaccttttgtatttgacaaacgttccaaactgaaattctaatgtaagtctttttctgacctgattagtccttctagatattaggtcccctaaagtccaaaagtgacatatttggcttattagatatattaaaatcatacaggaagcactttcaaatataaaatgctatttggctttctttggactatacttatataaatgtgttattggtatatgttccaaaattatgcaaaactcctataattctgatatgacttagtgtacattatcagtcataattatagttcttatgttacattattgtgtgctacagagttaaccaaatttctttgtcaattgcatctttaatcagctgtcctaagacttttgtcacccacagacaattgtcttgttttaatccttttcaaaaggtggtttataatcagctataggactctgatgggtactctaaaatgcaagcctctgataactttgaaaattgtgccattggctgggcatgatggctcacaactgtaatcccagcactttgggaggctgaggcaggcagatcacgtggggtcaggagttcaagactagcttggccagcatggtgaaatgccatctctactaaaaatacaaaaatcagtcaggcatggtggcatgcacctgtaatcccagttactcgggaggctgaggcaggagaatcacttgaacctgggaggcagaggttgcagtgagctgagatcgcaccattgcattccagcctgggcaacaagagggaaactccgtctcaaaaaaaaaaaaaaaaaaaaattgaaaaagaatattgtgccattgaaacagaaaagaaaacacaaataaacttccaggattctcatagaaacttaatatattcataaggaatgtggcccaatatcaggcaaaacaagagttaacagcatggactaaactaataaaagaccaaaacaatcttttartgactttttgcttaaaacattgcatatcctttctgttttgcttttcagagtcaagaaaacttttcctttggaaagtatttactgcttttaacaattgaaaaaagtatactactatggacaaaatttggagcatatgtctttctttttacctgatttctccagaatttgaaaactatttgggagtattcttaactaatagcaatatagttatttgyctaagtgcagtaagaatcttttcttttgtaataggacacaattaaagaaactgcttattttatgaaggctttgactagaatggtgtgctttcagatacaaacagactgctttaagggatcaaagttgacttatagagccaataaaagccactatggaaaactggccttattctttgtctatgcagtctctgtatggggttcctgacctgtggtaagtgaagaatgtcactttctgacaggcccaggagccccaagttatcttgggacatcaagaagaaaggaatgcacccaacttatacaggtatttgcaggcacagataaatctgtggctggctcaaggctttaagaagcctaatgtgagattctttttaaattaaatttccatcgaaaccaattttaacaagagcctatgtggcaaataattatttttgctgcactttatacaaataatcaggccaaatttcataagattaaaactttatggcaaacaaatttgtcccactatgatttgtctttggtaaaaatggaagctagagagagaatttgtttcaaaaactatgatayaccagttattagattctagtctcgtctgttgtttttgagtttcttctgcaatttaggcagaccctgcttattcctgagaatcaaccagtgatctatggctgttgctcagaagaaataagagggatggctaacgtaaagatctggattagtattctaattctaggcatgtattagaattggctagtgaccccatatcagcttggttttaacaattacccagttcatggaaagccttcttatttagtttacttgggataattgtgctgattttgttttactgttgtggaatatattgctgttgtcctctttgtgtaggaatgcaggaaaagcttacttaacattttcttaaattgaacacttattaatcttccagatttcaccttttgtcagaactcagagttatgatttgtcctcactgtactgacaacaggctctggtagggtgcagaggtcctggtaaacacaccctctgctggaaaacagggagaagtttccatcagtgtaagcctgcacttgggttgtctgggctgaagttaggagactgagtagaacatttgctgcagaaaaaaaagaagatgtgtaattttcacagttagaattaacttaggagagctgaaattaactgagcctcggaaatctgaatcttgaagtcaccagtggcttttgggactgtgagagagtctcttgtggtctttaatcatgtgagggtggggtgaaattcaatattcagtggttctgcaatgggatgcactgtgcaattggtgattgagaagccaactctctggctttaggagaagaatgtcttgctgttagtccttctggaaatagagccttgcattgcctactgtctgtttacactacctttgcacattgcctttggttatagagtcatgtccaatggctctttacttctgtttgcagggcaggagatggcaccctgttaaagagaaaggatagtagctgcaaagtcatttgtttctctgtttctgtgactgtatatattggctcatctttgaatggtctttatagccacaccaggctggaggtaacagggtcatgggagtggactgctggtgtgggctaaatcagagttcagatccatgtctccaagaggtaggaagtgcagggcaagttatgtggcttctggggcatccctcactttcttagttaaagagaagttgaagtaatcattctgaaatattatgggagtctgcagaaaaagtaatgaaaaccaaagcactttccattaatctccataatttagtccttacgataatgtcacagggcaagcaaccaatcagaccttactagtcgtgcttcctagaagagactgaggttcagagatttggacagagtgtcagatatgggatcagtggctagtccaatgtgatttccatcctttcttctgagagaaagcataagaaggctaagaggatgggggtaaagcacaagtcacctgcctgagagtcaacagagcaggggtctctttctcagtttgtttctctaagttatggcaaaagctttttgagctgtgattattgagaatgggggctgaagttcaacacatagttggcatgagagaagtaattatgattgaagaaatctagatgaaatccattgttcttttctgtaaaggggttgttatccctgattctttttttcttttttcttttttagatggagccttgctctgttgcccaggctggagtgcagtggtgtgatcttggctcactgcaacctctgcctcctgggttcaagtgattctcatgcctcagcctttccagtagctggaactacaggagtgtgccaccatgcccggctaatgtttttatttttagtagaggtggagtttcaccatgttggccaggctggtcttgaactcctgacctcaagtgattcacccaccttggcctcccaaagtgctggaattacaggagtgagccattgtgcctggcctgttctcactgattcttatagtgccatgtttctcagaatttgtggcttcaattacttatatttgtgcacctgacttttaggtgagctccagaatagcattactaattaagaatgagcatttagagtagaaaaagtgacaggaacagcaagactcacttccagaaagcctcactacaggtctaataggtgaggaaagtccccatctttcccatttttcttcattacctccctgtggggcaagcactgccattatgcatgagtaaactgtctgagttatagataagtaatgacatgaaacttcacaaacaggcctagatttctacccagggaaccgctgttatcagagaagggagtttggaatcttaagcaacaaacacatgttgattctcagtatttgcctcctgatggcttgctcagagagcctgttttcattgcccactttatatgtcagtaaataatcttccctggcagtgggtccaccatgtctggatgcacacrgggaaatctggtggggtctggccagkgaaaaacactcctcaggttttgcaggaaaagcagtgaacccttcttttaagctcgagaatgctttaaagatgcatcattggcaagccttgccaaagaaatacgggatctaaatgtgataaaagccacgacgacatcaagctggctctggaggtctcctttgaagtttgctgagtggattgtcagtgggaggctgatatttacatgtagaagcacacaagtgttactgctaattgtggtaaatcaggctggccagcctggctctggatcccactgtgcctaacaccagccctgcatcccaggcacatgccgggctcctcagaagcgatcagccagccagcattgtgtgaattgcatttgggttcacagcactgtaattgtccttctcctgctatgaggagcagagagggaaaagggaagggagggttgtgtaatttgccctaggaaattgtgggggagggacaggcactgggccgggtggggggcggtgcgacatggctaaaacactgaccttcccttgagagagaccatatggtgaagtggagagggcacagcttttgcatcacacaggccttgtattagaattttggctctgacaccagctgtgtgaccttgggtcatttgcgaaacctctctgagcctcaactgccccttcttaaaatcagctctaagtaaccacagggttattcttcagaaacacagcatgcacatgcaaactttggcttagtaaataatgatttctttttgttctatctactccacctccctttcccattagaagcttgctacctttcactctgtgttttcttcctctcccattttcctggtggcattcaataaagcagaattctgatttctgcaatgtaggccaccttagagcaaaatacatgatcaggcaccaccaaattaggctattatctactggatcctgtttaaccaacccaaacccaactcaggctaaatacaggaatacaagaaaacgctgaatttctcccctttctttttttttttttttttgagacagagtcttgctctgtcacccaggctggagtgcagtggcgcgatcttggctcactgcaagctccacctcctgggttcacgccattctcctgcctcagcctcctgagtagcggggactacaggtgcctgccaccacgcccggctaattttttgtatttttagtagagacagggtttcaccgtgttagccaggatggtctccatctcctgatctcatgatctgcccgcctcagcctcccaaagtgctgggattacaggcgtgagccactgcgcccttccctccttttttttttaaaacaacaacaacaacaacaacaaacagtttattcagtaattatgtatacgtattttagcttccaaagtcagtgatggaacaaattgagtcctattaggcccactccattgcatgagttagcatcagaggaggtcaaactagagtgacttcatcttgaatatgggctaggtaagaagaggatgaggcctgctgggctgcattcccaggaggttaggcatttgtagtcacaggatgagataggagttgggtaggaatggtttcataaagaccacaggatgcaagctgggtgtggtgccttatgcctgtaatcccagtactttgggaggccaacgcaggaggattgcttaatcctaggagttcaagaccagcttgggcaacatagtgagacctcatctctacagataatttttattttattttattttatttttttgtgatggagtcttgctctgccgcccaggctggcgtgcagtggcatgaccttggctcactgcaacttctacctcaggggttcaagcgattctcctgtctcagcctcctgagtagctggaattagaggcgcacaccaccacgcctggctaatttttttgtgtttttagtagagatggggtttcaccatgttggccaggctggtctcgaactcctgacctcaggtgatccacctgccttggcctcccaaagtgctgcgattacaggcatgaaccaccgtgcccagcctctacaaataattttttttttttttgaaatggaatctcagtctgtcgcccacactggagtgcaatggtgcgatctcagctcactgcagcctctgcctccctggttcaagcgatttgccttacaaatgatttttaaaaaatgagctgggtgtggtggtttcacaagatacgggtgataaagaccccaggatgcgggccgggtgtggtggtttatgcctgtaatcccagcactttgggaggccaaggcaggaggattgcttaagcctaggagttcaagactagcctggacaacatagtgagacctcatctctacaaataattttttaaaaatgagctgagtgtggtggtgcaggcctgtagtcccagctcttgggctaggcatgggggtcagctcaggtgggaggattgcttgagcccaggagttcaaggatacagtgaactatgattgtgccagtacactccagcctgggcaacagtgcaagaccctgtttcataaacaaattaaaaaaccccaaaaacctaggatgcaatgaagaaggaagccgaaacccaccaaaaccaagacggtgatgaaagtgacctctggtcatcctcactacccattatatgctaattataatgcattagcatgctaaaagataccaccagcaccatgacagtttacaaatgttgtattaatgacaggaagttaccctatatggtggaaaaaggaaggaaccttcagttctgggaatttcctccctgtttctgggaaaatcatgaataatgcacccttagtttagcatataatcaagaaataaccataagtatactcagttaagcagcgtggctgttctgcctatggagtagccacccttttttattcctttattttcttaataaatttgcttgaattccttcctgggtaaagccaagaacccatgtggcctcccatggtgatctccaattttgggattcaccatgtgacattaggagcaacttagggatctggtgcatcccaggccaagactaacatggtgatttttggggggttatgttaaaactgggggctctgcccaggcccctcagtgtggcttcttgagtcaatacctgggtacttactggccctagcacctacaagttcattcacagttccttctcactgacttcaccagtgaccactatcagtgacttcaagggagaaatgaggggggagataaaataaagtgaatggggaagagataaagaagagaggtcttttcacagtttgccagaatagtcccttcagtggttttaccccagggcaacaggagcccccttttagtttctttctcttttaattttcttttcccttcccactttttgcccactttttgccttatttgtgtctgactcaatttccgtctctttctctacttcttcattcccagatttggctgtagaaaattagaaagttcttgaacttggtttgcacgggtgcttttactttaacatgaaaatgaatgatcagcctccttctaatttcatcctagagtctactgcatccctcctaccccctgcacaggaatttagtcacacttatctctcccactttctctcccttcttcactttctctattgctcctcctttcatgcttgtacctgcttttccatgccctgtttagcctggcttgggatccagcaggttctccaagggttyctgcaagaaccccggctgggtgcccaggtctgagcctggtatgtgcctcagtatcacaaaggcctcctgtaaatgacayacattgttggaagtttcagaaattctaggtcaaaatggcactgaaatattaaggtatttaccccaacccaagcaacttttctaaaagttgtagagagtgtgacctctttattaattgaaacgtgaaaatcrgctctagtttggaagctgagaaaaaatatatatatatgtatttatttctttgttgtttgaattcttaatataaatggtttaaaggaccattgaaaactgcatgcaatcacagaaggttttggcttcaggcagctcccgccatgatcttggggccccattgattctttcatctttcrggcgtcttactgtttgaaccttgaattttaacctgggacatgtttgactaaaatgatgckgttmatrttttctgttgtgcaaaacacaaagagaactaggctycagggttgtttctatttgctaatgctgtttctgttgacttttgacttttctagtttcccagagctatggggacttcccatccggcgttcctggtcttaggctgtcttctcacaggtacggagcccagtcctctctgagttccttgtttgggtgtcttgtttttttaagctttgtgctgcatgggtttwttaccagtactctgcatacacagtccaaragagtgaaaagaaatagaaaactataggacgttatccagaatgaccacaaaccttcagttccctttgctgtattgcacttactccatttcaaaaggaatgctctccagtggcagttttagtacatatataatgttggcattgaaatgttgttagtaataatgtctaaatttacttactactctcttccttttcctaggacaaggcttctattagagctggattagataaattcaggaatggtcagctgtgggaggtggcacatctgttgtcccagccccttgagcagctgaggtgggatgatcccttaaggccaggagttcaaggttgcagtgcactgtgattatgcctgtgactagccaccacactccagcaacatagcaagacctcatttaaaaaaaatgttcaaaggaaataaataatagaaaattcttgcccaagaaatcatacttgtcttaaatcataactctcttgaggaaagatgcttacattgcttctaaatctcagagtcacctttatcttctctaggaatcaaattgatagatgaatgtttggctcttggaaaatcttaaaaactttcccaccaaaaggatcattggggtaatttgttgaagtgtgtattggactgtcttagttttcctccagatatttatgcactgcagatgttcgccatgaaaccagtgctcttctattctgaggagttagctcagcccgttagtgtctttgtcttacccatttggatatggtagaattgagcaagaccagagattcaacagttctaagctccactaagtataccccatctacagagtaataggtgatccagatgtacttacaaatcctatcttaacaagctttaggaattatagtggtcatatattgaagttgggtgggagtctcacaccaggttccaagggagattacaaatcactaattaataattaagtcataatatctcttctatcagtctcgggtttcttgttttctaagttctgtgctccatgggtttattatctgtactctgcttacacagtccaaaagagtgaaaagaaatagaaaactacaggacgttatccagaatgaccacaaaccttcagttcctttgctgcattgcacttactctattgcaaaaggagtaagtgcaatttcagtctaaataagcgagactgaaatttgagcttcgaagatgaacttagagttttcactcttgggttttacttaccaattgtgaattaaaatccgtatcatctggcaccactgcactccagcctgggtgacagagcaagactccatctcataaaaataaagaaataaataaacaaataaatccacatcatcctgctttggccctggaagtcatgagggagagacggcatgcccgagggctataagaaatggaagatgtggaattcttgagcacagatgtgctttgtgttttcttcagtctgtgtccttgcctccattcttattccatgtgggktttttttttttttttttttttttttttgagacagggtctctcgctctattgcccaggttggagtgcagaggctgactgcaacctcaatcccctgggctccagtgatcctcccacctcagcctccagagtagctaggactacaggtgtacaccagcacacctggctaatttttttatttttttattttttgtggagaccaggtctcactacgttgcccaggctggtctcgaactcctgagctcaagcgatcctcccacttccacctcacaaagtgctgggattatagacatgagcctctgcgccccagcctcatctcattttaactaaaggaaacctttgcagtgattgtgaaccataaagaacccatatgtgcttgagcccgtgccatcttgggatattttatggttacacataagagtctgaaatatggaattggaatcagacatcctctgtctatttgagtgtttggaggggtgaatctagtggggcttggtggagctatttggaacatttgctgctctcagcagatgcagtggctgttataatgggggagctttcatgggcatccaggctaacggatttttgtgtagaaatggtcattgttcatctaagctgctactgttgcttctctcagttgtcgggatgagactgtcctttctgactgcatcctattcagagcgtgcttccttttgcagggctgagcctaatcctctgccagctttcattaccctctatccttccaaatgaaaatgaaaaggttgtgcagctgaattcatccttttctctgagatgctttggggagagtgaagtgagctggcagtaccccatgtctgaagaagagagctcygatgtggaaatcagaaatgaagaaaacaacagcgrcctttttgtgacggtcttggaagtgagcagtgcctcggcggcccacacagggttgtacacttgctattacaaccacactcagacagaagagaatgagcttgaaggcaggcacatttacatctatgtgccaggtgagttggctgggtctccaggaccaagcttcttctcttcctgtctctcctgttaaatgtactaaggttttaaacatatatataaataattaatatttattgcgggaagtttgaaaaatgtaagcgaacacacacaaaaatcatttgtaatattatcaagaaatattcattgttagcatttcagagctgtattaagtttggaaagtcatctttgttatgacatgtcctgtattgatactgtataaacaatctgaaatatactcatctctattcagttcattcaagttgcacacatactcacagtgtgtccagcactgggctaagtgttgagtacacaaaaattaataggtaagccctgtcttggagttgctgatagttcattataatatcttccaaataaacactcgatttttcagattcactatcaacatacatttattcttggagagttggaaggaattttctttttccttttaaaaaagttacatatatatatatatatatatatatatatatatwtttttttttttggtaacagggtctcactctgttgcccaggctggaatgcagtggcatgatcatcatagcttactgcaatctcaactcccttggttcaagcgattctcccacttcagcctccccagtagctgggattacaggcatgcaccaccacgcccagctaatttttatattagttgagacgggggtttcaccatattgaccaggctggtcttgaactcctgaccttaagtgatctgcctgcttcggcctcccaaaatgctgggattacaggcgtgagccactgtgccctaatttttatttttatttttgtagagatagggtttcactgtgttgcccaggctggtctcaaactcctgggctcaagtgatccacagccacctcagcctcccaaagttctgggattacaggcacgagccactgggcctggcctactcctgcattttaattaaaaggacaaaagggtcgagcacaagtgatggcaatttcagtatgcagttgggtaaattaaaaaggactatggctagaatccttggttttagaacaaaacctaaactgtttatgattcttgccatccttgctgttttggcataggtgtgtcttcctacctttctgccttttctttttcagtttttaatgggctcctcttcctaccctctataactacgagtgtccccagggatctagaccctctttactttttcatgatactcttattcatatgaaccttccttcttaacaattaaaaaaaaccaaaaactttgttttgaaaagggaaggtatttagaatgtcactccaacttcattcacacttagattccttcaggaaaatcctctaggtgtggagggattttcccctgctgtgaagagaatggtaggaacgtgaatgtgttaaaggcacacgagtccctgaagttttaatccgtgtaagattgtccaaaaattcttcttgttccagcacagatgccatccaagtagcccctgcatcgctgtctgactgagatctttttattcgcaatcatgcagacgtaggggccctttctgcagctgatgtttgagactgttagaacttcttaccaccgtagcttaagtagctgtttttcttttggaaaggaaattctcaggctccttctccttctttaaattttatgtatttctcaaaggattactttttaataaacagatttctatgctatttttgaatcatactgactataggtggtaagagtttttaaaagcatttcataataaaactcgaaatattttttcctgttttaaacagagttggactgtattattttattgttaatttttgtttttagttgtttaaattttgatttagattcctggttagtatttatttatttatttgtagagacagggtctctctatgttgcccaggctggtctcaaactcctgaacacaagcaaccctcccaccttggcttcccaaagtgctgggattacaggcatgagccacaactcctgtccagtattgatatttatcatcagtattatccatcaggagacaggcaatttggtattattcatacttaaaaatcactttgtagctgtcatgataactaatgccagtggggcaattcttctggatatatgtgtaaaggtgaacttcatacctaatatcaataatgccagtgggatagtttttctggatttatgtgtaaaggtgaaattaatgtctaatagagtcttcattcttttttaaaccacagacccagatgtagcctttgtacctctaggaatgacggattatttagtcatcgtggaggatgatgattctgccattataccttgtcgcacaactgatcccgagactcctgtaaccttacacaacagtgagggggtggtacctgcctcctacgacagcagacagggctttaatgggaccttcactgtagggccctatatctgtgaggccaccgtcaaaggaaagaagttccagaccatcccatttaaygtttatgctttaaaaggtacttgtatcatctccttccttctttaaataagagtaacaggcaaaatcataaggtgcrtgtaggatttttttttttttttaaatcatcatcactggtgatcctaaattctgatttggggatttaggaccccagctaatacaatgtctgtggctataataataagcttaaaattactaaaggccaaagcttgattacccatgcaagatttcatgtttcatcagttgacttcaaaatactgtaaggaattcttttcttacataagcctcttactttcattcacattcctgactatggcggccctaaaaacaaacatacacccagggggttagatgcctagattaattttagtaacttaagaaaagtgatttgaagaaagtagtttagacttcaaccctttgatgtccacagttagtacgcttggggaagtataatacatgctgaggtcaacagatatttcctgaacactatattacatggaggaatgggtagcagcaagagtacactgttttaaaatcagagcacagctaattttgtgccaggcactgtgctaggttctgggaaagtactgagaataactgaggagcagagtggaagagaagaagagaagaaacaattggatagaaacaaagtgtctagagcagtgtggatcagcaaatgttggttgattaaatgaataaatttattagtcaaggagattgtggacgagtataaccataactaacccactgctgaggaatgcggtgttctgtttgattggaatttatttttattgttattattttgtaattctgtattataactatatgcctaattgttgtacaccatctcacaatcaagccttgtgagattttccaaattttatcttgatcaaactggtttgcaaattatttttcagggttttyttaaaaaaaaaaaaaaaaacccaaactttataagatcctggctatcctgtggatttttaggcccttgtatttgttcttttttatagcaacatcagagctggatctagaaatggaagctcttaaaaccgtgtataagtcaggggaaacgattgtggtcacctgtgctgtttttaacaatgaggtggttgaccttcaatggacttaccctggagaagtggtaggtaccctcaaaacgtgcaatggcttggagcagagcaacagggctcaraaracctgcatttgagctcggtctgtcactgatgggcacatcactgagtttctctagaccttagcttcccacctctgggatgaacacatttgattaaatggcctttaggactccttgatcaatgggagagtttgaaatgatagttcctggaccaggcccttcagaatacataaagagtgtgccgtaagccttctttttcagaagtcagacagaaataggaaggttctctggctacaagatatcaaccaaaaaattagaagagcaaaaaaaccactggattttactattgcggagacagtgattgattctcatcgtcttggcttctgtgccctgaggtttgattcatctgatagtgttgattgcccgcaccccttcctcttctgccttgttggcacccaggacaatgtgtcttcctgttccacctcctatgtgcctgacctttgcatggctcaccttcagtgaaccgttatgatgtaatcattcagcaaaggtttaatgaagtttgctcaatcccaagcactgtaccagaagctggttcagtattgcaggaagaagggaggaggggagatggaagtggggaaggggagccaccatgctgcctcttggtcactggagatttacagagtctcagtcattctaatgcattgtcactaagtgtgtaagacagccatgtgtaagaggctatgaatgcccaaatgcaggaatgactaatattcttatggagaacaaaaacgagatatatatatttcttgcctccactcctgacttgtaaatttctgctccctgttcttttaggcatttgacagctttctgtccttctatccattgatctccctccttttatccgtttctctctcccatgcatttgccgctgcttttcatttgtcctggggcatctgataggaagttgggcattttcactattgcctcacaaacttcacacagtgaagggacatttacagtccaacaaatgtacatcttccctgaaatatgaagtgatttggttcttctgttcatacttgattgactttaatccttaacacataaacactgctttytatttataggagacagcaatttttttttccaaaccgaagtacatgctatttggcttacaaatatataatcaaagtattgtttcatacagtatgttttttccgattataaaagtaatgcaggtttattgcagaaactttgtaaaatatggagagacaaaggaaaggctacttcccagagcatcactgtttatattttagggagataaagcttttatttttcatttgtatttctttcttttttttttcttttttcttttttttttttgttgtggagatgaggatctcactacattgcccaggctggtctcaaactcctgggcttaagtgatcctcccaccttggcctttcaaagtgttgggattgattacacatgtgagcctctgagcttgactgagataaagctcttaagtatttcttatccatagataaacattgaataataggtgttattctttaaatggtaatttattacattctttatccttcagcagtatagcacaaacaccttatatgtgtcattaactgtccttttaaaaaatgggctgggtgtggwggctcatgcctgtaatcccagtactttgggaggctgaggcaggagagtcacttgaggccaggagtttgagatcagcctgggcaatgtatcaagactccgtctctacaaaaatttttaaaaattagccaggtgtggtggcatgagcctgtagccccagctactcaggagactgaggtgggaggatcacttgaacccaggaggttggggctgcagtgagccatgattgtgccactgcactccagcctgggcagcagagtgagattctgtctctaaaaaaattaaaaacaaaataaaaaatctcatgattttctaagcagctagcttttattctttaggttttatcttttagagcagttttaggtttacagcaaaattgagaggtacagagatttcccatgtgttccctacacccacacatgtgtagcctcccaccttgtcaacatccctaccatccatttgttataactgctgaacctccattgacacatccatatcatccagagtccatagtttatcttagagttcactcctaggagcgagctttttaaaagtcggttttcttccccttttgctgtagaaaggcaaaggcatcacaatgctggaagaaatcaaagtcccatccatcaaattggtgtacactttgacggtccccgaggccacggtgaaagacagtggagattacgaatgtgctgcccgccaggctaccagggaggtcaaagaaatgaagaaagtcactatttctgtccatggtacattccgctttctaaaatgtcagttgtccatgctgctcgggatccatatgtggtaatcattatttaatggaaactcttccctgtrcagagaaaggkttcattgaaatcaaacccaccttcagccagttggaagctgtcaacctgcatgaagtcaaacattttgttgtagaggtgcgggcctacccacctcccaggatatcctggctgaaaaacaatctgactctgattgaaaatctcactgagatcaccactgatgtggaaaagattcaggaaataaggtaaagaaactctctgcccaagtatgcytttttttagtgtgcatcagaggyrgactgaggtttgtgtgtgtcttacaacccagacccaaagtcagtctagaaaatgtaacaatctgagttaagagatgcttgaaatcacatccctttaatgataacattgcaaagtggtattagtatgctggtaagtatttaatgagaagatgagaagaaagaactaaaagctctggcccctggggaaagacaggtcactggattcagctagggtggaagaaaggaagtaaaattggactcaccaggattgaatagattgaatatattccctgatgttcatcatccatatcgcaagtagacagatatggtgattacacccatgaggcagttatcacatcaccttacgtgaaagttaacgtcataggcttaatctggaacccatttgccctaattgaggactccacaggaaagaagagtagagcctggctaatcaggagagagatgtgcagtgagttgcttggatccctaccttttaatcagaatggtagattgctctcatctcttaattggtggtggagttttgaatgagtcacccctcagccacagtttcctcatctacaatgtaggataaacaataccttatgtccttcaaggcaaggaattggatcagatgatatcatgaggcctcttaaggttttaagctgtgattagaacccaagagtcagaagrtacatctcacagcacccagctaaccagccctatacttttgtcagaaatcatctcagaaagacaaagtcagtcctgtatttcaagccttcaggaggaagaacagagcctttctcatcagttccattcacctcaggatttgctttcttctttgtgaactaaattccacgtgtaattgagaagcaatgtctgagaaaatggaattttacagcctctatagaatagtaaaggaaaaatgaagtgggatactgaatctggaaggctttctgttgacacaaaatgaaggtgtacaacaaggagggcagctttccacgaggaacttccatgaggctgtgcagccagagaggaatagggtaacaaccctggtacagctaacacctccaacacgtgtgtgagcactgtctgcaagccataatccatagcagtggcaggacaggctcgccaactgagtggttctggaaagctgccttttccttttagtgattcaaggatgcttcaacgtggattttttagttcctgttatgagccagtgaatacaaagatgaacatggtagatgggggatctggcttcctggagcttaaaactccaggatgggggatctggctttcctggagcaagaaaaccagtggttttcttggccgaagaagtgaagagaacaaacagcagaggataatttggtaatcagcatcctagtgtgccccagggtactctcttaaggaaatccagtcctggagcacacccagtatggtccagcctgctgtcttcgtaggtctgagtgccccagtatttgcaaagtgttttggagcctatgaaatgctttcacacatacaatctcctttaattaactctcacaatgactctgtgctatgtgtacaattatcacgttttacacacaaggaaactgaggcatggagcattgtaataatacccgagatcttctcactccatgaccaatgcttttcttctccattccagttgctttttcaactgtgatgatttataaaggacaatcaaatgggcacatactatatttatgcacatacatacacacacacacacacacacacacacacacaaccagatgtcatttataatccatgtaaaatatttttggggaagtttctctttaataaagtttgaagagacatatattttttttttttgaagaggcatattttttctaacttttttttttttttttgagatggagtcttgctctgtcacccaggctggagtgcagcggtacgatcacggctcactgcaacctccgcctcctgggttcaagcgattcttcagcttcagcctcctgagtagctgggattacaggcatgtgccaccatgcctggctaatttttttttttttgtatttttagtagagatgggggtttcaccatgtttgtsaggctggtctcgaactcctgacctcaagtgattcacctaccttggcctcccaaagtgctgggattacaggtgtgagtcatcacacccagcctataactttttttwaataggtgatagaatcccgtgcttgaaaaataatcaaacaaaaagagaatgcattgtaagaagcctcactgtactcctgtccccagctgcccagttctcccctcctccccacrgggaaacatcttcattagtttcattaggttcttatgaaaccttccagagtttctttaagcaaaatacaagcaagtaggactgtcatatcctgcagaccgctacatacaaatacatagaaagtgtcctcattctatcctccagtgatattccattttttggctgaaccacctaaatgatggatatttaggggaagcaagtattttttaaaaaaggtaaaaatcaaaggtttttattttttatttttttaaagaaaagttggtaggctgtgtttattcattcagaagtcaggccgtggctgaactgatagctcttggagatggccattgctcatctctgaatgtctggttttctcttgtaagaattgtgtgtatgatccagaccttcagtgtgtgcactatatattgagaattccagaagagatgatatggacaagaaaaaaagatgactttactttttacagtaaaaataaaacttaaattgaagagtacaattgtttaaacaattggaacttacttagctactgcttgttgaaacaaaatcctttttttaaaagstatcgaagcaaattaaagctgatccgtgctaaggaagaagacagtggccattatactattgtagctcaaaatgaagatgctgtgaagagctatacttttgaactgttaactcaaggtatgtaaagggagtataaagataatgctagctctgtagatgagtgtcttccaaggaaagcctggcacttttctccccggtcatggaagaaaagcagcacttaggggagaagcagtgtctgcatatgtcacatatcgggaatacctctgctggactcatgaattcaggtatttctgggaggttctgggttactctagagtaggcgaggaatccctaggctccaccagctagctttatttttgtagagatggagtcttgccatgttgcycaggctggtctcctgggttcaagctatcttcccaccttggcctctcaaagtactgggattacaggtgtgagccactgcacctggcctccaccagcttrcttagcacctgcttctcaatctgagaagagagaagcagatgaccttagattgttctggagagttttgctacaagttttccttatagacattgtacagtggtccttaccagaagggagtgcccaagtctgtttacattcaggctcagcacctatccagagtcccagccatgagccaggtgctgtctgaggtgcgctcatgtgatcctcacagtaaaacctgtgatacaagcaacaccgtatatctaatttatttgaccacagatttagaaaagaatctttaaaacctaataacataccacagatgcattttggtaaatgctgctttagattatactttagctgaatccattagttgaatcctaagctataatataattttaagaacctccttgcctttcaagccaaataaccaagggactttctctctctctttccctccctcccttccttccttccttccttcttctctccctcccttgttatctcttttcctttcctttctctccttccttccctcttccctttttcctttctctccttccttccttccttgcttccttcttccctccctcctttgttctctcttttcctttcctttctctttttctttccttccttccttcctcactcactcttttcttttcctttctctccttccttccttccttcctccctccctcactctctcttttctttgcctttctctccttccttccttccttttcctccctccctccctcccttgttctcccttttccttccttccttctttcctttcttccttccttccctcttccctcactctctcttttcctttctctccttccttccttccttcattctcccctcccctcccccctcccctccccctcccctcccccctccccccctcccctccccttcccttcccttcccatttttcttctcaccatgttgcccaggcttgcctcaaactcctgggctcaagtgtttctcttccacctcagcctcccaagtagctggggctacatgtgtgaggcatcacaaccatggacttttcactttcttcactccaggttaaaaacatcacagggataaatctcaaaacaccaaaactgtgaaaatgctgctaaccatgtgggtctgtctaaactggagtgttacttgtacaactggtttcagcccctcsggagtgttttgaatgccatgtagatgagttgtgaactcatattccactttgtagtctcatatgttctgggacacgagctattccattctgacttctttctgcctcttgcagttccttcatccattctggacttggtcgatgatcaccatggctyaactgggggacagacggtgaggtgcacagctgaaggcacgccgcttcctgatattgagtggatgatatgcaaagatattaagaagtatggaaaacagatgtgtcttcttctttcgtggtcagaatatttctcccttgacacaaatgatgtcaaatacattttacttattgactataagatagggttttgggtgtgatagcttcagggtgtgtatcttttgtcatgaatagctgtgagaagaaggtccagggctctcattagaccttcaaaatgtctccaatctaaaaacaagagtgaattttaagaaccactgttctaagaagatttttactaccctggctcacatatcttatttggtgaactttgtttggtagtcggactgcatgtaaacataaatgtgactgcttagtcccttatctgcccacctgctgtttggtgggttaattcgccattccctcctccctcccccgagtcctcagccttcttaaatgggcacatgagcaatgtgtttacacttcatccatggtaactggttgtgttcagaagcctcagttgtttcttcctctagacagagactcctcatcttaacttctagggctaagaacagacttggatgttgactggggtttctagtagattccagtgtggagcaggattctaggtcttataactcaatctgaggatcatcgcaaccctagtgacaccctaggggctcttcccagtgtgagtgttgagaagggagggctccaggcctttttgaaggggtgggagattgagatcattaaatatggttgaagttgaactgttcagtttgctcataggttcaagattggggaatggtagtcatattttattaaacttgattatctctgcctgctatgtaaacacttagctttcagttgttcatgtgtgagttattccctcttcagcacatgcagacaagttttaatgttcatctgcatgtaaaataaatcagtgtgtattgccccgaaatgcagacaaggtcccaactccttgccatcttagagtgttcccgtggctccactcattgccatgactctcaggaattggccctatacttaggccctttttctctctagatgtaataatgaaacttcctggactattttggccaacaatgtctcaaacatcatcacggagatccacycccgagacaggagtaccgtggagggccgtgtgactttcgccaaagtggaggagaccatcgccgtgcgatgcctggctaagaatctccttggagctgagaaccgagagctgaagctggtggctcccagtgagttcctcaacagtcaggacaactcatcagctgagccgcatctgccccaggcggaactttgaatcccagataggggtyatatagaaatgaaggtcccaaggcagaaattcagttaygaatgctcttaaagkcatgtgggactttgttttattttgttttgttttttgagacagagttttgctctgtggcccaggctggagtgcaatggcacaatattggctcactgcaacctctacctaggacgttgttttagattcagatccaaaactgcatttttgcagaggcccctcaacattttgcttgtctaataatatagctacagtctctactttgaatgtctgtgtatgtggatggagtgtggggaaggatcttctgtctcattgctccttaaaagatagatgaagccaaaagcaatataagcaaaatgcaacttacaaaataagctttataataaagcatatgaagtagaggtgtctgcccatatagtagctgtcaattgcatttatcctattcaaattctgtccacaaggttactgttggagcaactttggagaaaatactgagttctcctgattgaattttgtccccttcttgtataaggaaagagttgatgtagtttcctgggtgtagatggtttgagagatggtactgcctatccctaaaatgaaccaggcagccctcacacttccccaccagcagtgagagattcctggctcagacacagccacactaccttgctgcccctgtgcatgtctgccaggaaacttttcattgtgcctctctctcttgtcacgtagccctgcgttctgaactcacggtggctgctgcagtcctggtgctgttggtgattgtgatcatctcacttattgtcctggttgtcatttggaaacaggtagatattttctcataaaactaaagatctttgaagccaatgagaacaagcatagcaacctagttcagtgcttggcacagagaaggagctcagcaattacatgtggagtgaacgttgttggactctactgtgtccagtcactgtgctgcttcagtgaagctctggtgcactgggactttggtaattcaccagttacctgtcctggtcatttatagaaaccgaggtatgaaattcgctggagggtcattgaatcaatcagcccrgatggacatgaatatatttatgtggacccgatgcagctgccttatgactcaagatgggagtttccaagagatggactagtgcttggtaagttccatggggtaacctyccaagactcccttttcccttgcacacaactttacaatttataggccttggcagaatagagatctgagcttgtgcttagtaagaactaggcaatggaaatttgctttcagaaatacatttctgtcttgacartaagttaattggatcattgcaatgatttttttaaatctctttccataacaaattatagttaaggaaaattttacaaagggagaagagaatatgaagagggctggcaaagatacccaccaaaattgcttttctttagaaatgacacaaattgaaaatgaatttctgtgactaaaaatgagcagatgagaaatgaatgaggacaaccacaaaatgtattttgattcagtacattctgaagatgcattagatactcctttttacatatttggaatatggaatataaaaatataggtacattttgaggcaaaatatgtaaaaataagcaagccaacttatcacaagcatttcaagtatttcaatcctgggctgagaccaagtatatgaagctttagtccaagggagtatttcttttttaaatcacattcctaatgaatgaaagcaagacaaaggcaaatgaaagtagaggtagaggttgtgttatgatgaatgatctaacagtatatatgttaaagaatgccaaatgcaggttttaattatccaccggtctcaytgcaaaatacagaagagtttaagtcttcttagagagttaggtaaactgaaatcaagcaaggcaccagagtgaaatcacctttgcaaaaattgtaactgaggaaattatgacagtgaatgagatatgacctaaccaactccattttgctttagcctccaagttgtccttgttccttcctgggcataggccgaactaactttgagaggaacttagtttatagtttgactttgaaaaaaagacaataatagccctttgccaaaacaaaccctctttttscctgggaactagactgcctttgcgggactaacgaattagctacaagattagaaagtatggtttaggggtcactgttgtaaaacctraggtcagtgcttgagatattttggagaccctgtatttcgatgcaccagctgacaccacccaggtcaataaactggctcatctgatcttggggcccctacctaggaactgactcagtgcaagaggacagcatcagctccctataatttcatctttgacccaaccaatcagcactccccttttcaccccctacccaccaaatcatccttaaaaaccccattcccccagtttcagagacactgatttgagtaatagcagaatagtagaaattcccccagtttcagagacactgattcgagtaatagtagtaatagtagaataggtctcccgtacagctggctctgtgtgaattaaaccctttttctattgcaattcccctgtcttggtaaatcggctctgtctaggcagcggacaaggagaatccatggggcggttataagagctgccccccaatttcaaatatttatatctaagctttctttattttcctgcctatttcccaacaagggatgaggagcttagggagttaaaaagtagtaaaatatggggaaaagggcataattcccattataccaagaggcattgctggtgaagcaatacctttccaggtacgattttcagtaacacagacgtgcagtaagaggcagtgttggctgttagtgtcttttatgagccaagtcttttcctggcttggctatccgtggtgagactgacaccccgggaaatgtttctctcagggtgagctctttcagggtgggacaacagcttcagtgtctttacgtatgtctcctcccaacatgaagctaattgctgtgctctcgggcatgtttagctcttggtagagtggctttcctaacaaatagggagcagtgagcccagcctgaagtttttatttagtcactccttagaatcagtgatattttgaatactgaagtatttccagtggctagtaatttactaagacaaaagatgcccctgtttgcatatggaaaacagaaggggagagagccaggaggtgtgggtgagagccccgaaggcaagaggatcccaggggctggcccagcacggagctggtagacagcrcgctcacaccagggagggctgcaccctcctttctcccgtctgtgttttctttcccttgcaagtgttattcgacaaaagcaattatgctaatttccttccctgtgggctcaattccttttttgacasgatgacttggaggagtcattatgattactccaaacaggaaagacactcgcccagctgtccgcccgcagaragctggctacggtgcagaaagctgaggaggcgtctggagtttttgggtgttaatgattctgcctgcccacaggtcgggtcttggggtctggagcgtttgggaaggtggttgaaggaacagcctatggattaagccggtcccaacctgtcatgaaagttgcagtgaagatgctaaaacgtaagtgctccttcctggggattttttgagcacggggattttttgagcatggggatattaagggaatttctcaaaatcatgcagctagtaaataagacatttaggactaggtcctgattattttgactccaggttttatgtgtatttagattaggtttatttagattgctcttgctgcctgtatgttggaaaattaagagcttgttatttccagtgacttctttttactagaaagaccaggaattagttattagcactgaggccaagtagctatctgcttcttttagacttctggtaaatagaatgatatccaatcacaggattagtcatattcttggtttttttctgagaacaggaagttggtagctcagctggactgatatgtgatttattctttcaacagccacggccagatccagtgaaaaacaagctctcatgtctgaactgaagataatgactcacctggggccacatttgaacattgtaaacttgctgggagcctgcaccaagtcaggtgggctcactgacctggagtgaggattttcactggacacatgtggttgtgaaaactgttcaatcaggcttaaatcctccactctccatccccacacatggcagggaatagaagtcccttgaatggagctgactggtcccttgaattgatggaagctcattggtttttgagcaaaatctgttgccagtccagtcatagccattcatggctctttattaaaaaaaaaaaaaaaaaaaaaaaaavcttttttggtatcttatttttttctgygccatatggtctgcaggacaattcatggcttttctgttcttcattttcatacccatctcctaacggcttttgtccccataggccccatttacatcatcacagagtattgcttctatggagatttggtcaactatttgcataagaatagggatagcttcctgagccaccacccagagaagccaaagaaagagctggatatctttggattgaaccctgctgatgaaagcacacggaggtgggtgcaaagagagatgttgctgtctatcattatcttacaggcatcacaaatggaaagacccatgtcctgatagatatcatgtctgcagattcagtgcccaaggtagcaagacttagagtcaaaccaccctgtccagtctttccatggtcatgcagagagatgcatgatgtctaaaggtgttttggactggggtgtcacatgggaaggccttgctgataggtttgaatgagagtgagttagaatgactctgggagctcttctgctatttacatgtgatccacttagacctataaaatgcagctctggccagggatgcttgagttctggaaccttgcaagaactgtctgtggatctccaagctcgaggtccttgctgaacctggacctataaatgacgtcaatgatagtgatccctactgcagaaatctacaagtggctataaagaactctgtaggtaagaaattctgtaagatcagaaagtacaatgaattcacttcataataaattacttggtggacaccaaatgggtgctaaattgattgggtagaaggaattgtatgcccaagccacatgrccacacggctcaagttccaaccaaggcttgtgagttgaaaaactgagaaagaataatgacagacttaaygtagtgaattcttcaaactttaagtgtaatggacttacaggtccatgggagcacagccccactgtcttagatgtggctcttcaggatgtgcgggctcctgctaargatgtgcagggaactggctctgaaaacaagtgaacagtagtcatcatggcagctgacatttgtggagtcctttgtatgtgccaggtgccatgacaaatattccgctagtctttcccatctttgtcagtgggatccattctacgtcttctgaaaagtgcttccttgacccccagatcaagtcattttccttacaagctattgaaacctttcttccttcacaacacagctgagtttgagttgatctgtgtatttattttgttttttacatttctttttttccctatttaaaaaatttttttatttccataggtttttggggaacaagtggtatttggttacatgagtaaattcttcagtggtgatttgtgagattttggtgcacccatcactggagcagtatacactgaacccagtttgtagtcttttatccctcacctgcctctcaatttttccccgagtccccaagtccattgtgtcattcttatgcctttgcatcctcatagcttagctctcacttatgagtgagaacgtacgatgtttggtttccatttctgagttacttcacttagaataatagtctctaatcccatccaggttgctgcaaaagccattaattcattcctttttatagctgagttwyatatatatatatatatatgcacacctacacatacatatgtatagatacactgcagtttctttatccactccttgattgatgggcatttggggttggttccacattttttcaatatgtgaattgtgctgctataaacatgtgtgtgcaagtatctttttagtatgacttcctttcctctggtagatacccagtagtggaattgctgtgatgcatgtatttgtgcgactatttgattaatgctcatttccttgactagatcacctcatgtgaaaggtatggattggttttgcttttacccagttagctcccatgcctayctcagtacctggcacattgtaggtcccccagaatcatcatctactgaaagtggaatgaccacttcagaagggcaccctgggtaagatttctctttctgtttttacagctatgttattttatcttttgaaaacaatggtgactacatggacatgaagcaggctgatactacacagtatgtcyccatgctagaaaggaaagaggtttctaaatattccgacatccagagatcactctatgatcgtccagcctcatrtaagaagaaatctatgttaggtaaaagtgtctatactcactctgggtgttgggactttccagtggtttaatatgatacttaaagtatttagrgggaagtgtatagggatggtaagtgaacctggmagcccaygtggtctctaaatgcaggtctgcacaaccagttctgtgacatgtttccaggtttgtggcctgtaaattgaaaagaataaaagctgacaatgtaacaaattttttaaactttaaatttaatagttttaaagaattttcttggtgtgttcctgcagtaaacattttwwaaaaaaaataattatttattctgatataatgaacttccttttttattgctgtctttttcttttttaatgaaaatatggtgattgattttttttaatgcccttacttggcagaattacaagttggctgtcttatgttggttcctcaccttgctttttttcccttaagttttagaagtctctgatgtctatgagttcagtaacccttgcttttacttttcctaacattcaatttgtgataggaactctagagtagataatttgcagttatattttctggaccagtgtttctgttgaatgtattttgaaggtgggtctatctgtttttcaagtacatgaatatgtggcagggttaaattgatttataaactccagggagtccagctgatgcccagaccagatggatcacttcacatctgctcagggtggttcctccagagccctgaactggtcacagacatgaagctggaagtctgacattggcttgtcctgtgagcttgcctttttgggtctgagccttcccattagtcaatgcaaaaaagtgttgagctgccctggacattgttttggaaattattgatgtgctctgaatgttttcaggttcttaagtgaaaggtacaatccatttaaaaaagaatgtgtttgttttgcaaagctcagtacacaatattttccatttctgcggttccaagttccattcacttctcattgccaaatgggtgaacttccaagcgcttttaaaagattagccagtgagagttatcggaaccagtacttcctctcccctcccatattgttaaaaatagtttacattgcttcccaggctgggctggtggagttggcaygagatgtcagaggaacctgagtcatgctcaggcccaagccctgttggcaggcagaccactgctttctggccttccgtgactatctgaaaaaaatcgtgaatggctagagctactcttcacttgctgaacattttcaaaaagaattgagaacttctggattaaattgccttcttcctcgaaaaccctgggacccttccagatgggactaactggggaaagtggacaagttacaaacaaagaaactcaaaggaaagtcattggcactgatctctaagatgctatcacatgtgattggtggttgattttattaacaaattataagcaaagtactacaaaggtggctttaaaaagaaaataaagcaattcacagaaactactttttcatgtagcttgtatgtgtgctccatgtatttcatcatggaagattttagtgtgtgtttatgtgtatgtgtgttttaaaggtagctgagatgatttgctaattatggttgaaaaaaagaaatttaggaggtaaacaaaataattatgtgtaagattggtccttgtggctgtgtgtgtgttttgtgtgtgcgtgtatgtctctgtgtgttttaggctgttcttttattgctataaataaatacttgagactgggtaatttataagggaaagaggtttaattagttcatgattctgcaggctttacaggaatcaagatactggtagatctgctcagtttttggagaggcctcatgaagccatgaagtcatggcagaaggcaaagcagtgcaggcacatcacatggccagagcaagagcaagcgagagagagaaagagagaggtgccacacacttctaaacagtcagatcttacaagaagtcacttactattgcgaggacagcaccagaaggatggtgctaaattgttcgtaagaaatctgtccccatgatccattcatctgccaccagtccccacctccaatactggagattacaattcaacatgagatttgggtggggacacatattcaaactatatcatactgaccctggaccctcccaaatctcatgtccttctcacatttcaaaatacaatcatccctccacaatagtcccctcaagccttaactcattccagcatcaactcaaagtccaaagtcttatctgacacaaggcaggtcccttccacctatgagcctgtaaaataaagaacaagttatttactttcaagatacaatggggttataggcattgggtcaacattcccattcccaaagggagaaatcggccaaaagaaaggggctacaagccccacagaagttcagaacccagcagggctgaaaactccaaataaactccattgactccatatcccatatccagagcacactgatgcaaggggtggagctcttgggagggatggaacaccctgtggctttgcagggtttagcccctgcagctgctctcaggggctgttgtcgagtgcctgtggtttttcctggtgcagagtrcaggctgttggtggatatattattcatggaggatggtggccctcccctcgtagcttcacgaggcagtgccccagtggagactctgtgtggggacttcaaccccacatttcccctctgcagtgccctagtagaggttctctgtgagggctccaatcctgcagcatgcttctgtctggacaccctggttttttaatatatmctccgaaatctaggcagaggctcccaagcctcaactcttaacactctgtrcacccacaggctaacaccacatggaagcggccaaggtttatggctgtcacaagctgaagcagcagcccaagctgcacctgaactcctttgagccacrgctggagctggagtcatagggatgcagggagcagtgtctcgaggctgcacagggcagtggaccctggggctggcccatgagaccattcttccctcctaggcctctgggcctgtgatgggaggggctgccatgaaggtgtctgaaatgccttaaaggcctttttcccattgttttggcaatcagcctttgcctcctttttagttatgcaaatttctctagcaagtggttgcccagcagccctctttaattctctcccaaaaaagcttttactttctctgtcacatggccaagctacaaattttccaaccttttatgctctgcttcccttttactttttttttattttaaagagatggggtctcactatgttgtccaggctagtttgaactcttggactcaagcaatcctctcactcatcctcccaaagtgttgggattataggtgtgagccactgcgcccagcctctgcttctcttttaaatataagtttcaacttcaagtcatttctttgcttctgcatctgactgtaggctattggaagcagccaggccatatcgtgaacactttgctgcttagaaatttcttccaccagatatcctaggtcatcactctcaagttcaaacttccacatattcctagggcatggacataatgtggccaagttctttgctgaagcttaacaagggtgacctttactccagttcccaataagttcttcattttcatccgagaccttggcagcctggatttcattgtccatatcattatcagcattttggtcacaagcatttaaccagtctctaagaagttccaaactttccttcatcttcctgtcttcttctgagccctccaaactcttcttatctctgcctgttacccagttatctttacagcaattccccattccttgataccaattttctctattaggctgtttttgcattgctataaagaaatacctgagactgagtaatttataaagaaaagaggtttcattggcacatggattctgcaggctatacaggcatttgcttctggagaggcctcaggaagcttccaatcatggtggaaggtaaagggggagcaggcatatcacatggccagagcaggagcaagtgagagagagagagagagagagagagagagagagagaggtgccatacagttttaaacaggcagatcttgyaagaagtcactcacttttgcaaggatagcaccaaggggatggtgctaaaccatttgtgagaaattcacccccatgatccagtcacctcccaccaggccccacctccaatactggrgattacacttcaacatgagatttgggtggggacacatatccaaactatatcattgygygtgtgtgtgtgtgtgtataatttttaaaccagatatatgtttctgcatatctctttcctttctttcattctttctwtctttttttttttttttttttttgagacagagtctcactctgtcacccaggctgcagtgcagtggtgtgatctcggctcactgcaactcattgcaacctcctcctccctgattcaagcaattcccctgcctcagcctcctgagtagctgggattacaggcacatgccaccatgcctggctaatttttttgtattattagtagagatagggttttaccatgttggccagactggtctcaaacttctgacctcaggcaatccacccacctcggcctcccaaagtgctgggattataggcataagccaccatgcctggcctatatatctattttctaagatagaatctttgcatagtgatattcatctgtgagatctaaacattctacaaaaaaattaagaaaatatttttggatgtgttctttgggcatgcctctgcaacctgatgatttcctgctgcctgccagcaccaatacatttaatttcttttctgcagactcagaagtcaaaaacctcctttcagatgataactcagaaggccttactttattggatttgttgagcttcacctatcaagttgcccgaggaatggagtttttggcttcaaaaaatgtaagttcaaggaacacagacctttttagacccagatttcagtgagtggagtgtggamggagatgctaggagatagatgttggaaaggccattaataacaggggcctcttacttacctgtctctctccttcatcccctacgcaggtcagggagtctgaaatyatcaggcatctactcttctctagagctttctctctgttgggagtgggtggagtgagaacctgggagaaggccagccctttatatccaggcagacagctccaagtgccaccatggatcagccagtcttgcaggggtgatgctatatcagctacagatggcttgatcctgagtcatttcttccttttccatgcagtgtgtccaccgtgatctggctgctcgcaacgtyctcctggcacaaggaaaaattgtgaagatctgtgactttggcctggccagagacatcatgcatgattcgaactatgtgtcgaaaggcagtgtacgtcctcacttccctcactggtcaggctcatcctccttcactttaatctctaaagtcaggtgttgcttctagagattcggtgcctgttttttaaaacatcaatagatttcaaggggtcagtacactgccttggcagcagattgcccaggtktgagtgccagctccaccacttacttaatttggatttggggctagatacttgactgttctgcccctctgtctccctgattgtagtgggaggtgataatagtacctatttgctgagttgctatggggattaaatcaatgaattcatgtaaagtgcttaggacagtgcctggcatatagaaacagcactcaataatgttagctattttatttatttattwatttatttatttatttatttatttattttctttttttttgagacagagtctcactctgtcacccaggctggagtgcagtggygcaatcttggctcactgcaaacttctgcctcccaggttgaagcaattctcctgccttagcctcccgagtaggtgggattacaggcatgcaccaccatgttcagctaatttttgtatttttagtagagacagsgtttcaccatgttgcccagactggtctcgaactcctggcctcaagtgatctacctgcctcagcctcccaaagtgctgggatgacaggtgtgagccactgcatctggcaagtgttagctattaatatgtcaattgcgtgtatgcatggacaagcatgcattcccaaggatggtgtctttatattttaagcttttatcagattttcaaaagccatctgtgacccctaaaatagattggaaccatttgggtttatgtatcttggaggcacagtttccttaaagatactcattttgttgtctacttgaaccattcttcccatcccttccacttctcagcagatgacatagctccctgtggggatatatctgctccctgtaggtacaattccaaatcacctcactgcactggatgtgagacagcttatggcagctgctgcttccacctagagaaagacatgggcctgcatccatgctgtgtgtgattcatgtactcatgtggccgtgatagctgtaatcggctcatagatcattggatctgttcttagttttgttcccaggaatatctaaaaataggaaactggtccattcagggcttacaccttttgggtgaaaattcaggattaatgtttttggatattattcctttggaggacataaaaggcaatattgaccattcatcattcatctagtatttattgagcacctactatgtgccagggactgagagttcagtaatgaacaaaacacatgtaaaagacactcaaatgggacaagataattagcacaagttattaagagcccaaggggaacccttttctatttccactgctgtggatcatcagtgagtagacatgggtttaactgtctccctccttccttgcagacctttctgcccgtgaagtggatggctcctgagagcatctttgacaacctctacaccacactgagtgatgtctggtcttatggcattctgctctgggagatcttttcccttggtatgggcctgacattgctgcttatttgggctgttctgaaacaccactggaaggaaaatgtgttctttcaagccccaggatgtagacagtgttaagataacctggtgtgaggccagtatgctgcagccgcctcaaaccacatgttgtgccttattgtgtctgagataggcccatgcaggtggagatgggggtttttgttgggggttgcgtctcactcctggcctctgcccctcctctcctttgggctatgccagagtgacttcctcccactggaagtggtcccaatgacattcgcatcccagctgctttttcattttgggctttgggtcacatgggttcacccatggagagtgggccctccctcacctggtggcgattgatgctcaggtgaaaaggggtacgtggcgggaagggcagggctctcattcctggttgtcattggccagtcttgacaacccaggtgctgaacaacccaggtgccctgggctatccggtgaggtccctaagagaaggatgagccataaccctgacatctggatggttcatctggggagatgagacttacacacttagggataaacagtgtgctgctgatttaaaattgtaatttgagtcttgagtaaagagaaaggagtcctggaatagtgtgggaaggcttcagagagggaacttaacttgacctggccttggctttgaaagtgtgaaatgtttcatgaatttatctgtgatcaggatgtaatagtaaagtgtgtcttcctgccccgtctcctttttcatcctagttctccctccatggatgatcacaatggatcatccccgagtggcttaatggagtcctgtactcccttaaaagcagagaggccacaactttgatttttgctttagctatttgaacatacctggtgaaaaagactctctgggttttaatgattcagaatttctccttgcttttctagttcattttgtctgtgttgatccagtagtcatacacattgaaaaacacttgaacgcttatttctaaagatgtagaatttttgtgatggtacttggacttgaccaacctggagtcctaattaaacttaaggtttgagctggtctctgaagtcaaggagatgatgacactgaattttcttgaaaaaaccagtgcttcaasgcyataggatctgaaaggttttctaacagygttctatcatgccaagtgtttcarcaatgcactgagcgtttgttagtcctggtgttttattgtttggcttttaggtggcaccccttaccccggcatgatggtggattctactttctacaataagatcaagagtgggtaccggatggccaagcctgaccacgctaccagtgaagtgtgagctccttccccatcccgggggcctgtgttcacagtctgtgggtctagggggagggaggggccctgagacttccccctgtgcccactcttgagttctgtccccacagctacgagatcatggtgaaatgctggaacagtgagccggagaagagaccctccttttaccacctgagtgagattgtggagaatctgctgcctggacaatataaaaaggtgtgtttggatctgtgggtggaaaggtctggataaagctggaagttataccagtgagctgtgctgttccgcagttctagaggagcattttcaaaagaggcaaaagactgtgtgatccagtggctgggcttcatggcggtgctccacgagaccctagtagcaatgatgaatgaaaaccctccccttcccgtggggctttcctttcatcttatatgtrcagtacctgtaagcactattctccagatgtttgagtatcagaagttagtgtgcagttagaagactcagggcatccatggccattacatcactaatttgagtgcacttaaatccatgcgaaattggcttttaccagcggactggaaggaacaacctcagctgttatctgtggcaccagctggttttttgtggaatrggaagcattgttcaaaggaacaaatgtaatttcttggaaccaggcaggatatgtaaatgaatgaaacaactttctgctgaggtgttgagaggaaaactcagacataacctcagtttcttagattgagattagtccctgtgtagactttttatacttatcatttttcttccttcttctcaaggaggaatagtgttaggagattgtgtgccgaactggaagttaaatgcttctgtctgttaattatctcactgcccactacaactttcacaggtgaggcagtgaggaggcagaaggaaattaaccctcagttggtcaaagatgctctgactggtggaaatgtgttggtgggaagagattgaagttattgttgaaaatagggtcttttcacatccaatgtkagacctctccaatgtttaaggatcatgaaggctttgggtattatccacccaatagaaggcctcactgcctctctrtgggacccatccaagccctggaaaggcaacgtgatggggaccagaaggattctcagttgtagctactgacttggagaaggggctactggtatcttagcacctaatggcagaagctctttaccattggtggcccyttcttcatgttctatgtctctggggatagttgacatgactctccttcaactaagtcccacatcttccaggtagtttggaratatgtacagttaaataatrgtaagttctgagtgtctctattcatttttgaggtttggttgttaacacttgattaaatatgttcaatgaatgtttatagagttatgaaaaaattcacctggacttcctgaagagtgaccatcctgctgtggcacgcatgcgtgtggactcagacaatgcatacattggtgtcacctacaaaaacgaggaagacaagctgaaggactgggagggtggtctggatgagcagagactgagcgctgacagtggctacatcattcctctgcctgacattgaccctgtccctgaggaggaggacctgggcaagaggaacagacacaggtagctgtgggggcagcctcggtgtctcacctttcccctcccctataggccctgaaggagaggacccattttcccgataatggtgcactcccggttggtaaatatgtactcagggacaagttgcagaatcctcaggaggtccacgtggttttgaaaatgcttcccagatgattctaatatgttccccctggggctgggagagggatgtgcatgttgtggggagagggacatgcttccctggtggagaatctttgagctaaattctcaggtaatttgatcaaattgatacagaactgtgattactgagatcatataagcctctcctgccattgtcttaaatagtcattgaactggggaaaaagtgaagagaggcgggactgggtcctttgacgctataccctacctgtgaattkgaatcacctgcagagatttaaaaactgctgatctacaagcctcacccaaaacaacaaattagaatccctgggggtggtggccaactgctccctggctgatttgtttcttctttcttttaaattttgtattatggaagatttctaacgtgtgcacaattcacatagtatagtgagctgttcagtattcgtcacccagcttcaatgactatgccctctgccagcctggatgcacacatggccatgtctgtctctcctcagcctcctctggattgtttggaagcaaatcctagacaccttatcatttcacccataaatattccagtgtgtgtctcttaaagataagggctctattttaaagaagaacaacagttattaaaaataactacaatgccgttatctcacccaaaacagggacaataaatcgttaaggcatcaggcagccagttaaagttcaaattatctcacaaatattatcatactccattaaaaagtgggcagaggacataagcagacacttttcaaaagaagacakacctgcagccaacaagcatatgaaaaaatgctcaacatcactgatcactagagaaatgcaaatcagaaccgtgatgagataccatctcacaccagacagaatggttattattaaaaagtcaaaaaataacagatgctggtgaggttgtggagaaaaggggaagcgtatacactgcttgttgaagtgcaaattagttcagctattgtggaaagcagtgtggtgatttctcaaagaacttttaacagaattaccattggatccagcaatcccattactgggtatataaccaaaggaatataaatcattctaccataaagacatgcatacgtatgttcactgcagcactattcaacgatagcaaagacatggaatcatcctaaatgcccattgacagtagactggataaagaacatctggcacatatacaccatggaatactatgtgttgataaaaaagaacaagatctgagataccatctcccaccagtcagaatggctattatttaaaagtcaaaaagcaacagattgtggcgaggttgtggagaaaaagaaacacttttacaatgttggttggagtgtaaattagttcaaccattgtggaagacagtgtggcgattccccaaagacctagaggcagaaatactgtttgacccatcaatcccattactgagtatatacccagagtgatgtaaatcattctattataaaggcacatgaatgtgtatgttcactgctgcactgttcacaatagcaaaatcatggaatcaacctaaatgcccatcaatgatagactggataaagaaaatgtgatacatatacaccatggaatacgatgcagccgtaaaaaggwatgagatcatgtcctttgcagggacatggatggagctggaagccgttaccgtcagcaaactaacacaggaacagaaaaccaaacaccacatgttctcacttataagtgggagctgaacgatgaggacacatggacacatggagggaaacaacacacactggagcctttcaggggttggggattgggtggaacatcaggaagaatagctaatggatactgggcataatacctgggtgatgggatgatctgtgcggcaaaccaccatgacgcatgtttacccatgtaacaaacctgcacatcctgcatatgtacccctgaacttaaaaagtggaaaatacaaaaatgaaattaaaaaaagaacaagatcatgtcctttgcagcaacgtggatggagccggaggtcactatccttagcaaactaatacgggaacagaagaccagataccgcatgttctcacttataagtgggagctaaaacaacgagaacacatggacacaaagaggggaacaacagacaccagggcatagttgagggtgcagggtgggagaaggaagaggatcagaaaaaatacctatcggatactgtgcttattatttgggtgatgaaataatctgtacatcaaaccgccatgacatgtgatttatccatgtaacctgcacacgtgcccttgaacataaaataaaagttaaaaaaaaattatcatacacttgttttgttctgtctgagatccagataagagtcacacattgcacttggttgctatgtctctgtaagttcactatgcctctattttttgccctcttacatattatttgtgaagaaaccatagtgtttgcctgtggagttcccacaatcggcattttgctgattacatccttgaagtgtccttctcaggtgcttctgtcttctctatgtgttgtaaactggtagttagtctaggaacttaacctgactcaggttagatctttggcaaacatgcttcatagatggttctgtgtgcttctgtcaagaggtatgcactgtccagttgtctgccttttgtaacattatcagtcattgggtgatcattacctagaatttcttttttttttttttttttttgagatggagtctcgctctgtcacccaggctggagtgcagtggtgtgatctcagcttactgtaacctccacctcctgagttcaagccattctcatacctccgcctcctgagtagctgggattacaggcacatgccaccatgcccagctaatttttgtatttttagtagaaatggggtttcagcatgttggccaggctggttttgaactcctgacctcaagtgatctgccggtctcggcctcccaaggtgctgggattataggcatgaaccacctcacctggcctagattctttaactcagcaccaaggtggagctaatgcccaggcaggactgagaatcactggttgacgtggtcagatggaggagaccatgccccagttctccgctgtctttgcatggcccttggacagaggtaggagaaggtgatgatagtggcccctagttcaaggtccaagttgcttgtgtgtgtgtgtgtgtgtgtgtgtgtgtgtgtgttttcctcttctttcccatcagaacattattttggaggcttatgactgtgacctttgttaaccaatttaggtataatatgtagacagcccttgtttatttgtatggactgggtaattttgaaagtatggcttttctattttgttttagaatatgttatgtgatttgaagatgggacacagtggcccatcagtcttcggttttttattatgctttgctcaggccagtttttataacgtgtttatatctcttgagcatacggtgttcctccaagttttgggggtctgcgatggaacttcacgggggtcggggaaggctgggcagtgaatctagggctctctgtctcagatcctttctcaatttggttactttgtgtttgtgggctctgaataatatttgagttgtaagagggttctgcttttatataaagttagaaagtcacattggaataaataacatgagaaaggtgcccagaagttttctagggctacaacaggctgagctgcagaatttgacacgccaggaattgaactttctcagttgaagttcacgttcaagttaagtaacttgtgtggcatcacacagctagtaagtggggggaccattccagacctaaggctttctgactccagaactcccctttcagccacttctctagtacgtaaggagccgtcacctgggccctcaagttgggggttggtgggggggcatttgatgtcaagagagaggggaagagggcattccaggcaagtggcaggagatcctgagaacacagtttggatgctcaggaggcttccgggagagcacctgatgggcctggctgcagcttgcaccctgatgggcctgacttcaccccctgctctgccttcccaggcctttggatcaggcattgcttatgttctcttccactaggattgagtagggaaagtagaaattcttgcagcttgtcagtaactttgatgaaagacccagcagaaaagcaggaaagctgaagagtaaaaatgatgggtggaccttggttttccacgtggcctaccacagcatgtcaggcctgggggcagaatcttgccatactgtgcagcccaaatttgaatgccaaaggctttcgtttgtctctggggggccacagtctaggtctagttctgtgyaggagttgtaatatttgctcttctctccctcctccagctcgcagacctctgaagagagtgccattgagacgggttccagcagttccaccttcatcaagagagaggacgagaccattgaagacatcgacatgatggacgacatcggcatagactcttcagacctggtggaagacagcttcctgtaactggcggattcgaggggttccttccacttctggggccacctctggatcccgttcagaaaaccactttattgcaatgcggaggttgagaggaggacttggttgatgtttaaagagaagttcccagccaagggcctcggggagcgttctaaatatgaatgaatgggatattttgaaatgaactttgtcagtgttgcctcttgcaatgcctcagtagcatctcagtggtgtgtgaagtttggagatagatggataagggaataataggccacagaaggtgaactttgtgcttcaaggacattggtgagagtccaacagacacaatttatactgcgacagaacttcagcattgtaattatgtaaataactctaaccamggctgtgtttagattgtattaactatcttctttggacttctgaagagaccactcaatccatccatgtacttccctcttgaaacctgatgtcagctgctgttgaactttttaaagaagtgcatgaaaaaccatttttgaaccttaaaaggtactggtactatagcattttgctatcttttttagtgttaaagagataaagaataataattaaccaaccttgtttaatagatttgggtcatttagaagcctgacaactcattttcatattgtaatctatgtttataatactactactgttatcagtaatgctaaatgtgtaataatgtaacatgatttccctccagagaaagcacaatttaaaacaatccttactaagtaggtgatgagtttgacagtttttgacatttatattaaataacatgtttctctataaagtatggtaatagctttagtgaatyaaatttagttgagcatagagaacaaagtaaaagtagtgttgtccaggaagtcagaatttttaactgtactgaataggttccccaatccatcgtattaaaaaacaattaactgccctctgaaataatgggattagaaacaaacaaaactcttaagtcctaaaagttctcaatgtagaggcataaacctgtgctgaacataacttctcatgtatattacccaatggaaaatataatgatcagcaaaaagactggatttgcagaagtttttttttttttcttcatgcctgatgaaagctttggcgaccccaatatatgtattttttgaatctatgaacctgaaaagggtcagaaggatgcccagacatcagcctccttctttcaccccttaccccaaagagaaagagtttgaaactcgagaccataaagatattctttagtggaggctggatgtgcattagcctggatcctcagttctcaaatgtgtgtggcagccaggatgactagatcctgggtttccatccttgagattctgaagtatgaagtctgagggaaaccagagtctgtatttttctaaactccctggctgttctgatcggccagttttcggaaacactgacttaggtttcaggaagttgccatgggaaacaaataatttgaactttggaacagggttggmattcaaccacgcaggaagcctactatttaaatccttggcttcaggttagtgacatttaatgccatctagctagcaattgcgaccttaatttaactttccagtcttagctgaggctgagaaagctaaagtttggttttgacaggttttccaaaagtaaagatgctacttcccactgtatgggggagattgaactttccccgtctcccgtcttctgcctcccactccataccccgccaaggaaaggcatgtacaaaaattatgcaattcagtgttccaagtctctgtgtaaccagctcagtgttttggtggaaaaaacattttaagttttactgataatttgaggttagatgggaggatgaattgtcacatctatccacactgtcaaacaggttggtgtgggttcattggcattctttgcaatactgcttaattgctgataccatatgaatgaaacatgggctgtgattactgcaatcactgtgctatcggcagatgatgctttggaagatgcagaagcaataataaagtacttgactacctactggtgtaatctcaatgcaagccccaactttcttatccaactttttcatagtaagtgcgaagactgagccagattggccaattaaaaacgaaaacctgactaggttctgtagagccaattagacttgaaatacgtttgtgtttctagaatcacagctcaagcattctgtttatcgctcactctcccttgtacagccttattttgttggtgctttgcattttgatattgctgtgagccttgcatgacatcatgaggccggatgaaacttctcagtccagcagtttccagtcctaacaaatgctcccacctgaatttgtatatgactgcatttgtgggtgtgtgtgtgttttcagcaaattccagatttgtttccttttggcctcctgcaaagtctccagaagaaaatttgccaatctttcctactttctatttttatgatgacaatcaaagccggcctgagaaacactatttgtgactttttaaacgattagtgatgtccttaaaatgtggtctgccaatctgtacaaaatggtcctatttttgtgaagagggacataagataaaatgatgttatacatcaatatgtatatatgtatttctatatagacttggagaatactgccaaaacatttatgacaagctgtatcactgccttcgtttatatttttttaactgtgataatccccacaggcacattaactgttgcacttttgaatgtccaaaatttatattttagaaataataaaaagaaagatacttacatgttcccaaaacaatggtgtggtgaatgtgtgagaaaaactaacttgatagggtctaccaatacaaaatgtattacgaatgcccctgttcatgtttttgttttaaaacgtgtaaatgaagatctttatatttcaataaatgatatataatttaaagttatactaaggtttcagcatttttgtttttagtttaatcataagaattaaagcaatcctgttctatttactttcttagcaacatttgtaggactctatattaggccttttttttttttttcctgagatggagttttgctcttgtcatccaggctggagtgcagtggcgtgatctcagttcactgcaacttctgcctcccgagttcaagcaattctcctgcctcagcctcccaagtagctgggattataggcgcctgccaccatgcctggctaatttttgtatttttagtagagatgggggtttcatcatgttggccgggctggtctcgaactcctgaccttagatgatctgcctgcctcggcctcccaaagtgctgggattacaggtgtgaaccaccacgcctggcctttattaggcttttgatgaaccaatagaatatctaaggtttaagacattatatgagctagattgttccacgacacagtatttgacttaaagatgattggcacttggctcatctttggtctcatcatttttttgattgttcatctttatcctgtggtgttttcttcccctgcataaggaatacaggactgcagtaactctgtacaacattcaactgtcgtaaaagtgtaggaagtaaaatgttaaattatttttttcaccgtgtcttcttccctgtccctgtcctgtttccaagaggcagagctgcaccacttggtgtgtcttttaaacttccagttccctttgtatgcatctgtgtatatatattcccatacacacatctctacgtttgcttcatatctacctaaatgggttctcactttatgtaatcctttgtaatgttcttttttctttcctttttaaaactatttattaaagcagttttagatttgcagtaaaattgagtagaaggtacagagatttcccctgtgtgccctgcccccacaccaacatagcatctccatcactaacattctccacctttgctacagctgatgaacctacattgccaaatcattacccataacacagtccacagttctgttttttttttaatgctgttttagcgatctctgtgaaaagtatacagaggtattagctccattggatcccattatgtaaatgtaccataatttatgcaatcatggtcttgtaaaatggatttacagtttccagttctttgctattaaaatgatttcatgaacatttttgcaacatacatatttgcatacaaaaatgtgttttgtagaatggatttctacaaatgaaattgctaggccaaagggtgtgcagaaataaattgatgttgagctgaagtcttcagataggattgatacataagttcttgagcatctgcacgtgaatcactggctttgcacattacatgcagttttctagtctctgctccacattgcccaggaatcatggtcttcaaaataggattggaagaaatacaatgtggtaagtgtgagagaatgtgggttttgtgttctgaagcatactgaagcaagtgactttaggaatttaaaaaaatggtacaactcaccttattttgagctcacggataatgaaaattgattatgttgttaataatcagaatatagcaccctattccaatataactccttatccaaattcaagtagcctgcagctggaagcatacttctttggagttaaacctccaaggagggattcagaagatcatggcatatgagaggcaagactagattgcagctcaggacagagcagcatgcagcagcttgcattgtgaattttagctccagatcctgagaggacccacagaccctctgatggaagtggacttctcctgcaggaccggggagacaccccaaatattgtgagttgccccaaatgcggaagtggtacagggagaccctcctctaccgaatgcgcagtcccactggagcagctgaagttttgcttgcgggagaagtttctgactttacctcaagctgagtcaagttagagagctgagcaaaatacaggggtggaggaagcagcagaaaggccctgggagctcgctgagtccccaagcagcccattcctgcctggcaccacagggatccatagggagggtggccagaggagcagggggtaaaactccacagggagaaggaaatctctagctgaactttgtaacaatttgaaaggggcaagaagcttcctggccggaactcgggggagggtgcaaatcgggcgtacagacttcacaggcagaggaagaactaaagcccttttctctcccagctgggaggaggatagccttgggcaagttttcaagcccatcttgccctctgcctggaaacagactcagggctgttgaggtgggcagggtgggagtgagacaagcccttcggtttgtgggggagctgggtgaggcttgtgactgccggctttcccctacttgcctgacaacctgcatgactcagcggagacagccataatcctcctaggtgcacaactccagtgacctgggaatctcactcccatttccccccagcagcctcagcaagacttgcccaaggagagtctgagctcagacatgcctagcctcacccgcacctgatggtcctttcctatccacgctggtagcataagacaaaggacataatcttgggaattctagggctccgccctccactggttcctctccacactactatagctgatgcttcctgggaagtaccaccttctggcaggaggccaaccagcacaaagataaagcattaaaccaccaagactaaggaccctcatggagtccattgcactgtccaccacctccaccagaacaagcactggtatacatggctgagagacccatagatggttcacrtcacaggactctgtgcagacaacccccagtaccagcccagagctgggtagactaattgggtggctagacccagaagagagaaaacaaccactgcagtttagctcataggaagccacatccataggaaaagggggagagtactacatcaaaggaacacccagtgggacaaaagaatctgaacaacagccttcagccctataccttccctctgacagagcctacccaaatgagaagaaaccagaaaaccaaccctggtaataggacaaaacaaggctcttcaacacctcccaaaatcacactagttcaccagcaatggatccaaaccaagaagaaatcctgatttacttgaaaaagaattcaagaagttagttattaagcttatcagggagggaccagaagaaggtgaagctcaatgcaaggaaatctaaaaaatgatataagaagtgaagagagaaatactcatggaaatagatagcttaaggaaaaaacaataaaaaattcaggaaactttggacacacttttagaaatgtgaaatgctctggaaagtctcagcaatagaattgaacaagtagaagaaagaactttagagctcaaagacaaggtcctcagattaacccaatccaacaaagacaaagaaagaagaataagatgcagccataaaaaaggatgagttcatgtcctttgcagagacatggatgaagctggaaaccatcattctaagcaaactattacaaggacagaaaaccaaacaccacatgttctcactcataggtgggagctgaacaacaagaacacatgaacacaggcgggggggaacatcacacatcagagcctgtcagggggtgggggsccgggggagagatagcattaggagaaacacctaatgtaaatgacgagttgatgggtgcagcaaaccaacatggcacatgtatacctatgtaacaaacccgcacattgtgcacatgtaccccagaacttaaagcataataataaaaaaaagaaaaaagaataatatgaacaaagcctccaagaaatctggaattgtgttaaacaaccaaatataagaataattgttgttcctgaggaagaagacaattctaaaagcttagaaaacatacttgggggaataatggaggaaaacatccctggccttgtgagatactagacagccatatacaagaagcataaagaacacctgggaaattcactgcaaaaagatcttcacctaggcacattgtcatcagattatccaaagttaagaccaaggaaagaatcttaatagctgtgagacagaagcacaaaggaaaacctatcagattaatggcagatttctcagcagaaaccctacaagctagaagggattggggcactatcttcagcctcctcaaacaaaacattttatcggccaagaattttgtatccagcaaaactaagcatcatatatgaaggaaagatacagttgttttcagacaaataaatgctgagcgaattcaccattatcaaactaccactataagaactgctaaaaggaaccctaaattttgaaacaaatcctggaaacacattgaaacagaacgtctttaaagaataaatcacatagggcctgtaaaacaaaaatacaatttaaaaagcaaaaacaacaaacaaaaaaccaaaccacagaggcaacaaagagcatgatggaagcaacagtacatcacatttcaatactaacattgaatgtaaatggcctaaatgctctacttaaaagatacagaaccacagagtgggtaagaattcaccaactaactatctactgccttcaagagactcacctaacacataaggacttacacagaattaaagtaaaagaatggaaaggggcattttgtgcaaatggacaccaaaatcgagcaggggtaactattcttatatcagaaaaaaacaaacaaacactttaaagcaacagcagttaaaagagacaaagagggacattatataatggtaaaaggccttgtccaacaggaaaatatcacaatcttaaacatatatgcacctaacactggagatcacaaacttataaaacaattactaatagtcctaagaaatgagatagacagcaacgcaataatagtgggggacttcaatactccactgacagcactagacaggtcatcaagacggaaagtcaacaaagaagcaatggatttaaactatactttggaacaaatggacctaacagatatatacaaaacatttcatccaacaacctcagaatacacattttattcaacagcatatggaactttctccaagatagaccatatgataggccataaaataagcctcaataaatttaagaaaattgaaattatatcaagtactctctcagaccacagtgaaataaaactggaaatcaactctaaaaggaatcttcaaaaccattcaaatacatggaaattaaataacctgctcctgaacgagcattgggtcaaaaacaaaatcaagatggaagtttaaaaattctttgaactgaatgccaataacgacacaaccaatcaaaacctctgggatacaacaaaggcagtgctaagagtaaagttcatagccataaatgcctacatcaaaaagcttgaaaaagcacagacaacctaaagtcacatctcaaggaactagagaaacaagaacaaacaaaacctaaacccagtacaagaagaaaataaccaagagcagaactaaataaaattataaccaaaaaaaagataaatgaaacaaaaagctgatcctttgagaacataaataaaatagaccattagcaagattaaccaagaaaagaagagagaaaatccaaataacctcactaaaaaacaaaacaggagatattacaactgacaccactgaaatacaaaagatcatttaaggctactatgaacacctttatgtacataaactagaaaacctagaagagatggataaattcctggaaaaatacaatcctcgtggcctaaatcaggaagaattagatatgctgaacagaccaataacaagtagtgagattgaaatagtaattaagaaattataaaccaaaaaaagtccaggaccagatggattcacagcagaattctaccagacattcaaagaagatttggtatcaatccttttgacac
